United States Patent Application Publication US 2007/0059710 A1 - sequence listing, part 6

SEQ ID NO: 10012 - DNA, 17150 bp, Homo sapiens
attgcttgggagatatttctctttaaagtgtcaggctgacattaaaccaccaactggacattcaaccctcagggacaagggacatgggacaaataaacagtattagctcttacagccaaaataggaacctaatgaaccaggcttgcaggtaagttttgggttctgtcttgattacatcagctgacacatgattgccactgcctgccacgccatccacgggctctaccctctaccatgtaaaggagagcttggtgggagtcctaaggtaaatcatgggaaggcctcatgtcatacaacaaggacattcctaacaagttatcatgtaaaggaaaagattgttcattcaatacacttttctgtgtagtataattcracagtgcaaaccaccacccacaatttttgtttagcatatttttatttttgctcctccccatgggttcttttagcagggaagcctctaaaaatgctaaggatattgaatggttccttagagcaggtctcattccaaatactgtacagctgttacaggggaattctttaaagaacttaccatgattgaagaaacaaaattggtgtatataaaataagtcttagaaatatccttaaatagttttttgttgcggtttgcacatcctgaaattctaccaaaaggattgaaaacagcacatagtaaaaacacaagactttcaggaccaaygacatggccaatgaagctgatgcaaactcttcccgcagcatggctagagtgtccaggttgaagcataataatttttcagctgaggtcacaagaaaaaaggaaaatcccagatgctaggaacacagaaggaattaaaagtcagagcagtaagcagtgagctgagtctggggcacctgaggtggttgccagaattgaaaattactcagatggccaggagcttgggttttgccatctggagcaggagatgaagcctcagcactgcacaagacacagctgcaccttcaggaaaccggggaatggaggcactacccactggcccagagagatgggaaggaagctcgtccccaagccaggagattgaaaaattggtcctcgctggtcatacctctgggacatctgacagatgcaaatgcaaagtgctccgatcccctgtcatatgagtgtcacatttctgaaggacttgacagtttacacaattctttttaaatttttttatttttacaataaccacttaaagttttttaaaaaaattttaacttttattttagatgcaggggtacatgtgcaggtttgttatttaggtaaamtgcatgtaacaggggtttggtttacagataatttcatcacccaggtagtaagcataggacccaatrggtattttttctgatcctctccctcctctcaccctcaccctcaactacgccccagtgtctgttgttcccctactagtatccatgtgttctcattgtttagctcccacttataagtgagaacacacagtatttaattttctgttcctgtgttcgtttgcttaggataatggcctctagctccatccacgttgctgcaaaggacatgatctcatgcttttttatggctgcatcatattccatggtgtatgtataccacgctttctttattcagtctactgttggtgggcattaggttgattccatgtctttgctattgtgaataatgctgcaatgaacatactcatgcatgcgtccttatggtagaacaatttatattcttttgggcatatacccagtagtgggaytgctgggtcaaatggtaattctgttttaagttctttgaggaatcaccacactgctttccacaatggctgaattaattcacactctcaccagtagtctgaaatgttccttttctctgcaaccttgccagcatgttattttttgacttttaatagtagccattctgactggtgtgtgatagtatctcattgtggttgtgattcgtttacgcaattatttcacaaggcaaaaaatgttgtgaccatttaacagataagcaagtagaggctcaccaaggctccacatcaggtataaagaagagctgggcccaaacccaagtcctttccctctgcagccctgcctgtagcagaattatgggctcctcgggccacctcctatgttcaaaacacccaggaaatgggcaggctggcattgcaggcactgaggtcaaaggcgcttgttctaaaatgaacacctgtcatatcctggccaccaagaggtgactcccctcctttcccacacctgcacgctgcccgtctgagtagggatgtgagaagaggggatgtctagtgtggagtgagcagggccagaatctttggacactccaaagctgtgcccacagagtgggagtctctttttttctttcttgaaagccacttgaactttgtcattgcaattaagcttatctcttcttgtgtttgctcagctagtgggtggaagatgtcattaccctctcctaactttatggaaaactcatgagtattagtttttgaaatggctactgatctctgtgccctcaagattcacacacacacaaaaaaaaaagacaaagggaagtcatcgggggttgcctaagaatggccatatctcagacctgggggagagggggagtcctggcctggcgttgatcagctcaatttacttgtcaggctgcccatctgccagggaaactgtcaaggcttcactggttgtgccaggcccttgaccaacctctgggtcagctgcattcccaatgctgttctgagtctgcaggcgttgcctggacagggtaggcaggaagtgcagggtgaggcagagtggtccacaaggagacagctcatgggtcctgctgttcctcagacaccaggaaaggtgcacctggtccctacttcacctgaggcctccggggttggtgctgacttgctctatggagaagctttcatgacgctccttcccactcccctccgtagatcccagaaagcagcagtgtggggcatgatacttgacatttgcgatcaaggggagagggcctagttgtggaatgtataagccagacatccctttatctgagcgggatgtcaggcaggcagctgggggcatgagataacatgggcacttggagcagattctcccaaacgaagcaactgatgggtgtgatgggagttgggcatggtaatgactctatcacggtcattttcctcggtgattatttcattgattttaggctgcaaaactcctaagctccccatctaagcaagtgtttacgtattccttccttgacaaatgctagaagagctctttaggtaggtagtgaataggatctcaggtatagagctgaatttagccctgggctgaaccttcacatggtcattagacagacatatgccagctattggtgcaggctttaggtgtcacatgtaacccagawgggatctaaataaaatgaccttgaattcctccaaagcccttcctaggatgtctagggacctggggaaccctgtagggaatgcatccccacagacactccacttcctgcagtctgggggagggacaggaagacacacccagcctctcctggtctcctgcatgagggagctgcccttctcttggtactgcttctgcatgtgccatctcagcctcatcacatccatccagaaataaagctcagccttgcatcattttccacttgctcacatattgattcaggcactatattttactgaagcttttgaaatagttggggtggaaattaaagaaagatggatggggattcactgcagcaaatgagcagcttcaaagccaatgccatcctggagctcctttctgcagtctgggggagggacaggaagacacacccagcctctcctggtctcctgcatgagggagctgcccttctcttcaccagcttggctctcgctgacacacgggtctgaggtctggggtctcacacactctgtctcccaggcagctaatccagtcatttacacacacacacacacacacacacacacacacacacactaggaattctcatgccagttcttaagacaatggattttttacttccttrcatatacaaaaatgaaaaatcagcatcccatctggagaccagggtctaatatggacccctttagtacaatagacatgttaaaagatgtataatcaaagctcagagcaagatgagagaaggactgtgggtgtgcccatacttctttgagccacctcgccccttcctgcccgctgttcaggtagtcgtggtgattataaaaagccataagttctcagcatgcaggcccacttcgcttgctgcagggacagccccaattcatggcctgggaggcaccttgtgtcctagacactgtcagaggagggccaagcagggagggccagagcacccctctgtgctggagggaaaggtctgctggtgccagaatctgcatggcaggacactccattagtgagtgttctctgcccacastgctccaaaggtgaggacctccctgtggcagggtacaccttaacaccacctgtcagggatgctgtagaaggaccctggcactgggactgtgggtggaggagagaacttctgaagtgctttgctggatcaacatgtccaaatgctggagaccacggagggcagagagagtggcatggacgcccccgatgtgtccacttggccctgtggctggaactgtggcttgaggagaaggaaggaaaaaggatggaaaggtagactggagttgccttttgagggctggcagccctgctagaagtttaggcaatgggagtcattttccaagccaaaaattagaactcatgatagggamatggaagtgttattgggggtggccatcatgacccgtcacgtgacactaggccatccaggacctgtggcctctgaagtgawgggaaccactgaggctcatgcctggagcagtggcccgactcagcctatgcttcaggatgatctgtctaaccacagagtagaggaggcccagaggatgaaggctggaggctgcaggtgaaaaggttgacgccaaagtccagacaaagaagggagagaatctaggggtgagggggtgcttgtaargagctgcctcagaggcaggaactgggacgtgcacccattgggcaccacgcctctctgtgcttcacaacaaactggcacatcccaaggccactggaagccctgctgggccatctccccaaggccagtgctgtacacataaccctacaagrccagtttcctacacataaccctacaagaccagtttcctacacataaccccagatcccttgtcctgtcttctcagtggggctggagcaagtcagcaggtgccactttctcctgccttgtctctgcctaataaaatgcgtctcaatgttttacacctgccatttagcatggactgctttaacacctcaaaaaggcctgtggaggagcctataatcatcaaggaggaattcccagaatacaaaataacactagcggctgataacaactctaaaaaataagtttgtgtaataatgggggtgagaagagatcataaggttatgtaaataaggtgaggttttgagttcaaaggaattctctggtatttttctgtgtgtgtacacatgcacccacacacttgtgtgtatatgtgtacagacatatataaacacatgcatataatgtgtatatatgcattacatatatgcacattcatacatctttatgtacaaaatacatatatgtatatataaacaccgatgtacaaacacatacgcacacatctatatacatacacatgtgtgtgcacatatacacatacctgcatatrcacacatttcgtggggtgyggagagtcacttaaaggctgcagggccataaggcttcctgcttgactgatattcattaatgtttgctgaattacagcaaacctttgctgtgcccatcctgttctttatcattgaccattgctctcaggagttaatgtttgaacctggccataaaggaatcaacagctgctgacctctggccgctattcgaagggaagggagccccctataaaacagcctacagtggacagtctggtcggcagagccgcaggtcagtcgtgaagagggagctctattgccaccatgagtttctccggcaagtaccaactgcagagccaggaaaactttgaagccttcatgaaggcaatcggtgagtgctggactgaaaggcaaagctgtgggtcacatcagtgagggtctagctctaccagcagtggctatttagggtccaaatgttgagatggggggagagattcaggctatatacacaaactagggggcattttactgacttctggagttatttgcagcaagtcctcactgcacaaggccaccccataggcaagtggaaagagcactgaactagggtgtggtctggattgatggccatgtcattggcacttcgttgtgtgatcctattcctgcatttattcattcttcaaacaaacagtgattcaaggccaaccacacactgagcactgtgctggatagataccagggagacagatgataaaggcaataaggcattttcttatcagggaagagaagagaagaaataaaggtaataaggcattccctcaggtgtatggagcgctgactgtgccaggcgactgtgctgaccatgggatatgcaataccccatctattccttgccaaaaaactaagctgggtaccrttattttcccactttacagttaatgcaactgaagcccagaaaggtttagtaatcacaagcaaggtcatgcaagtaggaagtgtttaagttaggattggaagcaggcactggttctcagagaccctgctttaacccctgtgcctcctagggtcatgtacaggaggatgtggcycacagagagcatggggggatggctcagtggaggtaaagagaaggctcaggctgagctttggaagacaggtgtctagggaactgggggcagggagcatgctccaggcagagggagccctataagcaaagggtgtggcatggcaagggagggtgccaagaatgagaagggtgctgaagacagcaggggcagggagagaaggaccttcagtgctgccagagaaggatcttctgcaggcaagccataccacctctgtgtctctcatctctccctcatgcaacaggaccctctgtgctcactgtccacccacaaaatttttgtgaacctcawtttgtataacagcatagacaagttctgaaactggtaaagctctatcccagggcaagggattgctggtatgtcttcctccagagccttgactgcagaggtggacacaggcttgcctggcacagtgccgctttgtgtatgttggcctggcatgattatcagcagctcccctttcacttgcaggagggacctagcttggaagatcaactctctggtcaccaggggtatggggaatgaaatgctcacactccaagagcaaagtcatcaaaggaggagggaatgaggaaggagagtgagcaagaaccagggtgcttacaagaggaacggttcttcaggccagaagagtgtcctttttataaattgactggcaagatagcagcaggccaggccaggtcactgtcccttcctttctgaggccacagcygatgctgctgacaagcccccagtgagtttctgtggccccttkggagacacagtgcccttctctgtccctccatgtcatgtcgtttctctcacctacctaccacggtcatgaaactcccacctctgcccatatctaaacctcagacggtttccaccaggtctgccggaagagctcatccagaaggggaaggatatcaagggggtgtcggaaatcvtkcagaatgggaagcacttcaagttcaccatcaccrctgggtccaaagtgatccaaaacgaattcacggtgggggaggaatgtgagctggagacaatgacaggggagaaagtcaaggtaggagggcatcccttctgctgtcagaactttccttggaacctggccctgggacctcattcctcaaggctcaaacctcacaattccacccacagataccatctctgaacccacctcccatgtgggagaagcagagagacaaaggcagctcttagggaagaatcttatagagaagctgctctcctcttcccagggactgtctggggggtgttccagcccctaaagtctgagctctcccatatggaggatatgggagaaccaggcatacagcaggattctaagtctcaggttctcccaggcccagtgctcctagcactaagagtcctctaagcagggcccaggagtggggcaagtgggagtttgtgaaaaacccttaactgagcccaaagtcaactggccttcactgaacctagagctggtggtgatagggagagacttyttgaaggaggtgctagcaataccagaataccagggccccagacaggtgctcagaccctgccttcaggggtggtcacaaagtctctggcttcagccaccccatctgtaaaataagaacagtcaacctccctagactgaaggcagtgcagggcagcatcacttctgctgggcacaactcatggtgtgcaatgacagctggggtgtgggctgtgtgagtggttggcagatggtggcagggggatcctggcaatgggggtgcccgtctcctcctccctctgaaacactccatgctctagcagccctcttctctcctccccgtggacagctctgttcattgggctgggcgtgtttgctttttatctcttctggtcactctttatttctgcctctccaattagaacattacaggtcaggatgattttaggaggataatattcttgatgtgctcatggtcaagggatttaactatgggccttttccaaattttctttttggaggcaaaatgtttaatgttgcccagggtctttggctccctgctgggttcctgtcrtctcttccaggatgtataagggcttggaaggaggccacaatatgaaaagttaacgctctgggaagaataatacatacctggttgggcgggtggctcatgcctacaatcccagcactttgggaggctgaagtgaaaggactgtttgagcctaggagttcaagaccagcctgggcaacatagcaagacctcatctcaattaaaaaaaaaaaaaaaagaagaatacataccaaagcaaaatatgtattctctactggtcaatatttgaattttgccactacctccctccattagcttgggagaattgagattttacttgatttgattttagcatttgtatttggggccacttaggtgttccatgctcatttctagatcacatgccatgaattaaagttctgacaaaagaagtcgtgacattttatttagttcttaaatgcacctcacttctatttggagccagagaactagaggcttgggatcataggaaccagagcattttggttgttatgagctgagacctgtgcaaaggaagcaacttcattagcaaggctcttgccccccaccaccccttcctcacaggtcacctctctgttccctgcagacagtggttcagttggaaggtgacaataaactggtgacarctttcaaaaacatcaagtctgtgaccgaactcaacggcgacataatcaccaatgtaagttggtggtgctctgagcgtgtggctcccagtgcttgaggggagaggggaggtgaagcatggggagcggctcacataccctaatgccacccctccaccctycaacccccaaacttctttcctgtggtcagtatctgccagcactwactgaggatccatcatgtcccaggcagtttacacacattatcactaaycctttctgctcagcgcaaccaaccagccacagaggcctccacctgccctgcatgcccagggtgcttcataaatgcctttgcccatttagcgtttataaagagaatcccattcatggtcatattatggcagcttacaagcctggcacagtccagttatgcagtcagccttggtgcctggctgccagccacatcctrtaccctatttgggggtgaatggtgcagtgtttctcctgcaggtatgtccccctgactcttctttgcccccagaatatgctttagggagtcacagacaacagaacactgccycagggcgctgtcatcactctattcaaatggaaaaattcttaaactagagagagtgtgagcatcaaccacccaatgtgcagtttccacctccgccccagcacattcccaggagagcaggggagcaggagatgagctrtcctgcagtaagtcctggccaacgccctttgataggttccatctcacctaatcctcctgtctccttcgagggaggctggatgagggattcaatagacaggttgacctgtccaagtcatcagctaataaatgttaaatccagggctcaaacccatcaagcagcaactattgcattgctgctgaaactgaggggctccttttcaccctgatgacatggtatgtcattccagcagtcttattcaagagaactggcaggggtggaggaaacatccttaaaaactcaaaagctgatgcatccactgtttttatatgcttcacagctataggaggacaattatgcactacccactgccttccargctgtgtgcctagttgtgtccatgtacatgtatccttggtgctcaacatgtatttggtgcatagtaggtactcaatgaaattttgagaaattagattgggctggtttggatggtcttgctataacagtcattgatgtagaaaagaattcagtcaaaggcaggaggactttccaggtgaggaggagaagtgacaaagacttggcataggattttggaaaacattgccaacctttcctccggtcctacaggaaaccagaygaatttttgaattgtttcatatgccaacatatttggtgctgttttttaagcttaattttgttttttatgcttaattttgttttttacaatacaacatcagatgaacacttcataatttcttttctggctttcagaccatgacattgggtgacattgtcttcaagagaatcagcaagagaatttaaasaagtctgcatttcatattattttagtgtgtaaaattaatgtaataaagtgaactttgttttaaaaaaaaatgtcttctcaatgccttttcattgatggtgctattgctcaccatattctcgtaaatatactttcgtaaatgttgataatccacatgatycacactaccaggtcaaatccgaagagtaattccctgaacacaaaacccatgctgcacacmcaggtgttctgccaggaaagccaggtgtggctagatctgcaggaaggccctggaatgccctttcccagtcaggcacacgggcaaggagctggagccagaggatgtgcagtgggctggccttgagggtgctctctgtggggacagggagcaggaagactgggcagaaaaggagagctatacccacaagcacagccacagtaccagcccaccagcagacaggtgcagaaaggtcgacactgacccgcccaataaacttttcctcctgtgggaggctgagcaaagggcttagtgagaggcgccagaagtggacagaggaggctcagtggaagttccctccatgctatgggcaggggcagaaggtagaggaaggggaggagtcccttcaacactactttatgccaaactgttaggggttgagttgcattcccccaaaatttatatgttgaagttctagcccccggtatcttgtaatgtgacttcatttggaaataaggtcattgcaaatgrccataggtgggcccctaatccactatgtctggcgtccttataaaagggggaaacttggacacagagacatgcacatggggagtgtccatgtgaagactagagctatgctgccacaaatcaaggaactgttcgaagctgagagagagtcctggaccagatccttccctaactcctccagagggggcatggccctgctgtcaccttgatcttaggttaatggcctccagaattgtgagataatacatttctgttgtttaagcctcccagtttgtggtacaatggcagtcctagcaaattaataacagtactcatacccctcagagctgccatttctaccttcacaagaccgttcggcacccagaactgtaagccttgatgaatgactgaatcattcacattccccctcttctcttcccacttctagagttgaaactattacttgttacttggattgtttcccaggccacctgtagcacctccctgccccactctcacctgcaactctccagcccacaacagcgtcctcctccttaaacaggccaccaaccataatgcatcctacctcattgtccagcacgtaacagtcacwctcmtaaatctggcatccaagcccctatatcatgggtcagcaaactttttctgtaaagatccagagaatacattttctcagctctgcgggccatttggtctctgtcacaaatacttatttctgccattgcagtgcaaaagcagccacatccaaatggtgtggctgtgttccaacaaaactctaccagcactgaaatttgaatwtcatataasttgtacatsataaactattactcttcttttaatttgttccaccatttgaacatgtggaaaccattattagtttgtaccttgtatagaaacaggtggcagccagatttggcctgtgaactgaaaggatgctgactcctacagtcatagcctgtccaacctcttttagcctgtaatatacattctaatcgaactaaacaaccttccactcccctcacaattcaagcaccacctgctgtgagatgtcttcccaaactgctccgctgaaagtgctctctccctctctctgccgttttatctggaccagtctttgcaatgccgttcctcctgcctcgcactattattttctccatatatttgttctccttctctcacctgagacttcttctcagccttgaggaagaaacagatccattatttggagaactaaggcagactgaaggaaacagtttcagtctgcctttagagaatgatattacttcagtaagaagtcagagttgggagttacagggagcaagaaaacaacagcacactatgatatgccattcacaaaagtaaactccagatgaactaaaaagctaaataggccaggcgcagtggctcaagcctgtaatcccagcactttgggaggccaaggcaggtggatcacttgaggtcaggagtttgaaaccagcctgaccaacatggtgaaaccctgtctctactaaaaatacaaaaaattagccaggcatgatggtgggtgcctgtaatcccagctactcgggaggctgaggcagaagaattgcttgaacctaggaggtggagattgcagtgagccaagatggcaccactgcactccagcctaggagacagagcgagattccatctcaaaaaaaaaataataaaaataaataaataacaagctaaataaatatgaaatgttagagatagatatgactgtagatagcttccaattatagaagacttttttataccagattttttatgcaaaaaccatctaggaaaagattaataaatttgactacctcaaaaacttaaagttttatataaaaaaggcaccataaacatagtttcaaaaaaaggtgtggcttacataacaaaggttaatagatataaaaatattccccaaatcaaaaagaaaatcaacaagtcaatggaaaggtgagttaaggacattaacagacatctcacaatataaaatacgtttagtcttgtagtaaccagggaggagggatacaagatgaggtaccatttaaaaaatcaaactagtaaamaattaaaaggttgataacrcctggggtttataaggatgtgatgagctctgcctttggtggtaaagatataaagtggtgggctgggattggtggctgatgcctgtaatcccagcactttrggaggccgaggcaggcagatcacctgaggccaggagttcgagaccagcctggccaagasaccagcctggccaatatggtgaaacctcacctctactgaaaatacaaaaattagctgggcatggtggcgggcacctgtaattccagctgctcgggatgctgaggtaggagaattgcttgaacccgggaggcgaaggttgcagtgagccragatcacgccattgcacttcaggctcagcaacagagcaagactctgtctcaaaaaaataaataaaattaaaaaaawawatatatatatatatatataaagtggtgaaccccatatggagcaactttgacagcatccattaatattttcaatgtgaagtccctaaaacctagcaaagccactgttgtgtctcccttaaggagagtttacacacatgcacaagaagcgaataaaggatgtartcgccaaaaactggaaacaaatgctcctcagtaaaaacagggttcgattaactgtggtacagccatactctgtcataacctacaatagagtaaaccaatgaagtagatctgtatgtactgacatagaagtatctctaagacaaagcgtttcttttaaaaactaagttttagaaataatattgacagtatactatattcaaataaatgttgttaaaacatgaaacaaaattatgttgatacatctatgtatgtgaactcatagaaaaaaaatctaatagttggacatcattatccagaacaccaaataatagccattacctctgggaacagaactggtgggaggtcgagagctttttgcattatttatatcgtttgaatcttctgcaaagaactcattttgtgaaactattatttttwatgagcaataaatttttttaaaggcagatgacaaagtaaaaatattgggcatgaagacatggttctagttaactaatctacaactgtggacctcagctttctctcctgtaaaatgggtaagacaatcccttccctcgtggcttttgtaaggagcccatgaaatgatgcaagccaaatgccatccaaataaaacatgtcattatttccattctcagattcctcaggggatgtcagttgggtytgatactgagattgttagcagaagctgtggtgcccagagaagtgaacctctgagaacagatgcagaggctcagggaggaaaagaggtttgctctggcccaccaagccgacagacagtggcactgaggtgctttgactctggagtcatgggagaagaaagtaatgcagacaaggtcttctcagcaaagcttccagggatctgacaaaattcccagtctccccgctaaaggggttcttcccctgagaacatctatgggtttttgaggggattgtttgtgctttttcctgaaaaggagaattaattttatatgttgaatttagattttgtacaggtgcccagagaactttgggccggaagcctgcttaaataaatggaataaacagctgttgatggtgtgggctatttttaccttgacccctccygcacttcgggaccctccacgcctcctctctgcctgtcctgtgggcatcccaccaacagaaagtgctgtttcccggtgacagaccattaatttgcaaagagccagtttggatatctatrtccacacaaaagtagccttttatttcctttttttttwaaactcactgccattagagtaagtacagtgattggtgggcaggggaaggggcgggggtgctgcctaacttagtccatgctttatcttcagagcactttttctgtatacaccagaggcatgttgaccatcccatgattttgtagcatgttttactagaaaaacatggagatgtggaattaaatgcatcttctccacatagcctagcctctttcagccaaagcagggctgggcagtgctaagccctgaggatacagtgatccccgggtgactcactgtcagtgggaccataagcgtgacagtgtcatccactgtgatgcaggtgggtactagctccagyccctgctgcagaccggataggggtggtgcctagaaaaaacatctcagaggcggtatgaaagcatctaagggtatttgcttcacagggagatgtgtataaatggggcttggcagaagaggaggcagagaaggaacagaatctctaccatgagtatcctwtgactctagcaatgagtctgaatttgatcctgaagacagtagagaatcatygaggggttttaagctctaagagtaacatgatactaaayggtttgtaaaaaaaatttttctggccacagtgtcaaggaccagtgaaaagaaccaaagctgaatagagagaggcaatggtccaggcaagagatgctgggggcctcaaccaaagccgtkcccatgaggacggaacatagcaaaaggtttaagcatatttaggaattagaatccacgggctctagttactagacctgggatgtgcgttagcaagatgtatcagttaagatgtatcagcaggaactaacgcacactgtgagaatttaatgaaagtgttagagtaggtagctaggtagacatgagcagggcaggagagggccccccaccaaggaatgtcaggcaatcatcaggtgatggtcaggtagttgttaaactgtctctctaaaataataattggtcacagccagcgccagggaaaagcagtctcccaatagatagaaaatcccttaagatggtggtcagcagcttcccaataagagctcaggatttgggcaagtgggttcaagcawgttcattaagagacaaaatggcggagcttaactaatacatgaccttcctctaggaaccttcaactagtgaggaaaaaaacacctcagatgagcatgtgcgcaactccagtaaacacactgcgcgtgcagccccgcccaagygctggcaggccactgcacatgcggacagcctgccccaaagaaaaatcaggggaggagagacacaaaaacccaggagcatgccaacatataaaaccccagatcaaaggtcaaacagggcacttggatctctcaagtcccccgcttggtcctcttccaaatgtactttacctttcgttcctgctctaaaacttgcctcagtctttcactctgacttatgcccctcagacgaatgctttcc

SEQ ID NO: 10013 - DNA, 214101 bp, Homo sapiens
  misc_feature (180937)..(180956): n is a, c, g, or t
ttaaaaaatagtgacaacaccaaatgctggcaaggatacagaaaactcagatatctcatacattggtggtgggaagtgtaaaatggtatagccaccctggaaaacagtttggcagtttcttaaacactaaacatgcgactacaaaatgacccagcaattgcccttctggttacttatcccagagaagtgaaaactatgttcatatgaaaacatgtatatgaatgttcacagcagctttattcataataacccaaacccagatgctgttcaatgggtgaatggctaaacaaactgtagtatatccacactgtggaatactacttagcaatggaaagaatcaacagttgacacacacaacaacttggatgaatctcaagggcattatgctgaatgaagaaaaaggcagcctcaaaaggccacatactgtatgatttcatttacataatattctgggtttttttgagatggaatcttgctttgttgcccaggctggagtgcagtggtgtgatctcggctcactgcaacctctgcctcctgggttcaagcgattcttctgcctcagcctctcgagtagctgggactacaggcatgccaccatgcccagctaatttttgttatttttggtagagatggagttttgccgttttggccaggctggtcttgaactcctgacctcaagtgatccgcccccgccttggcctcccaaagtgctgggattacaggcatgagccaccgcgcctggcctacgtaacattcttaaaatgacaaaattatagagatggagaacagattagtggttgtcagagattagggatggtgtcggggagggggttgggtgtaactataattaagtagcatgaggatgattctttgtggtgatggcatagttctgtattttgatagaatggtggttatatgaaactacatatgtgataaaattgcacagagctacacacacacacacacacacacacattgtaccaatgacttaatatcataaagatgccaattttttccaaatagcagtagtaggaaacattcttgcttctattacatgaaggctgcagactttttgtggccatattggactctgcatgattccatttgtcttttcattctggatccccacggaaggtgcagccactctttggggcatgatattctcatggcaaatggcagaagctcaagggaggtaggggaagcactaaagcatacaacatattttaagcttctgttccaatgtggtgtttgccaaggcaagtcaacacaagcccaaaaccaatggagcagactggtttacccgacctatagaaaagcatggcaaagatggaaagggtacgaataattgtgaatgaacaatgcaatccaccacatatatttactgagatttgagatttcaaattaaaatctcaagtttatcataacaaatgaattagaaaatgtctatgaaggagaaaagagctaagaatacttgagatctgtataaataaaaaagagaaataagtcagggtaggacttgtatatttggaaatcaacacttgaaataaaaccacaggctaggcacagtggctcacacctgtaatcccagcactttgggaggccaaggcgggtggatcacttgaggtcaggagttcaagaccagcctggccaacacggtgaaaccctgtctctactaaaaaataattttaaaaaaattagctgggcgtggtggcatgcaactgtaatcccagctactcaggaggctgaggcaggagaatcacttgaacccaggagaaggaggttgcagtgagccaagatcatgttactatgctctggcctgggcaacagagcgaggctctttcaaaaagaaaaaaaaagagaaaagaaagagagaaagagaaagaaaaaaaaaagaaaaccaaagatttcaggcagtatgatgctagcagagggatagacaaatggaacaaaatagaggaccgaaaacaaacctatatgtgtataaaaatccattgtaagagagttctggcattgcaaatgaaaggagaaatgaatttcagatagaatgtggacttacacatgaaagacaaaattgtaacacttgaaataaaatatgggagaatatttttatatccttggggtcagaaaggacttctcaaaacacatgaaacaaggcaaaagacaccatcaattaacaaaagaggaaacaggactagctattaaacattaaagatgctcagccatactggtaattggggaaatacaaactacaactattatgagagatcatttagatgaaaacaagtgctggcaaagattgtgggacatggatgactttcttttttttttttctgagacggagtcccgctctgtcacccaggctggagtgcagtggcacgatctcactgcaagctccacctcctgggttcacgccaattctcctgcctcagcctcccgagtagctgggactacaggcgtccgccaccatgccaggctaattttttgtatttttagtagagatggggtttcaccgtgttagccaggatggtctcgatctcctgacttcgtgatccacccgcctcgacctcccaaagtgctgggatttacaggcgtgagccaccatgcccggccagatgactttcatatacaggtgttagaaatgaaaattggtaygaccactttagaaaacaattttagaaaacaaccagtttagacagtttgacattacctagtaaatttgaacgtgcacttaccttaagacctgatgattccacttctaggtatatatcctaaaaaacattcttacacacatgtatcggagaaatatttaagaatattcacagcaacactgtttgcaatagcaaaaactggagccaatccaacatccaaaagtagaatgggtaattaaattgtgttatgtttttacaacaaaatacctatataacagagaaatcagataggtgaatctcagaaacataatgctgggcaaaagctgcaagttgcatgggaataatgcagaatgattctattttaaaaaagctcaaaaacacgcaaaaacaaaccatgtagtgtttagggacacatatatttgtgataacataattattaacacaaaacttaggatggtggtttcctctgaaagagaaggatatgattatagagcggcagatggaagggttcttccttgagtggaagctttagcaaaggcagtttcagtggagtggcagggatggaagccagaatggtgtgttgaaggctgcgttgaagctaacaacatgaaagacagctaatgcagtcagctcattaaagacatgttgttgaaaataggagcagattatattatcacaaagcagtgaaaatgatcatttgcagagcaaacttctttctcacaaggcagaaggagggtgagctagggtgaatataagaggctggctgtgattgagctgaacgtaggggcaagaacagagctgcagcctgggagcccttctcataaagagggagatttaggagtcttcttcgttggtcgcccaaagactgtctgcccacttggagataagcaagcaagatctccaagcagctcagccactgcctgctttggctctcatgagacctcctgccaggaatccccattaatcaaagtctgggaacaaaagcagaccagtcagttcccaggagcgctcacatgtcttgcaggctggcttggrctttctgtttctttcggggtcattgctctgactacccacaaatataacttaaaatctcatctcaatgtgactttctggtgatgttttaaaagcctatcagggaaactgagcatttgcatctttggaagtttattcgagggactagctaggaaaactcaatgtggaaaagtacaagagagaaatgatcacattgaaaggtcatgtggctgggcgcggtggctcackcctgtaatcccagcactttgggaggctgaggcaggtggatcacaaggtcagcagttcgagatcagcctgaccaacatggtgaaactccgtctctactaaaaatacaaaaaaattagctgggcgtggtggcaggcgcctgtaatcccagctacttgggaggctgaggcaggagaattgcttgaaaccggaaggtggaggttgcagtgagccgagattgcaccactgcactctagcctgggcaataaaagcaaaactccatctcaaaaaataaaaagaaaggtcatgtgtacaaactttgactttgagggttatctaggaactcattagtaacctgcctggagagaaacctggagctacaagccagcagagaaaggaaatgtgttcttctatcagctccaggtgtagagcaacaggaatggggcacaaatctgaagaagggctgggcgcggtggctcacacctgtaatcccaacactttgggaggctgaggccggaggattacttgagcccaggagttcaagaccagccttgacctcctctgtgttaaacataaaaaaattagctgggcatggtggtgcacacttgtaatcccaactattcaggaggcagaggcaggaggattgcttgagcccaggagttcaagactgcagtgggctactgcacttcagcctgggtgacacagcaaggccccatcttaagggggaaaaaaaagtctggaaaaggccaaaggatactcagaagagagatttcacatcctgttaggtaaaactgcagctgtgactatggggttgggaaaatttcagaagcagtaggagaaaatcaagaacttccccttcctagtgtggaaacaggctcttgggatctctcctgcctaatgatccctgaaggagagagggaaacaaacatcttaaggaaaaggaagaaatcatcatgtttcttttctcctggaaaccaggcctgtttcagagggaataagaaaagtcggctgggtgcagtggctcatgcctgtaatcccagcactttgggaggccgaggctggaggatcacgaggtcaggagttcgagaccagcctgaccaatatggtgaaaccccatctctactaaaaatacaaaaattagccagggatggtggcgggcacctgtaatcccagctactcaggaggctgaggcaggagaatcacttgaacctgggaggcggaggttgcagtgagcctagatggtgccattgcactccagcctgggtgacagagtgagacttcgtctcaaaaaaaaattttaagcaagaaagaaaaaaaaatcagattcrtgataagcttgtcccaaaacctcaggtaagattgatagtccattttagggtgctgcttgcctcctcttccatctctccgcctttggagagcagatacctgtccatgcttcttcaaagggtggaatgagatcccatccatcttacatgtattcaacagtagcttattgaatgcttcctgtgttcagggagctcttctaggtattgaagaagtggctgtgaatgaaaatagacaaaaccagactgagataatggtatgtaaagtgtgatatgaatatgggggtcaggctcgctcaatgcttttgccatttccatatgggatgattccaacaagatacttatagtcaagctgttagaaataaaggcttcctttcccctctccagctaccccaataaatctgggtcattcatcattgttgttcagtttgtactgagcagccccagttaagtgagctatggttatattgaaatatccacttggccacgaattgagtgaaggtgggaggttcctcctgctaattctcctcccctcccaatacacttcctggcaacccccacgcggaaaacctcaccctactataggcccccttcctcccactcttcagaaggcggtggccccacccaggagagggctgcagatcggggccagccccagggcctccgcggtgccacctctctctcgcgagggtccctgccgtgccccggctcgccgctgggaggcgctgcggcaccggcgtakgagccgccggcaggggtggggcggggccggcgggacrgggcagagggccctgcggcggcggacgcggcgggctcggccacaggtaacccgcaggagccgagagcgctgcctggcgcgcgggcggctggaggcacggcgctgggcggcgccgaggccctggggccgccggagccagcgggagccagtccccgtcttcgcccctcgccccccaccgtgtcgccggccttggtccctgcggcgcggacgtccggcgcgggagagaaaggtaccaggcgacctcgccggctccctgggacccccgcttacaccggggtgggcgcctcaggtcggggaggacgctgtcgggggaagggggcgctgctccctcggcaccccaggatcgccgactgcccgcggaggagacccggacaccgcgcctcgccccctggcctgcggcctccgaaaacgcccggcgcgagggggtccccccggggcgcctccctcttcgcctggcatcagttgcctccctggaatatggaacttcgggcgagggaggtggagaactttcttctggggctcgtccctcgttctcctgctcgcttgcagtttgaaggaagggcggtgggggcgggggtccgagtaccccgcggtctgcggcgcgtaggagggtaggtccctggcctgcggccgcctccgaatgaccccgtccctccccgccctggacgacagcactagggtgcagtcgcaggagaggggccgatacccctcaggagccccatcggcgaagcctcagcaagtggcatctcccggggtccagagagtcggcgtgctgtctggtttgggtccagacatcagctcacccaagcttatcttgggcttttaagtgtgttgcttccggtagatctcggggactggaggggaagtgcagcattatttgtgacccaagagggacttgaatgtctcaaagctggtcaagaatgtttcccccgcgaggtagcatgagatgggtcacgtggtagtaaagagccacttcgggcccgtgagatggagttctgactccaccacttgttaggtgtgtgactttggaaaacccacttctttaaaccttagtttttagaactctaaactgcaggtattgtacataacctcgtagtattgtgttcatgcagtgaagtgatgggaatgaaatgcttggcattgtactcttgtgtgttagacaccttttgcgaacctgttggatgttgaattcattcatgcttaggttctgttaggccagtgtaagtggaaagaacttgggcaatgaagacaaacacacctgggtccaaggtggtcccatccatggtatactgattgggggtttctcatccccaaaacaccaatagcagccttggcggggtttttgttgttgttgttttgagacagagtttcgctctgttgcccaggctgtaagctttgacctccttagctcaaccgatcttcccacctcagcctgggaccaccacacctggctaattttgaatttttttattttactagagacagagtctcactgtgttgcctaagctggtctcgaactcctcctgtctcagcctcccaaagtgttgggattacaggtgtgagccactgtactggtctgcagccttgttcttgagtgtagtaggtgtgtctataccgatacatgttacactttgtcatctttagtatttgtttagcatatggtaacaaaaaattttttaaaaattagggatacaaattaaaattggggagtattttctgccctctaggtcatactggacatgggggaagggtagaagagggatgaagaggaattaaagagaccagaaaacaactagtcgcagtgttgggaggtataaaccaatggtaatttttaaaaatgtgaatttattaactccttgttttttcatggtggcaccaaaaattaatcttagtctcccacttaaactcatcagcctccccaaagcctttccagataagcatatgctccatgtaaaagcagactgcctgcgatccaactcagcttagagacaaggcacacttccaactcccaaggcctccttcttgtatagagatgctggtgctgccactgtgaaatacatcatacactcagacagtataaaccttagagtgcaatgtaaagaataacaatagatcacacccaagtacgagtcacccggctgaagaactagaacatcgccaggcccctggagcccctgagtacccctctccattgccttccactcacttctcgcctcccacccaaggaaccactattctggwtgttgtgttaactttttcccttgcttayatgaaaaaccctgaggaaaggaagtttcccaacaagcatttccacaataacctggagcattctttatttttctttttttctcaaggagcattgttattgaacttaaaagcaggctattgagggtaagatacaaaccacaaaaaagccgaaagtctcaaagtcgggggatcttttagtctctgtcttcttccaagtttctcctgtctccctggcacggatcccgaaggtgtgttctgtctgtgtaggggagacccagtctcttccaacatagattgatggctgtgattttaaaagctttgcttgagtccctaagaagtgggaaaacagtaatttgggtgcgtgcgttttagaagtttttttaaaaatgcaaattatccagaaggcattgtgtgggatttgaaggattaagctaagagtgacctttaaaaatggttttaacaacccaaattcctcttcctggttgatatgtttgtgttattgtctttsttttatttcttcaaggtcacatggctttccttggtgaatcttacactgttttgttacttcttggttaaggcaaagattctgaaacttggtttcatggagcccttagtgtctgagttaattttttcacaattcccttaggcttcagtagttagtaattttttcacaattcccttaggtttcagtagttagtagttaggttcaaacaactgagtatttacttagaagttgtttgaaaaaataatatacataaactgagagaaaaaatattttacatcctttaaagtcataattactaaccgtatgtgtgtgcctatactacttttcaaaccttgggatcgtgttggacactgccactctcatttcctgtttcacattaatatttccgcagcatttggcttttatcacagcagccacagaaaacccagctttgcaaagatgtattgtcttggataggaatgtaacatgatctactgytgaaactgcaaactacctccagttaataggttcagcagtgtccagacatgtttggtatactagtttccattgaaattttcagattttctacattgcccattttaatttgctatagttgcaaaacacccagtcagggggtccaaaatagtaaactttgaaaacattatgctaggtgaaataagttagtcacagaagggacaatattgtatgattctgtttatattaggtacctagagtagtcatacacatggagacagaaagtagaatggtagttaccaggggtagggggaggacagaatagggaattcatgtactatttttgcaacttctatgtaagactaatattatttcaaaataaagtttttaaacgttttttaaaaacaaattctgttgatggtgccccactgctggactgtaccaaggcactgaggttagggacagcagcagagaaaagcttaggggtgacattatctctatttcccagctcttcctcatcccgtcaagggggaagagatggaagaaatagctatgttctctctcttttatagggaagtgtctgcattatttactggtgggttcctttataaacctgaggatcagctattaaatttgtcactaaaataagaatttttaacctggggttcagtggtgggctacaaatactctaagatctcccaaaattatgtataagtatttaagtgaatgctcttatgtatgtttgagggggaagaagttccatagctttcatcagattctcaaatggtttcctaagtcaaaaaaggttagtaagcgctataaggaaatatttacagattcctacctacccccaccccataaaaggcccctttatttggatgtcttatcccatttcagttctctgacatatstttcccccaccagttacaakaggctttctttctgctcagaccccagataagcccgaccagttctttttcctcagagcccccagctattcatctggatcctgaaaactccaggaccaattcctcaagagccaaaggaagtcccagratgaacatcttggacttctgaatagggcagatgtggaactgaagtctcacaactgccacatctctctgtgccctccttaggtctagaaaaatatgaagtaaataataatatattaggtacacagctatggaaaaactcatgaagatggtactgaatgactgaagtccagtacattctgctttgggggaggcaaatttaattttaagagtgtcttctggtttacactttatgttccaaatgtattctaaatatagcatacaatacgtcctaccttgtttcatatccagtgatacagatgagctatagaatttacacagtgttagaaaagatgttaaatatcagaatttacttaataagtaggtctctactcattcagactggtttcattttattttattttatttttgaggcaaggtctcgctgtcacccaggctagagtgcagtggtgcaatttcaactcactgcaacctctgcctcctgggctcaaagccatcctctcacctcagcctcctaagtagctgggactacaggcacataacaccacgccctactatttttgtatttttggtagagacagggtttcaccttgttgcccaggctcacactggttttaaactcagatgaatggggtaggtaagtggcaaaaatggtaacctgcaagctcttcttatacatatgattcctcaatagttgcatttatcttagaaatacttcaataaatcatgatttgagtctttcaccgatacaggtatattctgtatgctgtaaggtaggctaactgctgtaacaaacatttccaaacctcagtggtttaatctagctcacacaagtcctaatcagttattcctgttgggcagctctcctgggtagctgtccttcaggtgactcagggatcaaggttcattccttcttgtgatgccaccatcttcatgtggtctccagagtcactgcaagggggaaagagtatggcaaaaggaaaccgtgttgactgccttcaccagcaagggaaacacatcacttctgcttacattctattggcagaaccagtcacatggcctcaactagattcaaggaagctaggaaatacagtccctggctgggcaactgtttcttagtaaaaataatttactttgggaaaggaatakaactctttggtggatgagtagccattttttgtacaataaggtgctagtgttttaactggtcaattaagtgtaactgcctttatgtaatttatttctaacttttttttttagacaaaatctcgctctgttgcctaggctggagtgcaatggtgcgatcttggctcaccacaacctccaccacccaggttcaagtgattctcctgcctcagcctcctgagtagctaggattacaggcagccaccactgtgcctggctaatttttgtatttttagtagagtcagtgttttgccacattggccagtctgatttcgaactcctgacctcaggtgatccgccggcctcggcctcctaaagtgctgggattacaggtgtgagccactgcacctggcctatttcttactttctaaacatatatgtgtatatgtatatatatgtatgtgtttgtatatatrtatatacactgtataaataaaatgttatgtcttcatagtggagggtgtggagaagacttctatacaggaaacaaatgtatcataattgccatgtgagcagataaaaatgctattaagccatctaggctcagacatttattagggaatgaagcatatttaatttactcagaatcatccaaccatgtagagaattgtacatttgagaaagacggagcagagaaagattagcaaagaacaagaatatgcatgtcttaatggcttcgttaatgttatcataagagtttaaaactactttaggctgctggcaataggctaggtatgaaacttattcccccttcaaaaaaaaaagtttttgccatggaatgtgttacataatcacaaagtatatgtgtcaattttacttatttgctcttaagggaaagtaaaattgtaaaatttgtatctgtttttcttatttgtttgaagtaaatttgtgcccaagagggtgcacagcatcaaatggtagacattaaaggattacaagatcatgtgaaagatcccaagacccagttrgagtcatggagaaacttcagtaatgtgcactaattctagtaatgcttcagcgtcatttatctgttactagttgacattgggctgttctacctaaggaaaaggcccaaataattaaaatttaccatcttttaaatcctaattttcttttttttctttttccgagacagggtctcattctgtcacccaggctggagtgcagtagtgccatcttggcttactgcaaaccccgcctcctgggttcaagcaattcttgtgcctcagcctcccgagtagctgggattacaggtgcaccaccatactcggttaatttttgtatttttagtagagacggggttttaccatgttagccaggctgctcttgaactcctgacctcaagtgatctgcccaccttggcctcccaaagtgctgggattacaggcctaagccaccatgcctggccttaaatcctaattttaaaataaagtttcctgtttcatggtgctcatattggtgtagtgaaggaaaaaataatttttcctctactcttgtgagttctcagctgggagccctgtaacaaaacataggttaacaagagaaaaacaaatggaagtttattaacatgcatatttcatatatacatgggagaaaattcagggaaagagtaattctcaaaaagatttcttagaactctggcttatatagcatcttcaacaaagaacagtacacttttagagaagtgacaagacaaaggaaaaagaccttcagtctttagcgatggcgaattgtaggaaggcaaatacatggggaactaatggcagataaaggctagttagtgcagtttgttatgtagatgcctctggtgccttctctaggctgttaaggacctaaagctgtcttctgtgactaacctttatccttcctggtggagagaggagaagggacacctttgttaatttatgtcctgcttttagcaaataggggaaggcaaggagcttttcttgtatccacttctcagttgccttcggctcaaaataatccttatgccaaagtggcatattttggggtagcatatcctgatacttttcattggaattaaagatgcactagctgggtgtggcagtgagcacctgtagtcccagctacttgggagaggctaaggtgggaggatcgatcgcttgagcccaggagtttgaggttgcagtgcaatatgatcatgcctatgaatagccactgcactccagcctaggcaacatagcaagatcccatctcgaaaaaaaaaaaaaagttgtactagactaaaggttggcaaattatagccatggcccaaatccagcttgatgcctgtttcattcctttgcatggtgtctatagctgctttcaactgctatggcagagttgagtagtttccacagagattacctggcccacaaaacctgatatattttactatctgtttttttacagaaaaacatgttgatgatgccttcactagatacaaaattagtataactcagtttgataataactctgttcctagttagaacctacttaatctctgtggcccactgttacttcactatagtggggataaatgaccttgaacaagttaccgaatgtatcttctttttttttgagacagagtctygctctgtctcccaggctggagtgcagtggtgtgatctcagttggctgcaacctctgcctcccgggttcaggtgattctcctgcctcagcctcctgagtagctgggattacaggcacccgccaccatgcctggctaacttttttatatttttagtacagacagggtttggccatgttggccaggctcatctggagctcctgacctcaagtgatctgcctgcctcggcctcccaaagtgctgggattacaggcatgagccactgcacctggccgaatttatcttccagttagctgtctatcttccagttagcttccttagaccaatacttctcaaacttatgcatatgtcaacaaaaaaagccaaactcctgtaaagcatttaaagaggtttattytgagccaactgtgagtgaccatagccttggttttcttttctttcctttttttttttttttttttttttttttgagagacagagttttgctcttattgcccaggctggagtgcaatggcatgatcttggctcactgcaacctccgcctcctgggttttagcagttctcctgcctcagcctaccaagtagctgggattataggcatgcgccaccacacccagctaactttgtatttttagtagagatggggtttcaccatgttggtcaggctggtcttgaactcctggcctcaggtgatctgcctgccttggcttctcaaagtgttgggattacaggcgtgagccactgtgcccagccagccatggttttcaagaggtcctcggaacatgtgtctaggtggttgggttacagcttggttttatttttatttttttatttttttgagacagggtctcactctgtcgcccaggctggagcagtggcatgatctcagctcatgcagcctctgcctcccaggttcaagcacttctcgtgcctcagtctcctaagtagctgggattacacgcatgcgctcccacacccagttaatttttgtatttttagtagagacggggtttcgccatgttccctaggctggtctcgaactcctgggctcaagcaatccacctgccttggctccccagagtgctgggattacaggcctgagccactgcgcctggcccatcagcttggttttatacatttgagggaggcatagacaccaatcaggctgggtgaggtggctcacgcctatagtcccagcactttgggaggctaaggtggtcagattgcttgagcctgggagttcaagaccagcctgtgcaacatagtgaaagcccatctattaaaaaaaaaaaaaattagccaggcatggtggtgcatgtttgtagtcccagctattcaggagtctgaggtaagaggatcgcttgagcctgggaggtcgagactccagtgagccaagactggcaccactgcactccaacagagtgtcagaccctgggcaacagagcaaaaccctgtctcaaaaaaaaaaaaaaaaaaaagacagcaatcattatctgtgaggtgtgtattggtttggttcaaagattttctcattggcaattggttgcaaaagttattatctaaagatctggaatcagtagacagaagtctctgggttacgataaggggttgtggagaccaaggttcttattatgtaggtgaagtctcataggtggccaccattagagaccacagatggcagatgttttctgtttaaacctttaaaagatgctggactctcagttgatctcattagcacatggagggactagagggggtaagatctagttatgttaatagagactctttgcagaagcaattttccccccacaaaagatggctttgtagggccatttcaaaatatggcaaagaaacatattttgggataaaatactttgattttcttctttatctgtcatgtgatactagagtcagattggaaattggtaccttattgctacaaagaatctgttttgtcagtttgaagatctctgttttaatcttactgctggtcagttgtgcctgaactccaaaagggaaggtataatgaagcacatctgcttcccccacccctgcctatttttcaggtttctttggaattctttgacccgggtgggggtgaagaggatccattcagttggttgggggagcttagaattttatttttggcttaaatgtaagaataatctggggaatatattaaaatttgggaattctcagccttactccatagattctaattcactaggtctggggaggcacacatttaacaatcaccccagattctgatgaggtgacctgtggtccacaaattattttattttttgagacagggtctcactctgtgacccaggctggaatgcagaggtgtgatcatggttctgcagcctcaacctctcaggttcaagcaatcctcccacttcagcctcccatctcagccacctgagtagctgggactacaggcgcatgccactacacctggctaatttttgtattttttgtadagattttgccatgttgctgaggctggcaccctttaaataatttgagcccttatggcaatttgtcttttggttcctaaaaattgtttcgtagctctagataaagttcttgtctcaaccagcattgaagccttgcctacctgataggagagcttggaaccaagaggggaatgcccaatggcattaatcattagcttctgagcagagcagtaagcttgtcgtataaatcaaatcactcactgtgtgagcttatctacagagacctctgcagcttcgcttccgaatagaaatgatagaaaaagttggcactggggctttagtgaatgtgaatggtttatatcggagctcagtttgcctgttgatgctaagagaaaacaaattaaagttaaaatgagcactgtggccctgcattagccatcttttttaaaaatcaaggtaaaagttaataaaagaaagagctttgatgagaggaaggacctaagtccaggcactttaagaacaaatacttgtttgtttatarttttctgaatctccagaaggtactatcctgagttacagaatatctattgaacggcttgcttactgaagcctttgttttcctccatttgctgttcaaaaacttaggagagagyggcagatcagtaatgaataacagcaaaatcccctggcacctgttggatttttatacaaaacagaaaaagttaaaacttgaaggaacaatgaaagaacctcacatctccagtactcaatatgattgaagttaggttgctactgtttagaagcactgttttaaaactgaggttttgatgccttaaaacatttttcatctttgttaccttgctgaaataaaatctaaaagttgcattgggtataagccaggatatattgtactttgaaatataagtaaacattttatcatccaatgacagacttataactaattagatattttcctgttgggatatatctagggaaattgatttcaaaaactgtttattaatagggactttagaaattctatttaagggctgggcgcggtggctcacgcctgtaatcccrgcactttgggaggttgaggtgggcggatcacctgagatcaggagtttgagaccagcctggccaacacagtgaaaacccatctctactaaaaataaaaaaattaggcaggcatggtggcgcacacctgtagtcccagctacttgggaggctgaggcaggagagttgcttgaacctgggaggcggaggttacagtgagccaagatcacaccattgcactccaacatgagtgacaagagcgaaactccatgtcaaaaaaaaaaatctatgtaagactatcraaggattcctttacataatgagctcccctagtccctagatatttgatatataggcatagctcattttattgcactttgcagatacgtgtttttcacgaattgaaggcttgtggtaattctgtgttgagcrtctatcartaccatttttccaacaacatgtgctctctctgtgtctctatgtcacactttggtaattctcacaatatttcacactttttctttattattatgaaaaattgtttcggtgatctgtgatcagagatctttcttttttttttttttttttttttttgagatagagtcttgctctgttgcccaggctggagtgcagtggcatgatcttagctcactggaacctccacctcccaggttcaagtgatcctcctgcctcagccccactagtagctgggattacaggcacgtgccaccatgcccggctaatttttgtattttatttatttatttatttgacatggagtctccctctgtcgccaggctggagtgcagtcaagcaatctctgctcaccgcaacctccacctcctgggttcaagtggttcccctccctcagcctcctgagtagctgggactacaggtgcacaccaccatgcctggctaatttttgtattttagtagagactgggtttcaccatgttggtcaggatggtctcgatctcctgaccttgtgatctgcccgcctcggcctcccaaagtgctgggtttacaggcgtaagccactgcgcctggctcaatttttgtatttttagtagagatgggatttttccatgttggccaggctggtctcaaactcctgacctcaggtgatcctcctgccttggcctcccaaagtgctaggtacagccatgagccactgcgcccggctgatcagagatctttgatgttattattgtaatcattttgggacaccatgaattgtgcccaaataagaaggagaacttaattaataagtgttgtatgtgttctggctgttccactgaccagctgttacccatctctctccctctctttgggcctcctattccctaagacacagcaatattaaaattaggtgaattggctgggcacagtggctcatgcctgtaatcccagcactttgggaggccgaggcaggcgaatcacctgaggtcaggagtttgagaccagcctgaccaacatggtgaaactctgtctctactaaaaatacaaaattaacygggcatgctggtgcatgtctrtaatccaagctacttgggaggctgaggcaggagaatcccttgaatctgggaggtggaggttgcagtgagtcaagatcgtgccattgcactccagcctgggcaacaagggcgaaactttgtctctaaataaataaataaataaattaaataaaattaggtgaattaataatcccacaatggcctctaagcattcaagtgaaaggaagagtctcacaactttcactttaagtcaagagttagaattaatattagtgaggcaggcatgtcaaaaaccaagatagaatgaaagctaggactcttgtgccaaagggctagccaagttgtgaatgcaaaggaaaaattcttgaaagaaattaaaagtgctactctagggctgggtgcagtggctcactcttgtaatcccagcacgttaggaggctgaggcaggaggatggctttagaccaggagttcaagaccagcctgaccaactgatatagtttggccgtgtccccacccaaatctcatcttgaactgtagctcccataatccccatgtgtcgtgggagggacctggtggaaggtaatttaatcatgggggcagttaccctygtgctcttcttgtgatagtgagttctcacgagattggatagttttataaggggcttttyccccttttgattggcacttcttgctgctgccatgtgaagaaggaggtgtttgcttcctcttctgccatgattgtgagtttcctgagggttccccagccctgcggaactgagtcaattaaacctctttcctttataaactacccagtcttgggtatttctttgtagcagcatgataattgactaatacaccaacgtagtgaaatcctgtctctacaaaaaattaaaaaattagcagggcatggtgatatgcacctgtagttctagctattcgggaaggctgaggtgggaggatcacttaagcctgggaggttgaggctgcagtgagctrtgattgtgccactgtatttcagcttaggtgacagagtgagaccctgtctcaaaaaaaagggaggggggccactccactgtacacaggagtgacaagaaagtgaaacagccttattgttattgctgatatggagaaagtttgagtggtctagatagattaaaccagccacaacattccctaaagccaaggcctaacccagaacaaggctctgactctatcaattgtgtaaaggctgagagaggtgggaagctgcagaaaaaaagtctgaagctagcagagattggttcatgaggtttaagaaaccatctctgtaacataaaagtgcaaggtaaagcagccagtgctgatgttgaagctacagcaagttatccataagctctagctaagattgttgattgatgaagatggctacactgacgaatagattttcaatgtggatgaaacagccttctactggaaggagagtccatttaggactttstttttctttctttttcttttgaggtggagttttactcttgttgcccaggctggagagcaatggtgtgatgtcgggtcactgcaacctctgcctcctggttcaagcgattttcctgcctcagcctcccaagcagctgggattacaggcatgtgccaccacgcccagctaatttttttttttcagtagagatggggtttctccatgttggtcaggctggtcttgaactcccaacctcaagtgatccgcctgcctcggcctcccagagtgctgggattacaggcgtgagccactgcacccagctccatttaggactttcatagctagaaaagacaagacaatgcttggctttaaatccaaagaataggccgactctggttaggagctaatgcaactgatgactttagttgaagccagttctcatttaccatttggaaaatcctaggacattttaagaattatgatacgttggccaggtgaggtggctcacacctgtaatcccagcattttaggagaccaagtcaggaagattgcttgaacccaggagtttgagaccagcctgggcaacatggtgaaaccccatctctacaaaaaataaaaaattagccaggtgttgtggcatgtgcctgtagttccagctactcaggaggctgaggtaggaagatcacctgagactggaaggttgaggctgcagtgagccatgattgtgccactgcactacagcctgggtgacagcaagaccttgtcaaaaaagaaaaaaaaaaaaaagaattatactacatctactctgtctgtgccgtataaatggaacagcaaagcccagatgacagtacatctatttacaggtggtttactgaatatgttaagcccactgttaagacctactgcttagaaaacaagatttctttcaaaattactgctcattgacaatgtacctagtcacccaagagctctgatggcattgtacaaggagattaatattttcatgcctactaaacacaacatccattcttcagcccatggatcaaagagttaatttctattttcaagtcttatttaagaaatatggccgggtgcggtggctcacgcctgtaatcctagcactttgggaggccgagatgggcggatcacgaggtcaggagatcgagaccatcttggctaacacggtgaaaccccgtttctactaaaaatacaaaaaattagccgggcgtgttggcgggcgcctgtagtcccagctacttgggaggctgaggcaggagaatggcatgaacctgggaggcggagcttgcagtgagccgagatcgcgccactgcactccaacctgggagacacagcgagactccgtctcaaaaaaaaaaaaaaaaaaaaaagaaatacattttgtaaggctatagttgccaaagaaagtgattcctctgatggatctgggcaaagtaaacagaaaatcttttggaaaggattcacctttgtagatgccattaagaacattcatgattcatgagaggaggtcaaaatgtcaacattaacagggttctgaagaggctgattccaaccctcgggtcactttgagggattcaagacttggtggaggaaggaaatgcagatgtggtggaaatagtaagagaactacagttagaagtgcagcctgaagatgcaactgaattgctgcaatctcatgataaaacttgaaaggctgaggagwtgctttttatggatgagcaaagaaagtggtttcttgaggtagacttgtgaaagttgcagataccagatgaaatcactttttgtcagacccaaacaaactagagccaggagagcatgaaggggaaggctcatgtttgcatggctgagataaagactgtctcaaagactttccaaaataaccctgcaaataattatttctttagaattgcagcaattcagacaagatgctctcaaaagcatacctgcccagtaacggcattttcaccaatgaacctatgccatctctgagtccctgaaaccaatgagctctgttttcaagcaccttatgtgaacctctcattctgccaataaaagcttccctttaccctcccctcttcagttgcatatgtggcttgccattgtgcatctcagtttataattctcttttctaactcccgaaaaaatttaacatatttggagatattttttggttgaaagaatctatctcgggtgaagatgctgtgaatattgttgaaatgatgacagagaatttagaatattacataaaattagttgataaagcaaccactgggctggagaggattgactctgattttgaaaggagttctgtggataaaatgctgtcaaacagctgttacatgcgacagagaaatctcattaaagaaagaatcaggctgggcacggtggctcatgcctgtaatctcagcactttgggaggctgaggtgggtggatcacctgaggtcaggagatccagaccagcctggccagcgtagtgaaacctcgtctctactaaaaatacaaaaattagccgggtgtggtggcaggcgcctataatcccagctactcgggaggctgaggcaggagaatcacttgaacccaggaggtgcaggttgkggtgagcctcgcgacagagtgagactccatctcaaaaaaaaaaaagaggaagaatcagttgattcagaaacttcattgttgtctttatgaaattgcaacagccaccccaacattcaacaacgatcaccctgatcagtcatcagccaccgggcttgagacaaggccctccactagcaaaaacattatgacctactgaaggttcagatgatcatcagcatttttagcaacaaagtatttttatctttatttatatatttttcagagggagtctcactttgttgcccaggctggaggcagcagtgtgatcatagctcagtgccaccttgaattcctgggctaaaacaatcctcctgcttcagcctcccaagtacctaggactacaagtctgcaccactgcagactttttttttttttgtagagatgggggtctcaccaacttgactaggctagtctcgatctcctgggctcctgctttggcctcccagagtgctgggggttacaggcgtgagccactgcacctggccaataaagtatttttaaataaggtatgtacattgtttcttttagacataatactatggtgtagtaaatagactacgatatagtgtaaacataatttttatatgtactaggaaaccaaaaaaattgtgtgactcattttattgtggtacttgctttattatgggggtctgtaaccaaaccacagtatctccaaggtatgcctctataattcaaattactaaaattcagccgggtgccatggctaacgcctgtaatcctagcactttgggaggccaaggtaggtggattgcttgagcccaggaattcaagagcaacctgggcaacatggtgaaaccccatctctacaaaaaatacaaaaagttagtagggcatggtggcgtgtgcctgtggtctcagctgctcggaaggctgaaatgggaggactgcttgagcctgggaggtggaggttgcagtgagctgagatcacgccactgcactgcagcctgggtgacagagtgagaccctatctcaaaaataaaatgaaataaaattcaaagtacatcctcttttcaggagctcatccttgtcaggaaggtagaaatacctttgtggactgcattctctaaagtttgcaaaataaacagccatcttctattattaaaatggtagctctgtatcatttctttctcccctccaaaatgtgtgacaggtctaatttctctctagataccataatttccttccattttattactaaatcctggagaaaagcccattttgaagaaaacagagcttacagctttaaaaactgattgttattttgatataccaaaacccagttttgcctttatgctcagtgcatttctgtcattgtacgtcctaaactaactaatttatattcttcccttggtacttaaagaatcaaaaaccctaacactgtacttgtaattgactggttgtgttaaaagtgaccatgtttttgtgcatctaaaaatagaacataaaatattgtatctgattttgctccaggacttctgtggtttcttattataaccccctctgctaccctttgaaattcctttaatgtcagggacatttactttaagagtaagataatacatcttaagagacttttaggctgggcatagtggctcacacctctaatcccagcactttgggaagccaaggcaggaggaatacatgaggccaggagttcaaaaccagcctgggaaacagcaagaccccatctcagcaccactaacaaaattagccaggtgtggtattcccagctacttgggaagctgaggcaggaggattacctgagcccaggagttgagtctgcagtgagctatgattgcatcactgcactccaacctggtccacagagtgaggccctgtctgaaaacaaaacagaagacttttagtatatgctatgaatttactagctaagtaaatcggatggagttaatatcccagttacgtaaagttgttcttcttacagtgttaatgaaagatgggtacaagagaaaacattttccccaaatttaagcaagtagaagctatgtaactcctgatggattttgtatgaaaaaacaacatcagaagctattcgatatttaagtgaggggggaaatgttataatactaaatctagaagggaaaccaaagtattgattgtaacctrctcagatgtcataaatctacagcagagctgcctgagccccacagagtaaatgacattcattaaggctgaatgtattgttgcactaggatcagggaggcaaactgttttactattgtctgcaaagcctgaaccctccacttgagaaataatttaaataaataaatttttttgaagccagtgactctcttttggcctgacaattttttttttctttctgattagcagtaagtaatgtgctaaatccccagaccccgcacccaaacctggctgaattacctcacttggaaatggacaataaagatgccctttacgagaagtctgtttcatgaaagactggcaggttttaaagagaggagtgtaaacctggcggccaggaaggcctgggttctgatttcatgtcagacagcagcctttgtgccctctgccaagtaactttctgtggcttttcttttcttttttcttagaaaggtgaccgctggactgatggttcagactggtcctcatgaactagtctgcggctcccatggatttgagccagtaacattattttagcctcacaaattttcataaggcaaacaccctcataaaaccatcactctggtcagaaatagaactttgccagtcaccccagaagctcctccttgttttccatcccaattgtcattcccttcttccaaaagtaactacaggcggttcttgctttacacaacattatggtactgtaaaaatgatagctcatgctgaaacactgataagctatcctaataatcagtgggaaaaattgtgactgactgttctggaaccttttaaaatttttgtcaaaacattaaaagcccttttactctctgttataattgtatagggaaatgaaaacatagtaaagtgttataccctgtaatttaaaacattagcaacattagaataaaaggttttatttctttgtaaaaacttatcaagagtagtttgaatagtgcttgccttcttttttctcatcatataacttatgatatacaacaagcatcttttctttgccttgatgaatttttatactccttttgaagtttggatcagcttccaagattttatactttgtgctttcaatgttgggaagtgcctccaacaattcctttttttttgagatggagtctcactctgtcgcctagttaggagtgctgtagcgcagtcttggctcactgcaacctytgcctcccaggttcaagctattctcctgcctcggcctgccgagtagctgagactacaggtgcacgccacccagctaatttttgtattttttatttatttatttatttatttaatatttttattttattttattttattttattttttaattttttgagatggagtctcgctctgtcgcccaggcttgagtgcagtggcatgatctcggctcactgcaagctcagcctcatgggttcacgccattctcctgccttagcctccggagtagctgggactacaggcacctgccaccacgcccggctaacttttcgtatttttagtagagacggagtttcaccattttggccaggatggtcttgaactcctgacctcaggtgatccacccgcctcaccctcccaaagtgctgggattacaggcatgagccaccatgcctggcaagagttcctttaatgcgaagtttttgctggtgtcatttcttcattttttttcatctcaaccacttttctcatgtaagtcagtaatttttctttatgaaggtcttatgggtgcacatctagagtcttcgcatggtggtgawgctgacattcccatggtcagctatttcttctatatgtaactctgtttacattcttttcatattttacttccagtgttaatcacttttcatttctttgctacactttcatctttgttggccagtttcttccttcaatttattcattttgtaaaagttatgtgggtttatccctgggagatcaggaagcaacacagatacttggtttgctctctgtgcaagaactgaataacagatgaggagtgaccaatcagagacttggaaaggagtgatgtaattggtcactgatcgtgatgcacatctgttaattacatagtgagctgtggccagaagagctatttgtgaagtctgtacttcatgttgtttctcaaagttaattcagtgtggtaagtaaaatttgaggtacgtcattggggcactgctgtagtttaactaaactggaattgaaattgtacatattggaatcatgtaaagtgaagactacctgcatgattcttttatagcaatcatttccctgtattttttttatagttctacgaaccaaatgtacatttttagataacgtagtttggtgttgtccctttagatgtttttgttgtcttctgaggtttgtttgtttgagagggagtcttactctgtcacccaggctgatgagcagtggtgcgatctcagctcrctggaacctctgcttcctgggttcaagygattctcttgcctcagcctcccgagtagctggaattacaggtgtgtgccatgatgctcatctaattttttttgtatttttastagagacagggttttgtcatgttggccaggctggtctcgaactctcgatctcaagtgatctgcccaccttggtctcccaaagtgctgggattacaggtgtgagccaccacacccagtgtgtgtgtgtttttttttttttttaatctatgtgttttccgtctgtattaggccattcttgcattgctatacagaaatagatgagactgggtattttataaagaaaagaggtttaattggctcacagttcagcaggctgtacaggaagcatggtgctggcatctgcttggcttccagggaggcctcaaggagcttttactcatggtggaaggtgaagggggagcaggcacttcacatggtgagaatgggagccagagtggaggaggtgccatatacttttaaagaaccagatcttgtgagaactcactcactattatgaggacaacactaagccatttgatgtggtttcagtctgtgtccccaccatatctcatgtggaattgtaatccccaatgttggaggtggggctgggtgggaggtgattggatcatgggggcagagttctcatgaatggtttagcaccgtcctcttggtgctgttttcatgatagtgaatgagttatcacaagatcttgttgttttaaaagcatgtaacacctgccccctctctcttcctcctgctctggccatgtaagatgtgcctgcttccccttcaccttctgctataattgtaagtttcctgaggcctccccagaagctgatattgccatgcttcctgtacagcctgcagaaccgtgaaccaattaaacctcttttctttataaattatgcagtctcaggtatttcttttctctctctctcttttttttttctgagatggaatcttgctctgttgcccaggctctgcagtggtgcaatcttggctcactgcaacctccacctcccaggttcaagcgattctcctgcttcagcctcctgagtaactgggattacaggcacatgccatcatgcctgactaattttttgtatttttagtagagacaggattttgtcatgttggccaggctggtctggaactcctgacctcaagtgatccacccgctttggcctcccaaagttaagtatttctttatagcagtgcaagaatggactaatacaccattgatgagggatctgccccacccctatgacccagtcacctcccagcaggccccacttttaacattgtggattacatttcagcatgagatttgggaggtgacaaatatcgaactctgtcactctctatcttagtttgccagggctgccataacaaagtactatagactgggtgacataaacaatagcagtttattttctcacggttttggagactggaagtccaaacccaaggtgctggtggaattgatttctcccaaggcctctttggcttcagatggccaccttctctctgtgttctcacttggtcttgcctctgtgcgtgtgcatccttggtgtctccagtcagactgggttagggcctaccctaatggcctcattttaacttaattacctctttcagggctctgtctccaaatagtcacattctgaggtattgggagagctttaatatatgaacttgttctgcccataacactgtccatacctttcttttctttattacttgtctatcaaaatarctaggctgtttaccactagtctcataaaacataaattatggccacagaaattttatattaaagtgttaggatcatccatgaaggacagcattgaagattagcctggattaagtagggtaaaattatgctccagttactaaggctttctaacaaattaccctaaaacttggtagcttaaaacagcaacaatgatttattgtatctcaatacaataaatcagtcagtcaggaattaattagaaagtgacctggctgagaggttcagaccttagtccataaaggcaattgcagtcacatgccaggtggggctgcagtcatctgaaaggttgactggggtgggatggttcccttctaagatggtgcattcacatggttgggatgttggtggtggctgctggaggctgtatctcctttccactggctgcttgaatttcctcaaggcatggcagctggcttccaccagagcaagtgattcaagatgctaagacaagctgcagtgcttttcatgtagcctcagaagtcatgtattgccactttcaccatgttctattggtcacacatacccagccttgatccactgtggaggaagccttcacaagggtgttaattataggacctcaggattattggaaactgtcttggagacagactaccataaattggagtggtaaaaagtgtcttatttttgggaaacctgtttgcaagtctccatcttcaaatgctcacttaccttacgtgcatgtcatcaaaattaaacattactaaatgctatctttctacttctcacttaatgaggtaatatttttaagagttttcaggataaatttttatgcttaatctctctatctgactaacaaaaaccattatactaatccaaatacatatatttatctattaatagatttatcttcaactttatcatttatttaagatactggtcttaaaccaaatggcggatcatgaactctaaaatatggcagtagattttggcttatgttactgggaaatattgtgactctcaggctaaagtaataactttgcagcttgctgagtgaaccctaataagttgattgagttatattttttctcagttttttggtctgctgtaaatgaaaagagaatttctcattgttatagactgaatgtttgtgtctcccccgcgaattcatatattgaaaccctaaccctcaatgtgatggtactaggaggtggggcctttgggatgtaataaagttgtgagtttggagccttcacgaatgggattacgtccttataaaagagacctcagagagctttctaggcctcttgccaccatgtgaggatacaatgagcagayggtgttctatgaaccaggaaatgggccctcaccagattccaaatcttctggtttcttcattttagactttctagcctccagaactgtgagagataaatgtttgttgtttaagccactgagtctatggtattctgttatagcagccagaactactaagacacgaatcatttttaatggtgaaaataataagtggaaattatgaggaaaattggtaatgattttkggctataactgtggaaaagtagaatatatgtgtgcattaggtttctttagagggacagaactaacaggatatatgtaggtatgaaagggagtttattaaggataattgattcacaaggttaaagtcccacagtagcctgtctgcaagttgaggagcaaggaagccagtggtggatcagtccaaatcccaaaacctcaaaagtagggaagttgacagtgcagccttcagtctgtggccaaatgcccaagagcccctggcaaatcactggtgtaagtccaagagtccaaaagctgaagaacctggagtctgatgtttgagggcaggaagcatccagcacgggagaaagatgaaggctggaagactcagcaagtctgcccttccatcttctcctgccagctttattctagctgagctggcagctaattagatggtgcccacccagattgagggtggatctgcctcttccagtcactgactcacatgttaatctcctctggcaacacactcacagacacacccaggaacaatactttgcatccttcgatccaataaggttgacactcaatattaaccatcacagtgtgaaattccactgaggagctgtgtcgtggtcttggctagttcttggcctatgctgtcttggggttcagcaccatgggcagctactcctgccatgccctgccacccccacatttgacatgcaaaaggggtgacagacaaccttgggcagtgtggaggggtgtgcacacctgtggtataggcgcttcgtgtcctgttggttcagagttcaccttttttttgtcttcttaaaatgaatatgtctttttttttaaaattgagacggagtttcactcttgttgcccaggctggagtgcaatgatgtgatctcggctcactgcaacctccgtctcctgggttcaaacgattctcctgcctcagcctcccgagtagctgggattacaggcatgtgccaccacactcagctaattttgtatttttagtagagacggagtttctccatgttggtcaggctggtctcgaactcccgacctcaggtgatctgcccgcctcggcctcccaaagtgttgggattacaggcatgagccaccatgcctggctgaacatatctttaaattcatcccctcagtgtccataaaaccagcataacttagaggagcctcaggttaatttaaagcttctgtgccagaggactgaactcttgaatgtccattcttggttcagtcctctagcctctatttccaatgccatctaaggatttcaccagccttgtaagggttagggttgttttaagctcactgcagcctttaactcctgggctcaagtgatcctcctgcttcagattcctgagtagctagaactatacaggtgtgtgccaccatgctcagctaattttaaaaaatatttttagagatagagtcttgctgtgttgcacaagttggtcttggactcctgacctgaagcaatcctcctgcctcagcctcctgaggagctggaaatacaggtacaagctgctgtgcccagcttagggtggtttttatttaaacattatgacagttataaggagacgtatcaggctctatcttctttccataaacatttactctgcttaattattatggacaaagaaagctgacagtagtatttctaatgtttctagaaccatgctgctactgtataaaattgattaaatattatccttggaatatatcctggagagcatacattctaagaaataaagtattactttttattcaaatcattcactttccctttgtggcagtcttttagaaattgccctattggggctcttcctcatgtttccaaactgagtatccagacagccttttcctatagcacactagatatgagaaaaatgagacctgaaagatcatgatcacagagacaggaaacttacctggcattgatgaatttggataataatgtagttattataatatcaattaacaaattttttctttttttacttaaagttttaaaatataattttccaattctcctagatcctgactttttttctttttaagagagagaatatagacaatatttatatgccaaagcaacttagataagtaactattaaaatttcaaaattttgaaagtaagtttcaaaaataccttatagattagcaagttttttttgttttttgttttttttgagacaaagtctcgcttgtcgcccaggctggagtgcaatggcgcaatctcagctcactgcaacctctgcctcccaggttcaagygattctcctgcctcagcctctgagtagctgggattacagacgcctgccaccacacctggctaatttttgtatttttagtagagayggggtttcaccatgttggccaggctggtctcgaactcctgaccccaggcaatccggctgtcttggcctcccaaagtgctgggattacaggcgtgagcacccagccaattttcttttttttaatgaggttatttttctctcaagttttttttattaaatttgctacttaggatcatttcagaatgagagagtggagagggagagaaagaaatgaaataattatctcagagtcaccatatctacacttactggaatgtactaatactacatcggtgttttggaattctttttttttgagaccgagtctccctctgtcatcraggctggagtgcagtaagctgttcacagctcactgcaacttctgcctcccgggttcaagcgattctcctgcctcagcctcctgagtaactgggattacaggcatgtgccatcatgcccggctaatgtttgtatttatttattgtttttttggtagagacagggttttgccatattggccatgctagtctctaactcctgacctcaagtgaaccgtcagtctctgcctcctgaagtgttgggattacaggagtgagccaccgcacctggcttggtgttttggaattcaaaggagagttttgttaatagttccttgagatttacatatrccttggaagaaactgaactttttgaaattgggataagcagtttcaggtatcatatatgcctttcacataaaggcacatatgatataagagtacattagttgatgggagagaatagaattagtgagagatgagatttcttatgtgctgcagtattatgcgctgtttgtaggaagttatgtagttacccaagtgatacaacagtgagaagtaagagattcatggctttatgttaagccaacatatgtccgttgcagagctgatgctaataatttagaattcagttttttttagcagttcacattcactcataacaactcagtatcatttgctaaataaagaggctttggtatcattcataaaagaaaattaggaatattattaaaatatggtagtataagctctctagtgtattagataagctctctaatgtattgtagtttgtttgaacttcatacggctgcagaaatgaatcaacattcaacccagacttttgtgaatagagtatgagaaatgatgttattgaatctttacatccctggaagcttgtcyaataaattgagtagttgtcacactgagttttgtacaattcatatcataaaaatataactattatatttatgttctactgtactccacaagctcattagagataaccagtgctagttttaaaagtgaaatgggccgggcacagtggctcacgcttgtaatcctagcactttgggaggccaaggtgggcggatcacctgagttcaggggttcgagaccaacctggccaatatggtgaaaccctgtctctactaaaaatacaaaaattagccagacatagtggtgcatgcctgtaattccagctactcagggggctgaggcaggagaatcgcttgaacccgggaggtggaggttgcagtgggccgagatcacgccactgcactccagcctgggcaacagagtgagactccatctcaaaataatwawaawaataataataataataataataataataataaatacataaataaaaatgaaggaagtttacagtgtttatcttcttttggggttaaactgtttttacagagtcaaggttattgaaatttatttgtagcagagatgggtgaataataaacagttttttccagacatgtaatacaagctgtctgatggcttctatctgcgtgccttagaaacaaagacatctctgagctgcaggagaggggactggagtgaagcacctccaactagtaaatactgaagaatacagtcctaacacatataggacatatataggaatcacagtgactgattacactaactagattgcttctgaaataccagtaccattttaagtcctgatctgagtgggtttcatatgcctctgttctgtctttcatatttaatatattgcattttgttttagagacagaacaaagtctattgcgtaagacaataaaaagattatctttgggcaattcccataacagactttctgttttaacaaatctcttaagttactggagctgwcttatttatttttagagatgtttttacattgtaraaaagtacacgagtacccctatgtattgaccaccaagatgagtttttagttttttttttttttttttctaagagacaaggtattagtctgttacccagcctgaaatgcagtggtgctatcagagctcgctcaaactcctgggctcaagtgatcctcctgcctcagcttcccaagtaggactatagtcatgtgccaccatgcccagctaattttttaaaaaattcttttttgtgaaaacaaaaaatcctactatgttgccctgacttgtttcaaagtcctggcctcaagtgatcctcccaccttggcctcccagagtgttgggattacagccatgagccatcatacctggctataatttctaatatatatgctttttgaagtaaaatatataagagcagttttatcacttattttttcatttagtattttttctgagcattttgttrttaatttttttaaaacaatttttaataactgcaaaatattttatcgtatggatataccataattttactggtttcctattattagacattaaggaagcctctggaatgtcatttaaaaaacacagaaagtattgtacatgaatgttttgtactctatccaattaattcctaaagatgaattaccaaaaattaaagtactgggtgcaagatatgaacattttttaaggttcatacaatacttttcaaataattatattttaacacagtatttcatcaagttggagaccttataactttttcaaaggatatatgaaaactgtctgtcacccaggctggagtgctatggtgcgatcttggcccactgcaacctccgcctcctgggttcaagcaattctcctgcctcagcctcccgagtagctgggattacaggtgcccgccascatgcccagctaatttctttgtatttttagtagagatggggcttcaccatgtctggcaggctgttcttgaactcctgacctcaggtgatctgcccgccttggcctcccaaagtgctgggaatacaagcataagccaccacgcccagtcaaaaatcttattttataaaaaaaagcaattgaccctcattttggggtctgcttcaataaatctttctcattgaaggagctcatcctcactagtctccttccttgttagattcactcttgcaaaacaaaaatatgataatgtatatctgcgtactggacatatgaatcaatctctaatttatcaggtgtaaggccacagcccttcagtaatagagtcttgcctttaataagatctggaataacaaaacaaaataattctttatgaactctagctggggagtaccgttattagtccttgaagttaaaaaactgtccttgttttgtaataagttaattgtaacactagtggtgatattttatctagtagtctaaattcctgcctccactggcaggaacttcacttctttttaacttgatcaaatgtccaattttagaataacagagaaaaaagagaaaaggaaaaaaaaagaattaacagatggttagagcttgttttatactgattcttaatatttttccctctaggatacagaaaacgttkctttagtcccttccaacttaatcatccttgcctccatacagaaatcccaaggtgccctaggtggttcacagtgttaactgcaagcgcttatatctgtcaggcctttgtttggaggctagagcaggaacatcacatgatacacaggaaaagattctgtgttcttgcctattcacatgtgacccaccagagtttgtcaagagtcttctgtattttaataatgcatttccaagaacttactttgctttcatctaaactaccttgtaacttccttaggggaaaattgtatgcatttctatttggaagtaaaatggaaaagacattattttatcctagaatgtgagttacatttttacgtctgcatagaattctgaggggttattgatgggacctaccttggcctttgaagcaggaaaagaattctcagggaattgggtgggccaggacagaggcaggggagtgctgccacatgcggcataagatttcaataatgctatttgtttgtgtctgtgttgaagggaggaagaatggtggtagagaagggaataggtgacttttcagataatctgagtacaaacaaagacacaacctgaaaggagggaactatcagcttcccagtttgccctgaaattccccctccctatttgctccgaaaattctggcccacttagatcctctttctttaagaatttgtagtgcatgtaattatagattttctgacacattgctttaatttttttttttttttttgagatggagtcgtgctctgtggcccaggctggagtgcagtggagcaatctcggctcacagcaacctctgcctcctgggttcaagtaattctcctgcctcagcctcctgagtaactgggattacaggtgcctgccaccaagcctggctaattttttgtatttttagtagagatggggtttcaccatgctggccaggctgatcttgaactcctgacctcaagtgatccgcccacctcagcctcccaaagtgcagggattacaagtatgagccactgcaccaggcctaattattttttttttaatgtgaatatttgcaaagggattaagaaatcaggctctggaggcaggtcaactttggatgaatctgggctccatgactgcatgaccttgggcaagctacttaaccctggtgccccagtttcctctgtttaaaatgggaataggctaggtgtggtggctgacacccataatcccagtgctttgggaggtcaaggtgggaggattgcttgargccaagaatccaagaccagcctgggcaacatggtgagaccccatctctacaaaaaattttttaaaattagccaggtgtggtagcacatacctgtggtcccatttgcttgggaggctgaggtaggaggatcacttgagcccgggagatcaatgctgcagtgagatgtgatagtaccagtgtgctctagcttgggtgacagagtgagaccctatctcaaaaataaataaattaatttaaaaaaaaattttaatgaggatattaatagtacttgcctcattaggttattatggataaagtactttgccagcaaaattaatacatattcattgtagaaaagcagataatataggaaatgagcagaaaagaagataatcctctccagtctttctacccataggtaaccactatttcttgtatatttttttgtatacacagtggacatcatactcttcatgctgttttataactttgtcccctaataatatatcatgagggttttcccattctactcaattttcaaaatcattatatttaaaacatagagctacactgagtagatatagttatgtatttattaagctgtttccatagtgttgaacctttaggtggttctagttttttatttttatatgtaatgcttgaacaaacattttttgtacattaatttcacacttgaggttactttccttgaagagaaatggaattactgagtcaaaagatatttacttatagttttcagacttttgacacatattgccaaatttcctcctagaaattttgccagcaatacatgagaatttgttgtcttgcctttttgtcagtattgattattcttggtttttaaactttcaacttgatagataaaaacattttatcttatcattttattcttctttgattataaagaaggctgaatattttgtacgtttttagcctttgtatttttattctgtatgtatgtgaaatgcctgtgaattttttgtgcacatttttctttcaaaatcttcaccttcctgtaaattgtgaatttgtaagaggttttttttgttgtttgtgtgtttgtttggtttgttttttgagacaaggtctcactctgtcacctaggctagagtgctgtcgtgtgatcatgactcactgcagcctcaacctcccaggctcaagcaatcctctcacctcagcatctcaagaagctgggataacaggcccgtgccaccaaacccggctaatttttaatctttttatagaaatggggtcttatcttgttttccaggctggtcttaaactcctgagctcaagttattctcccatattggcctcccaaagtgctgggatttcaggtgtgagccactgtgcctggctagagatttttatatagaaaagctgtcagttgacttcacaagatttttttcaagcaagctgggtgcagtggcatgtgccgtagtctagctgttcaggaagctgaggcaggagtagtacttgggctcaggagttcaagtctagcctgggcaacatagcgagaccctgtctcctaattaaaaaaaaaaaagacttagtttcaacaactttgttaaattaaggttggtcaattaagcttcattcatgaggtctcttagagaaaaacaacaaatcagtggatatttatattatagtatatggggtatattatttatagatatgctgggacatttttttctctgagtacaccaagtacttgttggtaagttgatttaacttttggagtttgctttgttggtggaatacacttcttcattcatcctgattgggtgttatgaatcccattttgtgtgatgcttatgattatcttggttgattccttaactatttactagacactatcttagtattttaactcttaacagtcagccacagggtttatgcactgtacttttcagtagctccccatgtagatcaaaagtcaagatggaaggcccacagattttgtggttttagagcagtgttcataatgcttagtatcacagtgctttctatgactggaaaggtgggattcttagaaagactgcagcagttccaaaagatttatgtttcactggttctctttggagagttatcccaagagctccccctctgtgggcagatagatgattgttgctcagccttctacacatacaactcctgcagcttcttatgttgcgggaggcattcatctgtgcagcattgtagggtctgaacatgaagcatatatttcgtgaaacctggagctgaagtgaattctcttagagtatattttgaaactgtactaggactttaaacacttttggaatttaaaacagccataaaaattcttgttatactgaaggagttcctgaggcagtgtgcctctcattttaccacctaaagttgcccatagaggtccaaggagacactgctgatagcagaaagtcttccagaaagaaattaggcgacccacaccaagcatgtatggctttgagtcttacagatggctttttaatagtttagtctcttaacctaaggaagtttctgaagttccggtcagagagtctaaaaattcacattttacctaataaatgataatgaggctatttatcttgtctgtctggattttttcacttgacatttaatgaaatatcccatattacctataatttttatttgaaggtaaaaatagactacagaagaatgtgtaaaatttgtatcaatcagcagagcacaaatcaagtttctaccagtattgcttataaatatttcgatcttatttaggcatggttaagctgtttttgatggttgaacttgaaggtttgttgagaattacattttttgtcttaatttttctatttttaagtgtctgaagcgtgggtgttcaaccttttggcttccctgggccacatgggaagaagaattgtcttgggccacacataaaatatgctaacactaatgatagttgatgagctaaaaaaaaaaaaaaaaaaaaaaaagtccgtgcataattytcatggtatctgtcaccacagataagcaaaaaactcccctcattcaaagggttggacacctgcggatagcccttttctagctaaccttttgtatttccctggcccgtaatctgtatttagaatttttagtagtattttgacaaatatagatgctttcctaaggcatatcattttgtaaaaattgtattgcaaacctttttctcttgattttcccttccttagcttctcccttcctttcctcccgccccttacctcctcacctctcatttatgggtctgtttatttttcaccttaagartaatgattgttgcctgggacttgtcttataaattcagttctttctaatgaggcactaaagctgtctcctggcttttgggttttcctgaraactgttaattacctttgcactttcctatacccagctcaaaagtaaattgcagagggaagagaggaggatgcacctgtttataaaaatgtggtagttgagcaaaatgcttaatggaaaatattaacagcataacctcatataatcaactcaatcttgtctagagtwtgtttactgcagttgtagctgtcaaatgtttcatgttatatatagacccctaccgtgatgcctttcatatcactcttatttgttgccactgttttcattcacaaccttagctcagatctctgccacattagctttttcattgggcttttcctgcctccatgtcaaatcctttcaatttgtaagtccaacaagcagctgctgggttttaatatgtccagaggactgttaggagtgggtcactgcacacccctcccaaaattcctcctgagtacaaagttcttacctacttccagcctttttaccataagccccagcttaattttctaaccttgtcagttgtcacccctggtgatctgtatagtctgctttcttttcagcaggtggtacttttcttaccacccatatctgtgcagagaaatctgacccacctggaaagctgagacgacacctgtcctctggcattcctttccagacccttccagcttgcagtgctcctctgccttctgtagttcccgtgtcactcgtctggaattatttttacatttgtggacccttattactcttgcctgagggtaggaaccaactcatccatttctaggtcccctcagcatactcaaactgcatggcctacagyctgtgctcagtgtgacattctcttctggttcttttcctcgtcaatattctcatctctcctattgtaaaacaacagctaccccaaactctctctttaccccagattcttctccttctacagccatctctctctccttttctccataaatggttgttttaatgagtagctttgttgattttcctgataaacaagctcattcaagaaaaaaatgcaaataatacaggacttggtgaaggtaaaaatcttttaaaatgccatcacccagagataaattacttttcactaaacatcctctctcactgcacacacatacacacactcaatattcatgacacacaattttgtatcaatgaaatcacacctaaatgctgttctatgacctgcttaaaaaaatttcaacattatactgggtacatctttacaagctagttcttgttaatcctcaggaaaacgttactgaaaatggctgtaaagtattccattattccagtgagtcaaaaatgattaataggccaagcacagtggctcttgcctataatcccaccactttactagaccgaggtgggaggatcgcttgagcccagaaattcaagatcagcctgggcaacatagcgagactcttgtctctacaaaaaatttaaaaagttagccaggcatggtgatgagtgcctatagtcccagatactcaggaggctgaggcaagaggattgtttgcaccccagaagtcaaggctgcagtgagctgagatcgtgccactgcagcctaggtgacaaagtgagaccctgcctcaataataataataataatgatgatgatgtactccccctttaaatgagcatttctgttttttctgttttttttgttttgttttgtttttcctcttataaccagcactatagtgaacatcttttatagctatctttagactctctttcctccctgttatctttttaggataaattcttagaagtgaaatcgctgggtcaaagtatatttattctaggtgctgttaatgcccaactgcccatcaaaaaggtaatgttgtacctaagtaaagttgtgagtggatttttcactaccctcaccaacatggatgttgtccagtcaccctaatctttactagttttatggctttatatatatgtttacatttatatataatgcatttctttgaagactgagtttgaaaatcattgtgtaagttaacgcctgtgtgtgtgtgcacgtgcacacacttatgtgttttccttcarttagactgaagtcttctggggacctgagcctaaataatttcaggtggatcacttgagatcaggagttcgagaccaccctggccaacatggcaaaaccctttctgtactaaaaatacaaaaaattagctgggtgtggtggcaggcgcctgtaatcccagctactcgggaggctgaggcaggagaatcgcttgaacttgggaggtggaggttgcctggattgcaccactgcactccagcctgggtgatggagtgagactctgtctcaaaaacaacaacamcaaaaaaaaaaaaaaaaaaaaagaggagatctaggcaggaagttaattgctggagttactagcacctggaaggtcattgaagccacgagactggatgggacccctagagagtaagtatatatagacaggaggcccaaggactgagcctgtggattacctaatgttacagctggggagaggaggaaaagccagcaaaagaatgtgggaaagagtggccggaaagttaggaaggaaataggtatgtgtttatctgtgtgttagtgtgtatgtgtgggtgtgtgtgtgttttactgaaagctgagcaaagttaaggagaaaggattcacatttcaaatcctggatcaagttagtccaggagtgagaactgacatttgagcttagcaatgtggaaaacaccaagaccttgataagagcaattgtagtggggtggccgaaggaaagcctgactggagtggcttcaagatagagaaggagggaggccgaggcaggagaattgcttgaacccaggaggcagagtttgcagtgagatgaggtcacgccattgcactctagcctgggcaacaagagcgaaactccatctcaaaaaaaaaaaaaaaaaaaaaaaaaagagagagagagaaggaggagagaaagtgaagtcataagtgtagaccactccttctgagggagaatccaccccaccttcctcctagcttctggtggttgctggcaatctttggcgttccctagcttgcagatgcagcactccaatccctgctttcatcttcttagggtggtctccctatgtacatgtctctgtgtcctaatttccccattctataagacacaagtcacattggattaggactcacagtaatgacctcatcttaatttgatcatcttcaaagaccctatttgcaaataagttcacattctgagataataggagttagaacttcagcttatccttttggggggcacccaattcaatccataacagcaacccgttaagctcccacattgtttcaaatagtttatttgactttcttggatctttgggatatgtaatatatacattggaaatcattttgttggttttctactttgtaaagtctgtaacttgaattttgctcccttgtctaattttgttttactttaacctccttgaaagatctgactacacttatgatttctatttcttgactcctgggtctttgccacccactgaaaccactgtgttctgtaccattaaccactagcctgagttatggaacgcttatagaagttcttgttggcagagctctaatctaaactgaataagcaccttaccttacctgtagggaattaggcttaaaaattgaaagaccactcagtctcactggcccacgttggagtatctgccttggccctgtgaactggagctcatcccattcagagacggttctgccggtgccctggttaccttggctcatacgtggctaggaagagccccagaggaacggtggtcactgcctgctccccagcctcccatccacccccatggtcactgtccgcatggtcactgtccttgctctgtgttttcatggtggactacttatactttttatttaatagagtttctttaaatcggagattattagattttttttccctaatctcgcatcccaaatttcaaattcaggcatgctatataagtttttcctcccttgcctataccttttaatcttacatagccattgctgtaggtctagagaatttatttaacagcatattgtttcattaaaaaaaatttggccaggagcagtggctcacacctgtaatcccagcactttgggaggctgaggtggatagatcacctgaggtcaggagtttgagatcagcctggtcaacatggtgagaccctgtctctactaaaaatacaaaaattagccaggcatggcggcgtatgcccataatcccagctactcgggaggctgaggcaggagaatcgctttaacctggcggtggagtgagccaagatcgcaccattgcactccagcctgggcgatagagtgagactctgtctaaaaaaaaaaaaaaagaaagaaagaaaaagtaatttttactctaaaggtgttacttcttgtttacttttccttttaaatctcatctttattctcatcctttaaagattatctaagtctcaccagaaaatttctgcataccaaaaatatagtgtttactaatcaagtataacaacattatacttttgtaaagtaatgtcttatgttaccaatttggatgatttttctaaacattgttttcaggcactgttagtccagttaatggtgagartttaggcttaaaaactgtcaacttgtagctaggtgtggtggctcacgcctgtaattctagcactttgggtggccgaggtgggtggatcacttgaggtcaggagttcgagaccagcctggtcaacatggtgaaacctcatctctacttaaaaaaaaaaaaattagcaggatgtggtggcacatgcctgtaatcccagctacttgggaggctggggcaggagactcgcttgaacccaggaagcagaggtgagaagtgagccaagatcgtgccactgcactcaagcctggacaacagagtgagaccctgtctcaaaacaaaacaaaacaaaaattttcaatttgtaatggcatagatgaaagagaaacaggtggcagtgtttatgtgtcaaacttctccaaatagacgactgtctcaccttttgaaaccctgtctcaaaaaaacaaaacawaacaaarcaaaacaaaacacctgaaaacttactgggtcttgttcagtgacaccctcccaggatagcctgtgcctagagtgtgaacacactgcctatagattcttccagaaaacctcacagtgaagggtgttgatggacaagagagctgtgtgtgatgctacacagctcacccaacttcttttatcttttttcccacatctctgtagctgtcattagcttgaggtagagaaaaaatgttcagaatgtacagtgatccctaaacaaattattaacagaggtcataaaggcatttcaatctgaggatatctaacatgaataacttttagactcactctgtcacccaggctggagtgcagtggcgggatctcggctcactgcaagctccacctcctgggttcatgccattctcctgcctcagcctcctgagtagctgggactacaggcgcctgccaccacgcctggctaattttttgtagttttagtagagacggggtttcactgtgttagccaggatggtttcgatctcctgaccttgtgatccacctgcctcagcctcccaaagtgctgggattacaggtgtgagccaccgctcccagcctttctcatctttttaaatctgaaaactgcccactacagtgttgcactggatgtagtccagtgtgcacatccacccacagtgaaagtgaaaccaaccatgagttgaatgaagtattatgggagtgtttgtgggaagcctgacaaacctaaagtttgcctctcattttctagtgtagtagtggattcttggtacggttataagctgttctagacagtgcgaaatctagtgttgatttcactttgatttgaaattatttgtgtttttactttggctcctttacagccagagtaaaacttaacttatattcttgtattccaagtttaacttattttccaagtttagcttaacctatattcttgacctgatcagaatttttggactttgggtcaaccataaagaggctcaatatataatgagaaatttgtctcactttaagttgtcagaaagcagcacccaaaacgctctatgtaaaacatgaatagatgcatgaaaatacaacttatttaagaaacaaacccaaggagcccaaacctaaaatctggacctttcttacttaagcaaaaatatcagagtcatgcacgtatgactcttattccatgactgtcttcaaattgactcatcacatccctgttttcaaattaaatagttgccatattctaaattctgtttatgaagttaggaggtaaacagaaaacaatctaaaacctgcttatttcaattgattctgtttgttagcatatctgtactggcatgaatatgattggaacatgcagagttgtagcacacccttatttctggttgattgccaaaaataaagacatcaaagaaaatagaaaaactgggcaacaaatcataactgcataggtttttaaatttagtagttattctagatctctctccatagcttttctgaatgaaactgtccctctcacagcccccagcctcccactgtcctagatagatgaggtgattgttctcaccacctttggatttgtacatgtgtggcattgttttcataggacagattcccagatgtggaaatgctcaaagagagtgaacatttaacaaatactgccagattgtcctccagaaaggttgtacccatgtgcacatccacccacagtgaaagtgaaaccaaccatgagttgaatgaagtattatgggagtgtttgtgggaagcctgacaaacctcaagtttgcctgccattttctagtacagtagtggattcttggtatggctataagctgttttagacagtgtgaaacaatttacaggtatctttagcaaagaacattttcataggtacttttacatgaaaagtgttataatattaaagaatcttttaaaataatgcataatgccactcttgatacattttcatcttttgtagattatcatctacatgtgaatatattttaccagttataattaatatgtgtatgtttttgtgtttttgtttttttgttttgttttgttttgtttttttaagacggattcttgctttgttgtccagactagagtgaagtggcttgatcctggctcactgcaacctccgcctcctgggttcaagcaattctcctgtctcagcctcccgagtagctgggattataggcgtgcaccaccatggccagctaatttttgtattttttttagtagagacaggatttcgccatgttggccaggctggtctcgaactcttgacctcaggtgatccgcccactttgacctcccaaagtgctggcacccagccaatatgtgtgtatttttatctttgactttttccacaaaactgtcttataagctgtttcctgtttctccatatctttcatcatggctatttaaaagctgcatgttgtattttgttattataccatactttgttaattcagttcttaatattgaatatttaatataaaactagatacttaaactgcatgttcttaagtgataaggttgattggtttgatgtggttataaaagtaatacagtgcttatagaaaaatttggaagacacaaaaaaataggatgacacatacaaatygtcctgtaactcctgttaataaattctgtgagcattaggatgtatttccttcctgtcttttcttaatattttattttcttgttttatagtctgcaaccatgctatttgtgaacaacattcatttttacatgttttaaactcttttcaaatatcatttttccttttttaaaaaatatgaaaggtttttgttttgttttgttttttgagacggagtctcgttctgtcgcccaggctggagtgcagtggcacaatcttggccccctgcaagctccgcctcacgggttcacgccattctcctgcctcagcctcccaagtagctgggactmcrggcaccccctaccacgcccggctaattttttgcatttttagtagagacggggtttcaccgtattagccaggatggtctcgatctcctgacctcgtgatccacccacctcggcctcccaaagtgctgggattacaggcgtgagccaccgtgcccagccggtgaaaggtkttttttcttctggtgaaagtaatttgaaattgttactgtaaattgagaaataatcccagtcatctataattccatcacctagaggcaaacatcatgaataatttggtttattaccttcacatatttttctcttaaaaaaaaatttgagatcatacaccatcattgtttcttaattagggggtggtcatggacctttttaaaaatctgaaaaaatccaaattamgaattcttttttggctgggcacggtggctcatacctgtaatcccagcagtttgggaggccgaggcgggcggatcatgaggtcaggagtttgagaccatcctggctaacatggcgaaacctcatctgtactaaaaatacaaaaaattagccaggcgtggtggcgggtgcctgtagtcccagctactcgggaggctgaggcaggagaatggcatgaacccggggggtggagcttgcagtgagccgagattgtgccactgcactccaccctgggcgacagagcgagactccgtctcaaaaaaaaaaaaaaaaaagaattctttttcaaccaagtggccagttgaaaaaaatttttttaattaaaaaaaagaaaaaatagaagtcttaccatatacatacattgatacccaccctttccccctattaaacgtgataaagtaggcatttctgtataattatgaactcataaatatgcacattttctgattattgtgcattgaattatctctgtcctcaaattcatatgttgaagtcctaatccccagcacctcagattgtgaccttatttagagatgggatctctacagagctaatcaagctaaaatgaggtcagtagagtggaccttgatccaatatgattggtgtctttataaaaggaggaaattcgctaggcacggtggttcatgcctgtagtcccaactactcaggaggctgaggtgtgaggatggcttgaacccaggggttctgggcagtagtgtgctatgccaattgggtgtccaaaccagcatcaatatgataacctctcaggagtgggggaccaccaggttgcctaaggagggatgaagtgacccaggtcagaaatggagcaggtcaaaactcccttgctgatcagtagtgggatagcacctatgaatagccactgcactctagtctgggcaacatagtgagaccctgtctctaaaaaaaaaatttaattggccgggcacggtggctcacgcctgtaatcccagcactttgggaggctgaggcgggcggatcacctgaggtcaggagttcaagaccagtctggccaacatgatgaaaccccatctctactaaaaatacaaaaaattagccaggcgtggtggtgtgcacctgtaatcccagccggggtgaggaggcggggagggggcggggtggtgctgagacaggagaattgcttgaacctgggaggcggagattgggatgagctgagattgcaccactgcactccagcctgggcgacagagtgagactctgtctcaaaaaaaaaaaaaaagaggaaaaatacttaattaaaaaaaaawtttttttaaaagaaatgagacatacatagaaggaatatgaggtgaagagacatagagaagatggccatttacaagctaagaagaggggcctgaaaagatgtttccctcacagccctcggaagtagcctaccctgctgacacctttatttcagatttctagcatccagaactgtgagacagtaagtctctgttgtttaagccacccagtttacataatgcagacatttggatgaatatttactttgtgctaggcattgcactaggtttaggaatactaagtcaaagaagtcaagttctctgtctcgaaggtacctagattggcatgtgcataaagaaccctggggttgtgcaattttgggcgataaacagggcatcatgggaggctaggttaggcaagggtcagggaagatttcccggggatgtatcacttgagctgaattttgaagaaccactgggagcttacttaactatttttctgttattggacactaggatgtttccggttattcatttttacaaatgagaacttccctgtgtttttggattatttctttaggatagattctcagcaacgtaccactactgagacaagaatatgaaaccagaaacatcatttgaaggcagcataatattctaccagatggagctttcctggctcattgaatcatcttcttttattggatagcagtccccctaatgttctgtttccagtgttttgttattataaatagtgctgtagcatacattttttgcrtaaagcctttttccataattagaattatttctttttttattttttatttttatttatttatttatttatttatttattattattatactttaagttttagggtacttgtgcacaatgtgcaggttagttacatatgtatacatgtgccatgctggtgtgctgcacccattaactcatcatttaacattaggtatatctcctaatgctatccctcccgcctcccctagaattgtttctttagtgattgaatcatagaaatagaattacagtatgaaaaaggtttacttacttttcaaaaatactgacattctcagtaataatcaagtgaaatttattaacaaattaatttgatttattatagtctttatattgtttggggtgtgttaaaacagtttaatacttcctgcttttaaagactgaaactttcctagaaagtaaagtttggtttgtatcacgtgtgatgaagaaccccttttctttaagttcctcctccacctaaaagaaacttgctttataaagggcacaatactgtcacaaacttgcccacacaatttctgtgctggtttctcaccagctggtgtgtatattgcatcggcctctgttcatactctcctagattgttgtctgtctgaaaggtaactatcccagaagatcagccttccaagtgagctatttctgttctattttgtgtgtctttcaaaatgactcctgcattctccaccagactcaaaatcccatttatgttggcagcatatctactgtaatagagtaacagagaactgcagttatggtgacacatgggaataggggcgcatgaaggagccaggtcaggaatgacagggtgctctgtcccagtgaggggagggtttgccagcaaggattgtattgttcccttcatctcaaaagtgagtatgagtacattttagtcacttaacaaagtaataaacatcaagggctacttatatattttgtatattttttatatattttatatattttttgtatattttgtatatatagttttgtatatttttaaaaaagatatcctcctcactaattactttttaaaaattttacttttaaaaatcrgaaaaaaaaaatgcaaagttggctagaaatagtggctcatgccttggcactttgggaggccaaggcaggaggatcacttgaggccaggagtttgagaccagtctgggcaacatagtgagaccacatctctacattttttttttgtttttttttgctgggcatggtggtgcatgcctgtagtttcagctacttgagaggctgaggtgggacgatcacttgagcccaggaggttgaggctacagtgagccatcattgtgccacagcacttcagcctgggtgacagagtaagaccctgtctcaaaaaaaaaaaaaaaaaaaaaatagaagaagaagaagaagcaaagttatatgtattttaaatattataggagcacacaatgtagaaagtgtaagtatcccataatcctaccccacaaagataacccaccatggtctgcagtttaggacatatttctctaaattttttccttgcatttaaaaaatacagtgatgctcaacttcgttaacaaaaaatgaaatacaaagtaaacaaaaatgagcatyccccactttagctcttaaagataaaacaaaaacgtaaaaacagtagttatatccatgttggtggccacatagcaaaatgggtactctcatacaatgttggtaggaatataaattggttcaaattgaacatctcaaacctgaaaatctgaaatgctccaaaatccagaaatttttgagtgccaacatgacgctcaaaggaaatgcttattggagaattgtagattttggattttgggatttgatatgttcaaagtataatacaaatattccccaaccccccaaaattcaaaatcggaaacacttctgattctaagcatttcaaattaaaggatactcaaccgtataatctatttagagggcaatttgtcagtaatgatcaaaattttatgtgtaacacatgtcatgtgcatttcctctgttgactttagaaaaagaggaatgttratagctgttttataataatgttattagcaatagtgatcgtggtagtggcaggaatactgctggttgtgctgcttgcagtagtggtactggtggtackgctggcagtgctggtggtactgctgctgctgctggtggtggtactgctgctggtggtggtactattggcagtgctgatactgtaccactgatagcactggtactggtggtactggtggtgctggtgatttgagcattcactgccttctactatgtgatgaagcttaacaaagtcacatccaagtctgctttgtacccagaacagtgccagagggcagtgtgggtcaaagcacctcttttgattctctcataacatagacagaaagatgagctttccaggaggaaagatttttaccattgcccctcataaggtggaaatagctggtgtccatccaagcccctgctcacacactcagaaggcacttcctaggaactccttccccgcctttgcttctaagtcccagaccagcagtgagattctgccctttgaaatatttataacattcaattcactataaaacactttgtaaatgtaagtgctgtaagtggcccaaattatatcagcagctttttgagaaatgggaaaaggaaaaggaatttaagggaatgggatccagtgagccaaccttgctattttcaaaccaaaataaatggccgtagatctgcattttataatttcagaaatgactaatgcttggactatttttgagcattataagagtggcttcatcccagtataaatcattctttctacattacacagattatgttgctttttaaatcaatttttttatttcatagtcattttgtttccaggtctaaaaatcctgaaattcctttcttaagggggtccctttgtatcagccactaaggaagtcattgaaacctaactggcttctcccagcacccactacgtaggctaccctctccccagtcctgcaggaaaggccccttgcccacaaatgcacaggggccrgaatttttcattgttggaaattcyccccaccttgtgtagatactgtctccatctaatcatcactcctttgttctgctgtttggaacccccagaataaatctactctttgtatccttcatgtattgaggatggtcatacccctactcccaccctcaaatgatttcttcctcattggacaggattcctggaagttaccctcctggttacctactccactaggtagaatagtacacagactgtctattctcccgagtccccaccaacttgttcataataatgtatttctgataatgaatcctaaaattgagtttgttaacttgtttttggcacccacatcacaccattgtctcatattgatctataaacaaaccaaaactccagaccagttgctttttgagcctaagtgcaagatgtaacatgcttctctgaaatgttgtcttttttcctttgggctcattctttccagacccagacatcttttggaattctgattctgtccagtgggtcttatctaaagcattcctctctcccagcacagtgtccttggatgacttgaaaagcccgcctggtagattgctgatgtatttacttaggcccagggctctgaagagggtgacaaatctctcataacgagtttgccaaatgcatgctggcagcccacggattcaaggctccttagagaaggcagaagaacaaaacctagggcctggctgtcagagggtgccacagctgctggggtggagaatctgctggggtggaggattggaagagttttggtttggccattgacatgtaaatgtcagagaggcctgaggctgttccccagtggaccctcccgccttcccacacaaagccctggctctgtgagggccatggctttgcctttgtgaggcctgggccatcccagctgcagagggaagtccccgtaagtattcactcttgtaaaactgttccattttgcactgtggttgtcgacagcaagcttctcccagctgcatggagtgggagtgttctctttggaatgcgctcttttctggatatagacataggtcctttaaaggtttttgaaatgaaaatgaatactactaggtgattattaatttgaattatgtaaggagagaaacagagagatatatttgtgcacgtgtatgtgcatttacaagaacaagattagctacaaggttcaaaggactttttgaattttacctgatatttctgaaggataattttatttttggcattgtgttttctgtagtcctcctctctctctctgtctctctctctctctctaacctattttgagacagagtctcgtgctgttgcccaggctggagtgcagtggtgcaatcttggctcactgcaacctctgtcaagcgcttctcgtgcctcagtgtcctgagtatctgggattacaggtgtgcccaccaccatgccctgctaatttttgtatttttagtagagatgaggttttaccatgttggccaggctggtctcaaactcctgacctcaggtgatccgcctgcctcagcctcccaaggtgctggasttacagatgtgagccaccgcggccggccaagaatgaatattttgaagtgttttttcttttttcctctgaaacttcagtgtcctatattcaatatgtgaattgtgaaataygtgatgcgcttaccacagggtagaggatatatgtctttgtcatgctgtgggcttattttttttataagtcctttactaactggccagcgattatttaaaatataaattgagatttcatattcagaatgaggagtactggattgagtaagaggaaaatcttgatcttaaaaaatcttgaagtaaaaggttttgtttggtaaagttttcccacataggactcacttccttaactgcttacagagatggtgcttttaaagaaaacattttcttaataaaatacaaatgttttcagatctctctgtctttggtacagatgccttttgcaatatgagttcagtacacagtgtgcatccttaagccttgaatattcagatacatttttgctcttttwaaagtaattacagtaatagaattatgtttacattccagaatacccataatgagattggaaaaaaaagttcaagcagtcagtcttctatccagaagccataaattctgttattgagtgtgaaatctattcttaatttttaaatgtcttttgctctaatgaacttaattagtggagtttggtacagtggaaagaatactaaacaaagtgttttgagacgtgggctctatctctagctacctaggtggccttaggtgaatgtcttctggacctcagtgatggactgtatcaatggttctcaactcaggggcccttggaaatgttgagtgggaacatgtcaggttgccacactgtatgggggcactaatggtttgggaaccctggatgttaggcatcttgaaatgccccagactgtctcacccagcccaatgaagaattggcccactccaaatatcaatgacacccctacgagtaacactggactagatgattacttaggtttttcctgctttgttactgtcaagttcataagtggagtattggcaagcatctaaaataatgtgatgccaatacgctcagtgtctgtctctcacatttagcattgaacgctatgttttctggggtgaagtcatacccagtaatgctgggtcaggacatgcggctgtggcaactcagattcagagctttgttgctgggagaaatctctactgtaagcacagaaaatactgatatggctcaaaagcaggtgcagagctggacctgggttttttggttggctttggattatccttatattctttcctcaaagggaagcagtgggtttgtggccacatgcttgccccaaggccctgggcttttctgctgtaaacaaagggcagctgcctcttcacacttctytgctgctyggtgctgtcccatctgttgggaaagggggtctctggagcctccagtgctgccctgcaaacccaaatccggctgcctgttgtcaggaaccatctagacaactctgacgaggcagaaggggatttggtctggaaaaaagattcctggggtgtctaaattttttggtaggttggcatgattaaattactccttatttgatwgtgaagtgctgttaaatgaaagtcacacaggaaagcttctctctggattgtctttttgtagaaagcaaaggtgagttattactaatcctcaccagaaatttgctgtgatgtttgtgcatatatacaactcttaataactacagtgttctattacctgaagcatgcgttttaattaatgtgttattttccctataaaaataatttatttaaagaaaattcaactaagaaaaatatcagtaataactacattttgatacatatcttgccagtctttaaaacatttttaaaaaatggggtcataatgtatgatgttttacaactttctttgttcactttgtaatatctcatgtattgtttctgagacatatagtcatgtgtcacataacaactttgtagccagtgacagaccatctataggaaggtggtcccaaaagattatgatggagcttgtgtagaaacctgatgtgtggcacttgagattggcattgcagatcaagtagcagaaatgattgatattcagtaatggtgctgggacatttgattatatacatatatgaaaaaattatataaataaaaatatatataccatctaggtttatgtaagtacactctatgatgttctcacatgacaaaatcacctaacagtacatttctcagaatgtatccatgtttgtaacatgattgtattacacaattttacatgacttctgtcttagttcaggctgctataacaaaataccatagacgggtggcttaagcaatcagaaatttatttctgacagttctgagagctgggacatttgagatcagggtgtcagcatggattagttcttttaaaaattttttaaatatatttttaatttttaatttttttgtagagatggagtctcaccatcttgcctaggctggtctcaaactcccgggctcaagcgatctctttccttgccctcccaaagtgctagaggtgcgagccaccctggttcagttctgtcaatggccstcttcctggtttccttgccatgtcctcacatttgtagagcagagagaaaggaagcaagctctcttgttatctcttctcataagggcactaatcccattgtgaaggcttcaccctcataacctaattacctccccaaagtcccatctccaaatcacatcacactggggattagggtttaaacatatgaatttggggttggggggtggacrcaaacattcagtccatagcagctactggtaattcactgaaaggatggtgccgaagagtacaggtcctagagttggaccctgtgggttcataccttakccctgacacttattaactgggcaaattattgaatggctttgtgcattatttactcatctgtataatggggagaatgttaataccaaccacattggtgtgttctgagaattaaatgagataatagatgttgggtgctcagaatagagccttacataaaataagcatttagtatctattaaatatcgtcttatcagcaccagcatcaccatgattatatgaccatacatcccactaacaaatcccctggcattagattcttgcaattaaattctttctgacatgcagagtattactttaggatcatttttaaaatgtggaatttctgagccaaagaacaaacagcagtttaaagctttggatacatattgctagatttctttccaggaagcttgtctcagtattcactcctaccaacttttctcagcattaaaaaattcagcttgtcttccttctaacattctgtgtgctgtgggacctccccattccaataatttggaatataaattcatttcatattgttctggggcaagcattattatgaaaatgaattagccacaaaacaaatcacataaagcatttcgccatcaaatgaaaagaataaggtggctcacctacgcttggtttttcacctgtgcttcaccttctctcattgatcaaggaatgtttatgtgtgagaggatgtgaatgtgtagtcctcagactctcttccctgcaacctagtttaatgtctagacatactggaagaaaaaaaatgatctttggtaacatgatgggaaaagtrcatgaaattagctacataaattgtgaaatagcaagtcagtctttttattctgtgatgtgtaaaaatcacttatttcattgtatttacttttacttttccacaaagaaattgctgcaagttggtatgtacagaggtaagatccacagtgtaacctttgttacttgatactaagtcctggcccaggatgcttgttcagcttgcctgtgctaccaagtgcctggtggtgactcaattctcccacctgtcgtctctttttggatgactgagagccctctctacagcatgttgtgacctagccagcctggccttcacctgtatccagtgcagtattgccagaggaagcctgctttcattttgttctcagcagtccacccacctgcatttgattataaacacaaattcaaacgtgagcatttaatacacatgacataatgaagctgggtgtagtggcacatgcctgcagtcccagctacctaggaggctgaggcaggaggattgcttgagccccagagtttgaggctgcagtgggctgtgattgtaccactgcactccagactgagggacagagtgagaccctgtctctaataaataaaaacaaaccacatgacagtgcaattatgagggaggcatccagctgatctcaaatatgttcagtttgttagmttctcattaagaacatagaatgtaaaaattctcattcaggattctcagatttctgaaaatacattttaggcccccagagctatgcttagtaaaggctgatttggtttttagacactgtccaaggtactttggataattattggcattccaaaaagaaatataggttacatttatattgtttcttttgattgaatacttgactcattttgatcaagaacagtgggttttaaacttttaactgtgacccactatgagaactagtgacccagtatgtacacatacatatataaacatacacacaaatgaaacaaatgtttcccacccaaaatatatcgahctattctattctattctattctattctattctattctattctattctattctattctagttcattctttaaaatgctgcttgtgacctattaacttattttcatgacccacaaatgggccatgacctcccgtttgaaaatccaattccagaggtggtttcttaggactgtgggttgactgataacgtgtctcatgcgtcgcacattgccttcctcttggtaccgggtccaaggcaggctgtacatgtccagggcattgctcctgaaggggtctcagtgccacagggctgggcaggaaatcaaggcagagctctttgtgttggctgcctggggacttgaagagctttgcttttgagaactttggtccttccctgaaccggctgctgcagctgacagctctgcctgagtgggaaagtttaaacgaggacaataattcagtttgagtgcccctgaatcatgtctttgtctctgctcttgacagaacagaaggaagtttttcattattaaggatgccagctgcccacagattgatatatctgtagccagggctggctcactctcaagtaggtacagatctggctccccagttggtatattttgaagaagtccagaaaatattttccttaaatgtctccactcagtctcctatgcctaaaatttcatgattagaagtttggtcttttgcatcttctaagtttttggtcttctagaattccagatcaacataaaaacatcattggaaaagagactaccttaggattgtatcaggtaatatataatggggatttggacagtgctgagagcaaggcatgcccatttcgttggagctggggatacaggagcgaggacctgtggactagagaatggtgagcaggaggaaatggagtggaggaggccgcagggcaggcttggcctggtgaagcctgtgtctaacggtaattggaaagctccatgaactgtggagccctttaaatttattaatgagaattttatgaagaccttgtgacttggggtggacttcagcaaggcttagtgatgaaggaaccaacactcaacaagagtgaccagaactcttaggccacttgctactcagggattctgtgtcctgggttgtccactgtgttttgtttaacaaatttattcccatgcagacaacatgactaattgtatgctacccaagagtcaccttttatttttyccaatggcatctaagcaccttgcatttacatgggcattttttccttagttttctggtcattcagattggtccagattaatccagttcaattgcatgcgcatttgcttttctagttgttggtcatcgtaggatttagtgctggaaaagaccttagcaatcacctcagtcagtgatttttcggctgtggttttcaacccattactgggtcttcaaatcagttttatgggtgyaactgacagggattgttgggagaatccagtaaatatttatcttccccaccaggtgttgtgtagyacacaaatacgtgatacctcataatgagtagcaatgtacaaaacagtgtgttttgtgtgagtgatacagatagattcttttattcgacaaatatcagatgtcattgaagcccttattgtttattggtactgtggtgaggtgygggggatacaaagatgagtgacatgggccctgccctggagatgctcagatgatagcggggagacaggtgcaaaaggctgttgtgacacagtggtgactgcagtggtgaggatgcctggttacatcctcyttacctaatgagcacctgctccggaggccctgctctggaaaagcagcaggctggctgattcagctggaccaaacacagctgtgagaagctgcagggtgtgtctttgagagaaaactcacctctgcggtttagaaaacaagagcagggaaggcttytggggagaagtgccatctccgcttggcctgtgtagtgggtcaaatggtggccccccaaaagataagtccatgtcctaagccctggagcctgtgaatattcccttattttaaaaaaaggttttgcagatgtgattaagatgaggcagtcatcctggatygtttgggtgagccctaaatctaacaacaagtgttcttttaagaggcagagggagacttgacatagaacaggacaaggccatgtgacgagtgagactgaaataatgaggccacaagtcaaggaatgttgttgcagtcatcagaagctggaagggttctccccaagagcttccagagggaacacagctccgccgacaacttcattttggactcctggcctccaaaactgtgagggaacacatttctgttgtaccaagccaccacatttgtggtaatctgttatgacaatcctagaaaatgaacatggtctggattttcataggccgaaattacagaagggatggtgttgggattcaggacacgtgaccccaaaatatttcaagttgaagaaacttgagaaaactgcagatataggagggttgctcttacttcccccacaacccctgcccttttcccctgaagccgtccatacaatctaggaagaattgtctgaactttccctgaagcaggtcttgagatgcttatgtaagaagtcctctcctttgtagggacatggttgaagctggaaaccatcattctcagcaaactattgcaagaacaaaaagccaaacaccgcatgttctcactcataggtgggaattgaacaatgagaacacttggacacaggaaggggaatatcacacaccagggcctgtcatggggtggggggaggcgggagggaaagcattaagagatatacctaatgtaaatgatgagttaatgggtgcagcacaccaacatggcacatgtatacatatgtaacaaacctgcacgttgtgcacatgtaccctagaacttaaagtataatttaaaaaaataataaaattaaaaaaaaaaagtcctctccttatacctggaggaaaagaatgtaattctccctgaagatgaagggtcacagagaagaatctgcacaaacaggtcgtgctgtgtttcctccagtctattaccattagatcctatcgcctttgtccaatcatacttcatcgctctccacttcttcatcatacccagcataaaaaaatacatgtttccctattgctttgggtctttatttccttatgaagactcccacgtcacctaaaacttacattgaataaatgtgcatgcttttctctggttaatctttcttttgttatggggcctcagccatgaacctagcatgggtaaggaaagatgcttttcctccctataagggcatttctggagagagcgccggggytgggagacagagccctgtttgggaagagagaagggagcagcctggcctgagcgcggattttgtgaaaggcatgacaggagatactgctggaaagcatgtagctgacctggtgcytttgtgatggtttgagtaattccttgtttgtagaggatcatttggtagttcattgtgctgcctcttaggtaatggctcttaacaccgggtgacccagcaaaaaacacagggtgaggtttgtttgttacccaggtggctgtacttgtgtgtgtttgcagggagagtaatgctscctgatatgtaaatgctccttgattttgcctgctgaagacaaccacgcacaccccactagagggttgccttagccactttctgcattttgttcttgaacctgcacttctcactgctttttcctaaacagatatatttttgtggcattttatgtccttgaaatgatcaattaatrtatactcattcctgtgaggtgtagtaaacatctttaagccaggtgaagaggttcgtaacatgaaaccagtccatgcctctttcagagattcacaacaggccctccccattctagaagaactggaccatttggtaccttttttttctttagtgagctagaatttaagaatgagtacattttgggacctaattaaattttatatctaccagttgagaaatagccggtgaaagtcttgtgtcttttcagctgtcttcctaagctgcatgacacattcttatatttttgcccttccccatgccccaaattccacatatactcatggcttatggcttttcattattagtttttataatagaaataattcaagcttgttgtaaaaatgtcaaatgataggtgtgaatatatggctccataacccttcagctggctgcagacgtagactcacacttcagtcctcacatcagcttccttttgtaacaaattaccacaaacttggtgggtgtaaagcaacagaaatatattctcccagagttctggaggccagaagtccaaaaatcaatgtgttgcagggccctgctccctccagagtttctaggggatattctgttccttgcctcttgcagtttctggggattgtatgtatttcttggcttgagaaatatggctccaatctctgccttcatctttacttccttttgtcttctgtgtgtctctgtgtgtcaactctcactctctctctccctctccttttttaatttttttattctttgagacagggtcttgctctgtcacctagtctggaatacggtggcatgatctcagctcactgcagccttgacctcctgggctcaagcaatcctcccacttcarcttcctgagtagctgggactacaggcatgcactatcatgcccagctaatttttaaatttttttttgtaaagacagggcctcactgtgttgcccaggctggtctcgaactcctgggcccaagcagtctttccacctctgcctcccaaaaaagtgctggaattacaggtgtgagccgccacgcccagcctgtctgtctcttataaggatacatgtgactgcatttagggcccactgtgataatccaggataagcccttcctcacagaatccttaatttaaccacatttcggggggttatataaggtgatatccactcttttgtcatataaggtaatactgacaggtttcaggcattaggaagttgacataactttttgggggccactgttcaacccactacaattgttaaagaaaaagttattctgacacttgttaaaatggtaaaggagactttattcaggattatcctgctaggtgtcaagatagttgcactagggtagagagattgggttcaactctgaatacaacacaagtgagtaggaggaccaggtgtggtagcaggaggatcacttgagaccaggagtttgagaccagcctgagcagcatagcaagatcccctctctaccaagaaaaaaaaaatgagcggcgttggtagccaaggaaaaggccatgggggtctgtagatggaagattactaagaggagacatcaagggttgggtgattcatgctaaactaacaggattcctgctgaaggcagataactcttgatcagatgtcacctgggggatgaagaatttgattagatagtaatgggatcaagtatcaggggtgggaggattctttctaaactgacttagcaggattcttgctaacactgggctgtgcaggcctggcaaggatggggactaatactgaagccaagtcaagaagagggcccagaagagtccaactcaagtttggtcaaggagaagtctctgtcacaatcctttaagcagtgttttgcatactcacaaagaccattaataggaacctggttttcactgtgaagttatcagcaatcaagcttgtcytggtggggaaacctcaacattgcatgcagctgctgcctaattacagaagtggcttgaactcctgcagccaatcttttttgcctatccacaccatccttgcagtgtgccttcatgaggacagcagtttagagggcaccctgctttccagccccctggaaagtggcgcctacttctgcctgaagattattgtttggattcaacctataggaaaaataaaacacccacaaggactgatgttaggaaactcattaccacatcagagagaattttagatcagtcactatgtgggaagaataaattgattactggtttggggcctggtcttggaacctttggtgacagataagaagccaaggccgggcacggtggctcacgcctgtaatcccagcactttgggaggcygaggtgggcggatcacaaggtcaggagatcgagaccatcctggctaacacagtgaaaccccacctctactaaaaatacaaaaaattagccgggcgtggtggcaggcgcctgtagtcccagttactcgggaggctgaggcaggagaaggcatgaacccgggaggcggagcttgcagcgagccaagattgtgccactgcacgcyagcctgggcaacagagcgagactccatctcaaaacaaaacaaaacaaaacaaaacaaaacagaagaaccaactggcttttctaaggccatgatttggcatgaaccccatgactcggggagcactggtccaacttcaggactggacctctgggaggagggtagaggggatctcttccacagcagggaaggaatctgtctgccctcagaccccaagttgacctaatctstagataggaccagggctgagcccagtacagctcttttgatgggctcacctctttgcacgtagatgtcggcttgtgttgtgtctgggactctgacaggtactatataaatggaatcaactctacaactctgcaggtggctcctgctgatgtttcaggtgtagggaagccctactttcttagtattttcagtactcttccgttggctcatttttctactacgggatgagaaagtagtgctttttacttatcaaacaaactctctcatagggctttgtaagaattcaatactgtaatttaattatgttacattcagctcattataatttattgcattcagtaaattgcatttatcaaacaccagccctttgctgcatgctgtctaggacactttttgtttatttcatttyacctttacaaccacctgcaagttataggtattatctctgttttttttaggtgaggaaactgaggctcagaaagtttctgacttgcscacattctcttgtgtagtaattgtggcatcaggatttggagtccatgctgttgaccccagtgtacatgttcatatgsaattccatgggcccccaagaaagagaaagaatcctggagctaactggtggccaccttcagtctttaggacatcttactaagcctgtctcccatctacaaaatgaagactccggagttgtgcttctccaggtctcaggaacactgacaatggggattagcaagcttttttccacactgcccccccccccaccataattaaagtacttaggaatttcctttgggaagacaatgtttgaatgaataacagaacagaattctgcctgtgaaggggtgtgaggtcttctagggtacgccgtaagtgaggttctgttggaatgattaaatggcagagggcagagtaaattaccagctgggatcctgttgataacaagcttgcaggaaactcactgaagtcaacgtgtaaacacagagatgtgggcagagatatgccggtagtaccgtcgggaccaggcccaggaagtctgtcttttctccctttgccctttcagggatgtgccctggggaaagataaaattaattaattaattwatttatttattttgagatggagtctctctctcttctccaggctggagtgcagtggtgcgatctcgggtcactgcaacctcctcctcccgggtttaagcaattctcctgcctcagcctcccgaatagctgggattacaggcacctgccaccacacccagctaattttttgtatttttagtagagatggggttttgccatgttggccaggctggtctcaaactcctgatctcaggtgatccgggagaaagataaaacttaaatcctactgtctgttttcaagtgacaacaaacttttattatgtttcagaatttggaaaacttaggtctgcaaataagaagtttgtcataacatctaagcataaacactcacctttattgtttaatagagcatctgagaatattgatgaaaaattattccacttcttactttgcagcagccaaagcttctaccccaaacagaatgtcccctgctctgggtgagtttatagcttcttcttttctgttttgtataaattccaacttgtcagggatgctttctctctgaactttcaaattaattgtttccctccttatcaggtaggtttgatctgaggtgattatgaacagattagattctcccaaaagtttaaaaaacaaacaaaaaattactttgcaacaaaaaccaggtttccattcatggttttctgaatctacaaaaattactttggtacaggctgatcatttaggatatttaaaattgaatttgaagctttaaactactatttctttattcatccattcattcactcagcatacctgtctcctgctttgtgactgttatcctccttgtcctggtaagttcctacctcctggtgagttctgctgcgtaaagtaggggctgactgcttcagctggaccaaaaacagacctctgtttccttttttctttttctatttataattttctgctttgtaggaagactacaagaaatggtatatatgactagatgctgcttttccacaataataggggatctttgaaatcctaggaaactgtcttgttttctaaattgtgycttttaaacactttacctgcaagtcttgtcttcctaagtgtagtattagcaaataacagtggatatgtttttttctctctctctctctgtgtatctgtgtatcttcagagctttcgaattttaaaatagttttattaaggtataatttatatatcataaaatttatccattataactatgcagtttggtgatttttaaagtaatttcacacagtgtgcaaccatcatcagaatccagtttgagaacgttttcattactccaaaaagtttcctaatgccatttagtgatcagtccccactaccacccctagctccaggcaaccattggtcccctttctgcctccataaatttgccttttctagacattacatataaatagaatcagatagtatatggttttttgtttctggctactttcattgcgcataatgtttttgaggttcatccacgaagtatatgttaatatcagttccagagggatttaaaacaaataaaaacaaaactttgaattgtggcaaatttcacaattagactagtgtaagtcacccacaagtacctcactcccagattcagtaattatgaagccatggtcagtcttactccctcttccacccacttttcctacttctttgggttattttgaagctagtgttattactttataaatattttaatatatgcatttgtacttatctcattcttttctatagctaaggagcaaaatactttgagaacatgtggctacctaggtaagggggaaggtaagagaactaaacattaaattaaaatataaaattcttgctatgtttaaggcactacmtatgacaatctgggatataatgatgtataaatcttatatatctgctaggtctgtaatatataattatagtacttaattcaaacatcagtctgtgcagataatagatttccctttatatatatatatwtttttttaccttgtttayattttgcttttattctaaatgccaagttttgttttgttttaagggtagagagagatgtgttatagagaatgatgtgaagtgttctcttgaaacctgctatgcagagaagtgaacacggataatttcaaatttgctaatctgaaattgtgaccaaggtgagaatacaatccggtcattgtttctgttgatttgggagcccagtttgctatggattagatggattctttgaattagaataagcaaggagaaataagctcctgaatagctttgtggaccattcattaatgttttcataattattgagtatgagatatgtgccagcttctttgcagaatgtgagcacaattggatgaagattcctgaggtagatgcttgaggttggctttctcagggcccattcccaaccactctctcacttgccttcctctactgttgagactggaaatctcaatgttcaattttcctaaccaccttccagccaggagtggttatgtgatatagtttggccaagcacaagtctgtagggaaaggtctcccttcctgaataaaaagacatatctaaggtagaaaaagactttgccttcttcctgtctggacctggatgtaacacccggatgtagagcagcctttttgaaaacatgaggtgacataaggataaaagccatcacattaaggctggcaaaatttagaaataaaaggagcctaagtttctgagggtaatggtaaactgtcaccaactgtagactgccttctccaggacttattcatatgggcgaaaaagaagcctctattttgtgaggcctggtgagcctgcttttttgttacttgcagctgattacatgcttcattgatacttatgtgtttgtcacctttttgccacctcagagcactgtcacgcctgatgccattctggtctagtcatctagtcatggacttgaggaattttagggataggaagtcctagacattatctagtttaacgtttctcaaccagtgggttggggtcgcagtgctggggggagggtgctactgttatttagcacctgcaggccaggggtgccaatagcttgtattgtgtgagacagtgccgtaccacaaatgttcctgttcacaataccagttcataatgcatggtaagaaacgttagtctgcttccgtgatttagtcctacacagagcaagccacccagggctcttgagacactgctgtactgacttggacaacctaaacaccctcacggtcccctttccctgctgctcctcagtttagcctgtcttccctttcaactctgttatgatgcccactttgattcctcaagacttcagcatcaaaacagcattccaaacagaagacaaatgcactgcaaaccaaagagtaatggagacaaaaagcatgaaatgcccactgaaatccctaaagcctctataaaatcgtactctgaaaagcctccgaggcatctgggcttataatttgttcactgtctctccagattccatcacaccccagttttatgaggcctgggcttggggtgatgtgaatggtcacctttcccacctctggtggctcttttatcttgctccagttgatgaccttgatgcttctagaggaaggaagcagaggcttctgtcactgagacagcttctggtcacttgagcaacacaggggctaagttctagagctcccagccctgcctcccaggagagagccacagatcactcactctcctttttttcttcccctttacttggaggtggaattccaagcagagaagccagaggctgcctgtgctgtgatattgaagatagaaatactaccctgaagttcctggcatgaaaaatatcacagtacaggcagcctctggaaatggaatgaatataccatggttagaaaaatgcatcaggctgcaaaattttcaccaggcagtcctactattaataatgtcatatgatatattttttaataaagcaatacattaaaaaacgaatagtaactggaattgaaaaagtcctggctgtatcaccagatgtgtcttcttcagtaagccattgaatttctgagagttctcagaaatcgtgtaatgggggaagagcctaacgccctcctcccaggtccctaatctcccaggagattaaaggggctgtgggatgggaaagcactttggaaattgtaaatagctacaacaaagttaattgctattctcattagagctatgaggcttttagtggctttaggcattaataatagatgagctagcatccaggactgtgggccgtagttttaagtttctgttgattcttgttgtattttgatttattaggtccaacttaatctatttcaggccaaggcaatgggttgtgagctgagtaaataataaagataatgtgatgcacttaacacagtcagaagaggactgtccccaattagtcttttttttttttttttttttctagcacagaaaaaagcacagctcttactgtatctgaaagacactttggtaggaatgctcatcaagacggggcttgcacctgaggccatttcttaggagtagcttttgcctgcatcataatttcagaacatgtgatacttgggatgcttttcgtcattgaggtttacttgtctttatatggaacataatttgtacctgcaaaatcaagacttaacgattaattgttttcccttatggaagcctaaggcttgtttctacgtatttccagggttttgttctttaaggaacacatgcttatgaaaaaacacaaatactttcagcaaaaagtcttctgtgtctcccttcctcaagttgagcttggagtcagtggagctctgatctgcatttgcatttgagagggatgccttcttggcaaatacagcatgccagatatgtcagtattgggttgcttggaactccttaagcttacttaaacattctttagaaacacattcctttgaagagctcagcagagctcccagccacgagaatgctaggcttattcacagcgtggcttttactctctgtaactaatccacagcacatctctctggaaggaagcaaaatttagcaagttgcctgttgattgtgtaccatacagtatttttgcattaaagaaaactacttatttcagatacctggggaggggctttatggataacatccatgtggagatgcttgaaaatactgtttgttacaccaaagtgaatgggtgttttgtgcttgtgtgatgcagtaactatgattcttatttcatttatttctcatttagaaggtgtcgtggtgctaagtctctgatacaaggagttatcttaaaaaaaaaaaggcagtgacttgaactgagtggtaggaataataatatgtcccatctcatcacctccccacaggatttatgtgttcttttaatgggtctggtttgtggatcgtttcaccttcattggtttccagctgaaagtgctggtgggcagctgctgcagatgattaacactttcacctagcctcccatattcttattgttaacattaaattacacttgccttaaatctctttttattcagtttcttcattggttgttagatgtttgtaacttttttcccccaaggtccaccatgtttcttcatagcaaccatggtaattattaggatagtaggcatatctggggtttacactgcctgtttatttgaaaaatattttttcagtttcaggtatatagttatttcaaataatgtaacattgccatacttaacgtaactataataaaaataacttaaccataattatctcatgcagaataatcatttgaacattccaaaggtgatataaagagaaatagactgggcatggtgtctcatgcttgtaatcctagcactttgggaggctgaagcaggtggatcgcttgagcccaggagttcgagaccagcctgggcaaggtggcgaaaccatgrcgaacctttatttaaaaaacatggcaaagcgttattatttaaaaaaaaaaggataaagggaaataggtccaaatccctatctactaaaagcttacagcctagtcttatttattttttagaagagtctgggccaatgaatactttttaaaaagttggcttttaaagcatatgcagatttgatccttgctttccttacctgacgggaccctttttgagcttttggctattgtcaagaaaatatagcaattaaatcccattatgataatagctatggaaatgtagtacttacagtggcaggtactattctaagtgttatttatgttaattgatttaaatttaaaaatacagagatcttcacttagggtatgacaagataaattttattccaccaaggggactggggtgtggaggtgggggttggctggttctaacaggatttcccccatcctttgctgcagctgcttctatttctatataactctgggctgtaacccctccaccacaccctctgcaccctccctatagtgctgccccttccaatrtctctttcatcctgcaggcagcagggttcttggcttggactcacacagttctttcagccagaaccagaggtaatctgcagaagctataatatctcactgaggttagtaattggaaaaaactactgaactctcaggctgtgatgagctttttgcattaggctagtgggtgggtctgatgctttttggctgctggggtgatcaaggaaggattgaaagagaaagacgagagtcctcagaaatggggtcccactgcttctaaggttgtgcacattaggaagtcgtgattaggccagtgcctaatgttacctctcttgggcagagaggacagaaagccattagaggacagaaggccattggttcgggtgtttattttatgcctgctgcatctcataaagcccctgggctgtagaaggagagtttaggttgctctggacagagtatgggcttctgagtcagagggaacttgagtttggccccttgtactgcttactatgtgtgtagacgtgggcaagttacctaatcccctacattcttcatcttgtcatcaaattcaataaatattaagtgcctgctatatgtggctgatataggcttgaacaaaacaagttctattctcaaggagccagagagggtgacaaatggtaaacaaaataaattaatacattatatagatggcaataagtgctaagactgcagttttaaatagggtagtcagagaaggcatcactgattaggtaacatttrtacaaacacttgtaggccctaagggagaagcctgtttcactagctggtgataagagcattccttgtagagggaccatagtgcaaggccttgaggcaggggtgtgcctggtgtgttggtagaggagcaaggaggctggtgtggccagagcagaatgagccaagggagcaggaggtgatgtaatcrgagaggtaagtggggagcagacgctggaggactttggagaccattgtccagacctgggcgcttattctgggtaaaatgagaagccacagtggtagtgagggagagggtgtttgagtagaaaagtgacaaggtctgacctgaggtttaaaggatcaccttggcagttgtattgagatagtgtggggggcggggggtgggggggaaggaagaacggaaacagaaagaccaggcacggggctgttcagcatccacgtgagaggtgatggaggcctgcatcaagatgggagtggtaaacgagggagaatgatcgtatccatttaataataaccagctgatgggatgctgtgaggttaaatgggatgcgtagggaacgtgggtttgtaggttctccatagagggtagctgctgctcttattattgagactcttgttgtaggacagtctctctctcgctctcgctcgcgctctcgctcttttagacagggtctcgctcggttgcccaggctggagtgcagtggcacgatcatagcttattgcacccttgaactcctgggctcaagagatcctctgcctcaacttcttgagtagctgggataaagacatgtgctacccgcctggttaaattaaaaaaaaaaaaattatagcgatgtggccttgctatattgaccaggctggtctcaaactcctggactcaagcaatcctcctttcttggcctcccaaagtactaggattataagtgtgagctactctgcctggctgaaggacggtcttgaagtaaaggaaacaaattgggaatttgcccatccagtctgcagcagtagtgtggggaatagaacttagacgtgctggctttaaagcaaatagagggcttcttgcctttccctttaatgaaaaatctaaatcactgtgcacccacagcctggaaatgctcaattaaatcgcatgcacgtcacagaactcctgacatcacagcttctttttttggccccaccttataccgtgtgagctttaactgtaagtagcgagcttggtttccatgagtcacatgtgtccacaggtaagttgtgtggctgattggcccattatgtcaatttcagattagcttttatggttttagtttccctgtgtgtcctccccttgccctttcttctctgcaggcagagttggtctaatcctgaccatcctggggctatgctggttctccatttccttacccggcatctgtatttctgccttctccaggggctgtcctcccgtatgcaccatctgtgcaatttcagcacttgctacccatcctgaagtgcttagagattgagtagttggaaaataaacagtggagggatcattgtattttcattttttagtgttcttaaaagatacaggatttctgttgtgaataagtaagggatcagcataggaaacagcaactcctctaggcattttaagcagaaggagacagaattgagtgctcacagaatcactggcagggctgggccctcagagcaactcccagaagagtgaagatctggtcctctggcagggctgccaattacaggacattaactggacctgtaggttcaagaatccactctttactgggttccaaagttcaggaagcctgaacggagaagggtctgccactacagtgcctcctggcactcaagagagtggccctagagtgtggttacagaaaacccacccattttgtgcagccattatggaaagccatatggaggttcctcagaaaattcaaaatagaactgcattgtgatccarcaatcccacctctgggtatatatccaaaggaaatgaaatcactgtcataaagagacatcagcaccccacgtttgttgcagcattacttaaaatagccaagatgtggaaataacctgtgtccactgaataaaggaaatgaaccccagtagtatattcatccttaataaaggagagcctgccatttgcgaaaacatgcgtgaacctgcaagatgttatactaaatgaaataagccaaacacatgacactactgtgtgattccacttatatgtggaatcttaaaaagtcaaactcatagaaatagagtaggaaggtagttgcgggggctgggggagggcggtggaagcaatgggaacatgttagtcaaagggtataaactttcagttataagatgaataagttctggagatccaatgtgcagcatggtgactatagttagtgtattatgcttgaaaattgcaaggagagtagatcttaagtattctcaccacatacaaaagtaactgaggtgatggatgtgttaattaacccgattgtggtactcatttaggaatgtatgcatatatcaaaacatgtttaccttaaatttatacaattttatttatttttattttttgagatggagtttctgtcacccaggctggggtgcagtggcgcaatctcagctcactgcaacctccacctcccgggttcaagctattcttckgcttcagcctctcgagtagctgggattacaggcgtgtgttaccgtgccaggctaatttttgtatttttagtagagacggggtttcaccatgttggccgggctgctcttgaactcctgacgtcaagcgatccgccctccttggcctcccaaagtgctgagattayaggcgtaagccaccacccccagcctaaatttatacaatttaaatttgtcagttatacctcaacgaagctggacaaaacaaaacaaaaacccacttcccattccacagtttgcttgccagccaaaagctgcccagagaaggcctctgcttcacttcctccctaattttgcacaggtgactttagttggttcgcatcccgatctctagctgcaaggtgtggagcctgaaaaatgtagtgtttaaccttctgtcctctccaactaggaggcagttgaggtgagattaaacaagccaatccctagtctgcctcacctcatgcttgtctgtggtgaatactgcaggggcctcttcttccatgtgttggcattggccagtgttgaggattccatatgcaatataaataagactctatgctaaacactgaatccaactgtcaatattttccaagcttatctctagtacaatactgtgtgctttgtaacagggtaacttttattatcaattaacattgtgatgaccacctctgatatctgtaaaataaacaaagtaggctccaatcactgacaggcagattttggtttgtttatatttgaagaaaataatgggtctgtatttctgttaaacacataattttttttatggttcatatcattacataaaaagactgggctagttgcattatttatgtaaaaatatattctcagtatttgatatgaacagcaattttagcatactcttcactataaaaatatgcaggagtggatgttaagtataggtaaatagcaaggaaagcacaaaccagcatcagcactggtcttaccagtctgatttctctggagtgcagaattacccatttgttgcagctctatgttgagcaatgttctgtaaaagttaatcaagtgtctttaatcattagctgataaagcagcagggaattaagctagcctaattagtttgggaactaaatcagacagaacaaacagagcacggggtaggacaaatggatgtttggtggcctcattggaagaaataggttacctttgatattatggtaattccttgtcattcatgggattcctgagaagtgcccttgctgataaaaactgaaattggcagatcagtgtctatttcaaaattgggagttgggataaaataaagyagcacatacacatctaatcctactttatatatacacatgtatactataaaatatatatagtaaatgctccaaagatagctgcttccaaaacagactatattccttggtaattctttcaaatcattttattttattgttcaggaaactttcctgtagctgtgtcctagaatgatccagctgccagttttatattatgcagcctacacttttccccccaagtttgattatgaaaatgttcatacatacagcaaagctgacttttacagkgaacacctgtatacctaccacctgcataaattctatattttattaagcttgctttatcacctagataccacctgtattcattatttattgctgtataacaaattaccccaaacttagtactttatttaaaacaataaacatttagtattccgtactgtttttgtgcgccaggaatccaggagtggctgggtggttctggctcaaggtcccttgtgaggttgcagtctaagacattggctagggctgcagtcttctgtgctttgattgagcctggacaatctgcctccaggaggtctcacccacatggctgttggcttgaaccttaaaggatagctctggtcaggtacaaatgggtgttgacagtaagtgacmtagaagtgatgagagttggggaaatcagggaattcccaggaggtggaacttgccatagcatcccagccagggcacaggtgcagaaagagaaagtcatatgaagtgtaaagcagaatgagagcatggctcagagatacgtgtggggggcaaaaaggatttccagcagaaaagatagattacattgggggaggtggctttaatggctcctaaagggagggtgcctcagctactgagattgaaattgtcggacacggtcatcaacattagaaaaacagcagcactgagatttattttcctggttacctatattttattcacatatttaagtgttaaactgaggttgaaatgttgtgaatggtccccacttcttaaagctttgctctactgggagatttttaagaaaatctcacggcacatcttcctaatttttaaatttgtattcctgttcctgaccccagaataggcccaactagacaacagatctgtgggaatgtttggctctccatgaaccacaaagactcctccaacacagaggtgcagtacccacctgggccaaggagggaagatgcaggtgaggagggtgcttccaaaaggtgtgyggagctgtttgttgagggccatgaagctcttgcacagggatgggaggaggcaactaaccagggctctgggtggaggccagctgccctccctctgggcgactgtgcaccctcccactctccctgggaggcgggcgcttcctttgaagtgcaccagtgacctgcctctctcctggctgcttcctgatgtcttkctggcagcaagtgggctagggtcggcttgcccagaggggcgcatccaggtggggttcacctttctgaaccaggtagggaatgtcttggtgctcccttgatttgaaggggaggaccatcctttattggcaaagaacagagagcaaacaatgaaaagaccacactgggccaagtcagtgacccatgaataaggaattccaagcttttagtgcgggagagccttggaaatcatctcatacagccccttcacttaaagataagaaagaaacatgaagccaagggactggacaactagtttaagggtgggctaagtaagacgtggaagtcctggttttctgttactgagggctgcagtttattttatgcctactttgtatgtattggattctgtagaatgacagttcacacagtgccaattcattatattacaaagataaaacattgcctttatttttttctcaaaataataaaggttatatggtacttgcggcattagcacttgccaggtactgttctcccttcctgacagatagaaatcgtcatttaatcttctaacagacctatgaggtgaataccattactttccccactttatgggtgaggaaactgaggcccaaagaggtcaagttaacttctcccaagtaatgtggtgatgtctagatagtgagtgacagcattgggatttaagccaagtatgctgacttcacaatccatgttcttaaccacactataccttaatcgccagtgcaaacattagcgctgtttactggcttttcaaagctttctgttttccaggcatgtgatgggcttgcgtttcctggcctccttgtgtttttggagccatgtgactacttctagccatgttgagagaagcatgctatatcacttttgggctaagtcactctgtcaccagtgtgtgaccctccagatctctcttgccctctgctgtggagactggcaaagctccagatggtggttgctctgtcagtctgggcaagttggagaggaaacagcctcagccagccctaagtgggtgtagcataaatgcaaaatcaacttatgttatttagccactgagatttgaggcttgtttgttactacagcataatttagcctatcttgagtcacataataatctctgatgtgcctaacgttttaaggggcacattagcaaataggttggccacttaaaagtctttccaaatagttttttttttttttagcctcattgggaagcattcatgttattctttatatacagaaagcacctggtactgtggcaatagcatagagcagagcttgagatggaaagttctgttttttggtccttattatttttgctaattcaacagctttattgatatctagttcacataccataaaatttacttaaagtgtataattctgtgggttttggtatattcatagagttgtgcaacaatcatctcaattaattttagaagactttcatcacctccagaagaaacctgtacttattagcagtgactcctatttccccccaatctccccggccctagtctacaagtgatacaatttctgtctctgtatttgccttttctggacattttatataaatacaatcatataaaatgtaagttctgtgaaggatcttggctttgctctatgctgtaactctgtacccctcacagtacctgtacatagtaggtgctcagtgtatatctgttgggtaagtgagtggttactgaaggtcggagtggagagccggatggtgatggctggtgttgcttagcatygccctggacagggaataaagggagcggtagaatcacctgctgacaacatctcctcttcatccagagacttctgtgtcagggcttattataaggatgtgatcataggcccagtgaaagcagctacccttgacatggggtaagtcatctataaaacaccgcattgcaaggctgaggtcatgaaggggtacgagtgggcccaccacagcccgattcctcttcctccgtagactcttcccaaatacacacttttctcaggacctcactggattccttctcctctcaggttcctggcttcccttccctggctacctggccagggctatggcttgtagccatttctcagaggcacacactgaggcattgggagattcctgctcctgctctgagtagtgctgcagccattcctggcttgctggtctggattttctacccctacctgcagacccaagtctgggtaccctgtttgccttaagtactcatcttgcattatttaagactacaaggaggcaagagtagttagtggttaaaggcatagtctgtggggtcaggcactctgaagcttgagggccagatctgccatttattagctgtgaatctccaggtgagttactaaacctttttgagcctttgtttctaatctgtagaatgggcatatgaatagtaatatgaataaatttgtaagagttacatagaataatgcatagaaagtgcttagtgcaatgcctggcccaggaaaatgtttgctatggcttttgatacaatctaatttggtcctgatattgttgatgtcactattccctagggaacaaaagaactacatttttttgtttgttttaggattaccttatgatttgcaaaatgattttgtggcaaataactgaattccctgtgcttgtcatcttctgaaagggaagtcaaaggaagtgaatagagaaatgtggccacagcagagaccaaagaacctgactgtttttttaatttttaaaaacattaaaaaaattttttttttgtagagacaaggtctcactctgttgcccaggctggtctcgaactcctgggcttaggtgatcctcccaccccggcctctcaaagtgctgggattacaggcctaagcctgacagtttggtcttaggtatgctcctgattgtggggttaccttgactgttctttgagtcctggagaagtcaacatgaaagcagttacaaggtcatatgataagcctgtatgggccatgtagatagacttccatgcatagatggtatagaaaagtaaaaattatcttctgctttgatcgttgttactcccaacataaacttacagcaacagtcttaaacgccagtcaatgctatatttgtaaaacatccagtagagaggttgggtctcctgatgaacaaaggaaagtttgcagtgttaagtgtcatacagatttgtcattgcwctctattctctccactcccacatgaactaccatggggcaaatctaagccacctcttggttttggtctcagaacaatgagtgtctgtttctaagttagggggcggagtgcagtcatgggttttggggatcccatactgtcactggcagccagctgtgcagcctggagtgtggggctgtggccagggtgggcacaaggagcagcatctgtgtttgtctgttggggtaaacctggactttggctggaggagatattttcagtgctttaccagtattagtgaagcatggaattggattccctggaagtgtcagaaatgccaataagcttagcaaatggctgtgcagcatgttgcacataaatatcaattttaatcagatactgattgggatagatttcatagctaatctagaagaagtaataatctttgttgtctgtcttagaagagtgaatggtttccactcagaaaattcagatctggaagctcatagttcatagctgtttttttcttttctatttctttttcctttytttctttctttttctctcttttttttaagagataatgtcttgctctgttgcccaggctggagtgcagcggtgggatcattgctcactgcagccttgaattcctgggctcaagggatcctcctgcctccgcttcctgagtagctgggactataggcatgtgcaaccatgcctggctaaatttgaaaaagtatttttagagacagagactcactatgttgcccaggctggtctcaaactcctcagtttcctgagtagctgggattacaggcatgaaccactgtgcatggctgtcatggctgttttttcttttaactttcaattaaaatatataccaaatgaaaagtgcacaaaccgtaaaaatacagattgatgaattttcacaaagggaatgccatcacgtaactaccacccaaatcaggaaattgaatactgccaaatttccagtatcccccctcccaatccttaacctgctttcccctccaaatcactctcttgacttataatgcaatcgatgacttttgcctgttctgaattctatataaggagaatcatatggcatatcctttttgtatctgacctcttttgcttagcaggatatttgcaagatttatccacatggttataaatagtaatagtttattgatttacattcttatgtagtatgaacatatatcacagtttatcccttctgctatttatgtacattttggttgttttacagttttaaaaaattatctgtattttaaatttcattttcaactttgctgttaaattaccaaacaataaactacttaagaacataacctaaatattttggttaactacattctggaacagaaaggcattaatgttagtcttaggtggcagtgagcttcacagagacacacaaagagagagcaaagtgaagaacaaggcaatctctccctatttatggcatggcaaagcaattcagaatgcgttcactatttctatagataaattttttaatgtataatgtgggaaaatttaatgttccaatttatgaaaacaagaattatcagactgtcacattccaatgacttaagtagctaaaccttacatcaagcttgtctcacccgtggccagtgggctgccatatggcccaggatggcttttcatgtggcccaacacaaagtcgtaagctttcttaaaacattatgaagggccgggtgcggtagatcatgcctgtaatccctgcactttgggaagccgaggtgggcagatcacatgaagtcgggagttaaaaactaccctggccaacatggtgaaacccatctgtactaaaaatacaaaaaattagccgggcattgtggcatgtacccgtaatccgagctacttgggaggctgaggcaggagaatcgcttgaacctggggggcggaggttgcagtgagctgagattgtgccactgcactccagtttgggttacagagcaagactccatctcaaaaaaaaaawtttttttggagtttttgttttgttttgttttgttttaagctcatcagctattgttagtgttagtgtattttatatgtggcccaagacaattctactttttccaatgtggcccagtgaagccaaaagattggacacccctgccgtaaatggaattaaaatgttgggcataagatatcctcaaaagactgtcataatatattttgtggaaatagttcacttcatttctatgattagatggattaccaataatttatagtttattatgagtaatgctgcagtgaacattccccatatgtcctttggtgtacatgtttgtatttctgttgattatatacctagaattggaattgtttgggcatgggatatatagatgtttggcactaccaaacagttttctaaagcagttataccagtttacatcctcaggcacaggtgttaaaagagttagcattgctccagatctgtgtcaaccatggtgtttccagtcttttaaaattttagtccttcttgtctgggcgtagtagttttacttcctatttccttgatgacttttgaagttgagcacctttccatatgcttattggctgtctggataacctgtttggtgaaattaccttttcaaactctggagcattttcctattagattatctttttcttattgattttgaagacattctttatgtcttctggacatcagaccttaattggatacatgaactataaatctcctgtcactgtggtttttctttcatttgaattgattctgagctgggcatcagtctttatgaagctagtgtctttccagtatgtccttatttctaggatgattagcccttttcagggtgtccaactgaagtctggagtgtttatttactcagtttttctacctttgtgttccctaaacttcacagctgcttgcaaatcagcaaatgccacaaaggaaaacatgtcctcaaacatttggcttacctctttgcaccaccctttccttcatgatcttgaatacttaggttcttgcaaggacttgggtctttggtcttcacacagatttttttgtttgttcaatgttttgttgagcttttctkgttgttactggtggtaggattggtatggtcggcaggtaaaatgtctgccctgccaaagacatactcatttcctaaccttcagaacctgtgcatattaccttaaatgataaatgagtgatattaccttatgtggccccccaaaatgttattaaggatcttgagagaaggtgcctctcctggattatatggacaggatcttgagagaaggtgcttctcctggattatctgggtaggatcttgggagaaggtgcttctcctggattatctggataggatcttgagagaaggtgcctctcctggattactagggtaggatctggagagaaggtgcctctcctggattatctgggtggaccctaagtgcaatcacatatatccttataagaaagacagagggaaattagacagagacgcacgaagagaaggtgaagtgaaaaccaaggcagagattagagtgttgtggcctgaaccaaggaccatctgcagccacaagaagctaaaagggacaaggaacaattttcccctagagcctctgaagggagtacagcactgccaacaactggacttcagacttttggcctccaaaactgtgagtgtgatggttaattttgtgtgtcagtttgactgggccatgggatacccagatacctggttaaacattattcctgggtgtgtctgtgagggtgtttctggaagagatgagcctgtgactggatagactgagtagagcagatggccctccccagtgtggatggggatcattcaacccctcagggccagtcctgatggaacaaaaaggcagaagaaggttgacttctccctgcctgagtccatgagctgagacatcaatcttctgcccttcaactaagacttacaaccatcagggatcctggttctcaggcttttagactgagactcaaatttacaccactggttttcctgggtttccagcttacaggggtcagattgtgtgacttagcttccaaaattgtgggagccaattccattctagattttttttaagacacagcctctgttgcccaggctggagtgcagtggtgtgatctcagctcactgcaacctccacctcctgggttcaagcgattctcctgcttcaacctcctgcaagtatctgggtttacaggcacgtgccaccactcccagctaatatttgtatttttagtagagacggggttttgccgtgttggccaggctggtctcaaactcctggcctcaagtgatcaacccatcttggcctcccaaaatgctgggattacaggtgtgagccactgtgcctggcctcattctagattttcaatatccatatctatctgtatatctcctatttgttctgtttctctggaggaccccaataacagtgagaataaatttgtttttggtttgttttttggagacagagctttactgtgttgcccagactggagtgcagtggcacaatcatagcttactgcagctttgatatccctggctcaagtgatcttccccacttagcctcctgagtagctgagactataggtgcataccaccaaaacgagatgatttttctgatttttagtatagatggggtctcactatgttgcccatgctggtctcgaattcctgggctcaagttaccctcctgccttgacctctcaaagtgcttgtgttacaggcgtaagccaccacgcctggccagattgctgttttaagccaccatgtttgtgtaatttgttacagcagccacaggaaacctatacagttggtctgacataaattaatttatctgtaacatttaaaaattaatagtagtttaataattttattgcattgtttctagattttaattgctatttcagaataaattggtggaatgcagttctttctttatagagggatagtgtgtaatttttaatacattgtgaaaaggcacataatagaataaactttggcctcttttattggaataatagactcaagaaactcatttgatgtttttctggtaggttgaaagttgtgcccattattagttttccttgttgtagtataatgtcgaaagaagttgttgagatacttgttaaaaacataagagtggggaaaaaatgtaatggaaccattatatatgaaaaaatttggacctatagtccacatagattgtttaatcaacatgatcattattataatttataggaaaaacttgatagttatgtttattctgaccacctgtaacccgtcagtggggatactttttaaaagagaaaactgtcttgtccttatgacagttaattgctaaacagagtagatgcacagaaacccagctcttgttttcctaagggggggactatgatatgtaatgggatgggagtagccactgtcacatcagcaggtcatgggatcttaccagtcatagcccctgtggcagttgcttgacttttttggatatacacttctctgcaagcccttgagagcaaagtcaatgtctttatgtattcatggattcattcaatagttattwctcccttaccttgtagcaggtgctatgccaggtactgaagatactctaaacagcaaaaactgacatggttcctgttttcatggtgtctagtgggaaacagacaaccaaataatcataaaaataagtatcttatggccgggcgtggtggctcacgcctgtgatcctagcactttgggaggccgaggcrggtggatcacctgaggtccagagttcgtgaccagcctgaccaacatggagaaaccccgcctctactaaaaatacaaaattagctgggcgtggtggcgcatgcctgtaatcccagctgctgcggaggctgaggcaggagaatggcttgagcctgggagttagaggtggcggtgagccgagatcgcgccattgcactccaccctgggcaacaagagtaagactccgtctcaaaaaaaaaaaaaaataagtatcttatgacaaacacaggtaagtgatctgaatgaaaggaatgaacacgagtccatgggaacatggaacaacagagcttgacctaagctgggggattaggaaagcttccctgaggaagaaatgatgaactgatgagtaggctttgactggcaggagcagtggggagggattaagtatttcaggcagacagatcagctcacacagagtcatatgatgcaaaaaaaaaagcataacactgatgaggaattgaacaaaggccaaatgggaccaatgctcagaaagttaagagatgtgttgagagaggtggctccatgcagaatcttttcagtcaagccaggggcactgatctttatcctrgagctatggagatctatattggtttgctagggctgccattacaaaatgccacagactggatggcttaaatgacaaacagaaatgtgttgtctcacactcccagaggctaaaattccaagatcagtgtgtctgctggtttggtttcttctgaggcctttcccctcagcttgcagatggccaccttcttcctgtgttctcatgtggctttatctctgtgcacttacatctctgatgtctcttctaaggataccagtcctgctggattagagcctcacctttatgacctcatttaaccttagttacctctttaaagaccctctctccaaggatagtcacattctaggtactgggggtttgggcttcagcgtatgaattttggagggagacacaattcagtctattaacagaagctattaaagatttttaagcaagggagatactggctgtaatttacagattgagaatatcatcctggtcatactgcagagaaaagatcagaagaagccaaagttgattcaggatggttagttgggaatctactgcagaagcccagctaagacacaataccagttggattttggcctggtagtatagatggatgggagagagatttaggaagcaaaaccaacacaatgcagtggtggattgaagcattctatagaaagaatgggagaaaggagatttcaagatcgattccaagttttttgacttgcacagttgcaataacgaacactggagaagactaggttggagacagatgagtttggtcttagatctgagtcttagagttgaggtgctgctttgaagacatccatgtggaaataagtaggcagttggctatttgaatcaggagtttggaggagagatttgaaatatggatatgaatttgaaaggcttgggcctacagatagtaatagcagctagtatacctcttggcatattttaaattcttgataaatgtcttttgaattaaaactgtggtctacactgtttctttacatgaaccagagcagagtttaaagatagttcataatcatctctttagaaatgctatctgttaaagaaaatagtagaatgcatctccaactaaacaaattattcttcggatcatagcatagtgtgtaggtaattttctactaagaattttggaaagaggttggcaaatgaactcaagttatgagactcgatggaaatttggtacctcttttcatttccttttcttttttgagataggatctcgctctgttgctcaggcttgagtgcagtggcacaatcacggctcacttgcagcctcaccctccaggctcgatcctcctacttcagcctcccacatacttgggactacaggcatgcaccaccatgcctggctaatgttttaatttttttaaagagatgggatctcaccatgttgcccagactgatcttgaactcctgggctcaagtcatcctcccaccttggcctcccaaagtgttggtattacaggcgtgaagcactgcactcagcagcctctttttcattttggcaaaagccctgcaacctacagctgtctagtcagttacatagcctcctatatcatcaggcagttacctccatggatgtctgaataggagtgtgctgcaaatgggtcagcatcacaacaaacagcagagactcaaaatatatgttagcaattaccacagctaaaccacagaggatgagaaagataggggcctatggtcttatcaaaatggtcttctttcaktagttcacatcactgtttcctggattattaatggctttggctgakccaggtgggatgtggtgttcagatggccagatgagctaagaagtatccctcggactttggatcctaggctgcagagtggaagaagtacacaaacccagcccttcttgtttcatgtgagcaatggtgcgtgttttaaaaagacagccaataatattagctttaattatgatagtagttgctgtttgttttrtcctagcacagaacagtaggaatgtaggtacaggaaaaaatggcacaataaacatttgtcttgggctgggcatggtggctcacacttgtaatcccagcatatgctcctatagtcctagctatctgggaggctgaggtgggaggatcatttgagcttgggaggccaaggctgcagtgatccatgactgtgctactgcattccagcctgggtgacagagcaagaccatgtctaaaaaagaaaaatagtctgtcctcccacattctcttattttaaaatggaattttaaaagaattgcaggaaataacatgttgagaaatagagattttatttaatgttgccctgttagtcacagcttcatttttaaataagtattaaaactcaatactgatttgagtatctaccatgtgtcaacctgaggcttctgtggtccttgccctcacagtgctcacagtccagcccaggagatgccccttaaccagtgattacaagtctgatcagagtaatgaaaagaatcctacaaggtgctgagtggatttacctggattagcaggtcagggaaggcctctctggggaggtgtcatctagactcagggttcagagatgagtgagaattaaagagatggaggagccagcaagctgacatgtcaggactcaggaatgtggcaagccccccaatgtgaggctggagtgaaggggccagctggcccccaaccatgttaagaattgtgaattttatcctaagggcaaccaatatgctggaaagtttttaagaatgggagcaacataatcagatttatgtttttaaaagagaactgtggcctcaatgagaagaagccacagaagatgcaacaagtccagttgtggtacttactaatccaggggagaggtgagaggtgacgttttagattagggcagagaataggggtctggactagactggtagcagtaggctggagagaattgtatgaatcagatctattttcctttgtaaaaatttttttccttattatataaataatattttttattatagaagaccttgagaaaatatgagttcaaatataagtctccaattccatctcccagggaatagcattatttatttatgacataatcctattagtctctcttctgtgcatttatatttattttaaaaacaaaacttgaatattgacaattrtaattgtatatacattattttataacctatactttgaataacacccttttaagcttccaatataaattatttggcctatgttgacagttgaaatgccttggcatcaacttgtggatctcccaaggaagaactccttgccagtgtatatacataaacctgaggcctgttttcagtgtgcgcattatggtcccatcatggatgagacttatcaggggggaattctctasctaattctgaatctagttaacttctggcctgcaagaatgtctacatgatatgttggcatccaagccatgggagaagggtccctggcagatgctttattgaaattctagtccacaacccctgctgtagggcaggcaactgttaggggctttttgaggctgttgctggggcttgtgagatgcttaaggagctcgactgcatctctgaatggtcagagtaaaagagtgtcatasaaagaactgccaaatacctttctgtagaatgagctgaaatagaagtgcttcctcaaaacctgctaaaggggagattaagaaatgaaatttgattgggggtgtcatcttgaaacagtgtgatgacccttcttgacaggccaaaaaagaaacaactactcttctaaattgggaattatgtgccagccctgtttcgtttgtctagttcactttgacagtgatttagttaagctttgctaaatccatgggagaggttttagcttcctgggtcagcagtttacacctgtggcttgggaagtttttctagggcagccccagaaaatttagggagtaacatctcttgattttagagaaatttcccatagaatttgtttcttttcttccagagtagatgaggaggaagagtctcatagccttgtgccctacccatttagatttgcactcttcctggtctcaggcatctgacaccaacagccagagcataaagaragaagggattaaatctagtgtcccgaagccctacctcaatcctcctgagacccagcctccagcatgtcaggtgcggggactggggattgctccaggtcacaggcattcctaggtgttgatgcagagatgatattctgtgccctgggtcagcctaggtgagatggagacagcagattccctcctgagagctggagcagcctcttcagtttgttttattctcacttaacaagtctgcaaaggtgttaatgtgtgccaaagtgtattgggttgtaggcctcagaaaagggtgtttaaggagctgtggcactatcaactctcaggtttgcgttagacaagattagcatcttcccttttttgttctgaaggctgtttgcttctctgcattggtaagtggctaccttcatgggaaaggccagggatggagggccagctcttagtgaatgaaaggagagaatttgccttcaaagactgtcatgcaaaagaactaaagataagatattgaagaaggctttttctgttattggtctagtttatagttggaggaccttctggttcttttattgggagcagtgaactttttctaagaatagctcagaggtactgacctgtggctagaagagggcagttctttatgtgtttatcctattgataactcgttcttctcctgcctagagaagagctttatttagtgcccttctggatccagaattcagtttttaccataagtccagtatttccttggttctatgccccaagtacccatagtgatgctgagaaacgtttgctatggtagaatctgtggcatacccaggctgccagcctcatacttctctgtgctcatttctttagtaggtggaacattcatttattcacagtcccttaggacactactgtgttaggtgctaagcctgcagaaatgtatatgttgaagtcactaccctcaaggagtttatagcatgaataaatcttttttgtcagcatttgtaatctagtatcaaagaataatcctaacagcaaattctctgcctccatctgataatgatgcagtccgtttggctaccaaacatgttcctataataaattgaactcatatgcmattggctaaaaggtgaatgatgtcagttcttatatggttttcaccctaggccaggagagccagactagcaggagtaggatgataacctttggcaggaaaggaaagggccatcagctcagcttttgcacccacaggagctctttctgctgttttgtttgtttttcctcttgataattttctttttawtttttttcagtagctttttgggaacaggtggtgtttggttacatggataagttctttggtgatccctgaaattttgatgcacccgtcacccaagcagtatacactgtacccagtgtgtagtcctttatccctcacccccctcccaccttcccctgagtccccaaagtccactatattattcttatgtcttcgtgtccttagctcccacttacaagtgagaacatacgatatttgcttttccaatcctgagttactttgcttagaataatggtctcctacaccatccagactgctgagaatgccattatttcgtttcttactcagccataaaagggaacaaaataacgacattcgcagcaactgggctggagttgtattcagtattttatgtccaagtagtattcagccataaaaaggaatgaaataatgtggtgtatataccacattttttttagccacatgttgattgatgggcatttaggctggtttcatatttttgcagttgcgagttgtggggctataaacatgcatatgcaagtgtctttttcatataatgacttctttttctttgggtagatacccagtaatgggattgctggatcaaatagtagttcaacttttatttcttgaaggaatctccacactgttttccatagtggttgtactagtttactttccaccagtagtgtaaaagtgttccctattcacatccatgccaacatctattttttttttttaatttttaaattatggccattcttgcaggagtaaggtggtatctgattatggttttaatttgcatttccttgataattagtgatgttgaatctgctctgctttaagaaaattaggctgggtgtggtggttcatgcctgtaataccagcattttgggagctgaggctgatggatcacttgaggtcagtagttcaagaccaacctgcccaatatgatgaaaccctgtctctactaaaaacacaaaaattagctgggcctggtggcacacacctctagtccgagctactagggaggstgaggcaggagaatcacttgaacctgggaggaggaggttgcagtgagttgagattgtgctgttgcactccagcctgggcgacatagcaagatcctatctcaaaaaaaaaaaaaaaaaaagagtgcctgtgcccaggctccctccctaaagacctgcacccctggccttgagagctctcagatggcagcaagttgcactttctcctgcctgtttctcactgggaatccagcatttccacgctgttgtttttgtgcattttaaatatatcctgtggcatcctcttgctgctgttgtccaaaggaccaccaggatggctaatgagtagaaaggattattggcaatacatcagtaggcaaaccaggaagagatagcctctggcatggaccaaaggtgttctctttttgcatagggaaggggcaggttgggttttatgcctcactgggcctgtatcatagaatagagtcatacatattcagcaggtttaggggaaaagctatacatagttatgaggggagtcctgcacatgaacaatgagtaaacatgtaacatatatctcatgttcactttggggtgggattttaacattaaagcaaakkggaatttggctctctgtctaaaggtgaactataggccacaaaacasagtctttgtaagctggtcaaaactggcttgaggtctgcagttgcttatcaggaaagaatgtatgtaagtcccattctctgtccaattggagttgtagtggtctgggttgtaaatcagatttaggaagacaatttgtctgacagctcctatttttagggagtttggcaagagtgtggtttttcttgtagctgtaggaatttaggaattcggggctgtgcccgccaagccctgaaccctctaccctctgcccatgggtaacttttgtttccttaaccttagtgttcgtcttagtcgataaagggacatctattttagtctctcagatcacactgccatgagctgctggcttgtttgtgaggtaccaattatgtgtgtacacacactctggttgccaggggcttttaatgctccagagtggtctaatggtctaccccatccagtttccccataatctctggtgctgacatccagggagccacaaaagttgaacattcatgaaccaaagaggtggcagtttgagccttccattccctccttcagccttgctcctataccttttcatctatgaactctcaagaaagagtaacagcagctgtcagcccacagtagtcctgttggcaggctctaaaatgtgtcttctcaaattgcagccctggcctgagctggagagagtacctagtggaattctgcccatttcacagtggttcagatctgcaagaaacatatgccctgtttaccatttcctgatgggtatggggtgagggctcctaaactatggtattagtcagggttctccgagaaacagaatcaagaggacatacagacagaaatttattttaaggtagtggctcacacagttatggaaactgagaagtcccatgatctgccatctgtatgctggagacccaggaaaaccagtggtatagatctgaaggcctgaggggcagggagcctatggcgtaggctccaatccaagtctgaaggcctgaaaaccagaagagccaagggcaggagaaaattcccagctcaactgtcaggcagagacttcagccttcaagtgactctcccaccttggcctttttgttttattcaggccctcagcaggttggatgatgctcacctacattggggagggcaatctgctttattaagtccagcaattcaaatgctagtatcttccagaaacatccttgcacacatacccatacataatgtttaaccagatatctgggcatcccttaccccagttgagttcacacatgaaattaacaatcacaggcataggtatatgttggaaatagagcaggttcagtttcagaccacggcattaagcaaatattgcaatagaagtagtcacaggcatttttggtttcccagtgtatatgaaagttatgtttatattatactgtagtccagtaagtatgcaaaaggattatgtctaaaaggacagtgtatataccataatttaaaaatacttttagtcaggtgcagtgactcacgcctgtaatcccagcactttgggaggtgaggagggtggatcacctgatgacaggaattcgagaccagcctggccaacatggtgaaactctgtctctactaaaaatacaaaaaatagctgggcatgttgctgggtacctgtaatcccagctacttgggaggctgaggcaggagaatcacttgaacccgggaggcataggttgcaataagctgagatggctccactgtcctccagcctaggtaactgagcaagacagggagactccgtctcaaaaaaaaaaaaaaaaaaaaaaaaaagaaaaagaaaagaaaaacaaacttttgctaaaaattctaatgatcatttaagccttcagtgaattgcaatctttttgctggtggaggtttctgctggtggaggatcttacctcagtgttgatgactgctgactaatcagggtggtggctgctaaaggttgggttgctatggcaattttgtttttttgttttgttttgttttttgacagagtcttgctctgtcactcaggcgggagtataatagcgcaatcacagctcactgtaacctcaaactcccaggctccagtgttcctcccacctcagcctccaaagtatctgggactgtaggcacacaccacaatgcctggctaattttttaaatgtttggtagtaacaaggtctcactatgttgcccaagctgatcttaaacttctgggctcaagcaatcctcctgccttggccccccaaagtgctgggattacaggcatgagccccatcgcacccagccacagtttcttaaagtcagacgatagtgagtttgccagattgattgactcttctttcacaaaagatttctctgtagcatgtgatgctgtttgatagcactttactcacagtagaacttctttcaaaattggagtcaatcttctcaaatcctattgctgccttgtcaaatacatttatgtactattctaaattttttgttgtcatttcaacagtgttcacagcatcttcaccaggagtagatttcatctcaagaaaccactttctttgctcatccgtaagaaggaactcctcattcattcaagttttatcatgagattatagcaattcagtcacatcttcaggctccacttctaattctagttctcttgctgtttccaccaaaaagtaagttatatcttccactgaagtcttgaacttctcaaagtaatccatgagggttagaatcaacttcttccaaactcttgttaatgttattttgacctcttcctgtgaatcacgaatgttcctaatggcatctagaatgtgaagcctttccggaaggttttccatttactttccccagatccatcagagcagtcacttactgtggtagctttggccttacaaaatgtattaagacttgaaaatagaaattaaatccttgatccatgggctgaaggatggatgttttgtttagtaggcatgaaaacaacagtaatctttttgtacatctccatcagagctcttgggtgaccaggtgtatcatccgtgagcagtaatatttggaagggaatcttgttatctgagcagtaggtctcaataagcatggacttattcagtaagccatgatgtaaacagatgtgctgtcatctggcctttgttgttccatttatagagtacaggcagagtagaattagcataatttgaargggccctgggattggcacatcagcattcacttcatttaaagtcaccagctgcattagcccctaacaagagagtcaccctgtcctttgaagctttgaagccaggtgttgacttccctctagctatgaaagtcttagatggaatcttcttccagtagaaggctgattcatgtacattgaaaaatctgttgtttagtgtagccactgtcaccaattatcttagctagattttctcttcttagataacttactgtaacttctacatcagcacttgctgcttcacctcacacttttagttatgaaagatgattcctttccttaaacctcatgaaccaacctctgctagctttagacttttcttctgcagcttcctcacctctcagcctttgtaaaactgaagagagttagggctgtgctctggattaggtttggttcaagggaatgttgtgtctggttgatcttctatccagaccaaactttctccatatcagcaataaggctgtttcactttattatgcctgtgttcactggagcagcacttttcgtttcctttaagaacttttcctttgcattcacaacttcgctaactggtgttagtggcctagcttttggcctttcttagctttgacatgccttcattaagtataatcatttctagcttttgatttaaagtgagagacatgaaacttgtcctttcacttagaggccattgtatggttatcacttggcctagttttgattttgttgtgtctcagcaaatagggaggcccaaggagagggagagagaaggggaaccaggggttggtggaggagtcagagtacacataacatttaccaattaagtttgccattttatgtggtgtggttcagggtaccccaaaacaattacagtagtaacataaaagatcactgatcacagagcgccataacaaatataataacaaaacagtttgagggctgggcatggtggttcacgtctgtaatcctagcacttggggaggccgaggtgggtggatcacttgagcccaggaggtcgagaccagcctgggcaatgtggtgaaaccctgcctatacaaaaagatacaaaaattagttgggcacggttgtgtacatttgttgtcccagcaacttgagaggcttacttgggaggattgcttgagcccaggaggttgaggctgcagtgagctgtgactgtgccactacactccagcctgggcaacagagtgagaccctgtctcagaagaaaaaagtttgaaatattgcaagaattagcaaaatgtatgacatatggacatgaagtgagcacatgtcgttggaaaaaatggtgctgatacgacttgctcaaggtaaggttgccacaaaccttcaatttgtttaaaaaaaaaaaaaagtgaagcacaacagagtgaagcgccgtaaaatgagacatgcccaaatcttattgattagggaagggggagtagttcactgttttttgtttggcctcattctgtggtgaccttaagtgagtaaaaacactgtttcagtggcaactgggagttgagtagcacagtttgctttcagggagagggagacagaccatcaatggtgttcattttgtgcagtgcccagacagcaccaggctggccactcacagtgctttatcttggggccagtcagggccagcaggaagggctctggttggaggaataaagaatgtggtaaaagccaggagggcttgctttgaaaatgttccgggagaaatggagaactggattctgaaagttgtacttgctgggtggagaggttccagtaacagctacattggtatctcccggctctgccattgtctcagtcctctagtcttcatgctgctcaatggccgaccacttgaaagtcatggatactacctcaaggaacagatctatttattaaattcaacattggaatgtcaggagttacaaagtctgttgggtttgttttcatgacacatacgcataaagtgtaatcatgagataccgaggcaggcattattatccccagtgtgccttaggagttgtaagtaaaggatacatgataaatcattgtggctgcacacctcagagagctgtgtgtctatgggaaggagaggtggctcggggcctgtgagcatgcatccgcctgccagtgcgyggaaggtgcgctcctgtctgggaatcgagccaaagtgcggatctgttctttctcttagctcctgttttcacagttatgtcgctgttaggatgaggaaaggaggtagcggaaacaatagaatggaagatatgggcaaataaatatgctcaaatggagagaaccaatgaatccctgttactagcaagtactttccttgaaggaagtttatagaatgttttatctcccatttctaagagaaaaggcattaatatccaaccatgtggatcgaagcatcttgatattttatggattcttccatttctgcttctctgcattctccccctagtgcaagcctttgacatctgcacatgctgcttgcagcaacatctcacagcaatatctcctggctccgtcattgccccatccctccagtcttcatgccacactgtggcagaccatttaaaaaattggagatccggtctcttggaccttcctccaaaatgccctcctggggttcactattgccctgtatcccttctttgatcttatatcccatgacttacctgccagtatcatcggacctttgggtggcccacactaccaccttgtctctcctcactccctgtattaggattctcctacaaaaaaggccaataggttgtgtgtatatagagaaaaagatttagtagaaagaattggctcatgccatatggagactggtgaatccaaaatctgtagggtgggttggcatgctggaaacccagaagagtcaatggtgcggtttgagttctaaggccagcaggctggagacctaagagagctgatgctgcggttcaagacagtctgttgtagaaccaacgaggaagagccaatgttgcggatgaagtctgaagtcagtctgctggtaaattatctcttgcttgggagaggctggtctttttgttctgtttaggcccttaactgaatggatgaggcccacacacatatggaaccaatctgctttattcggtctatcaatttaaatattaatgtcatccaaaaacactctcacagaaatacccagaatcatgtttaaccaaatatcagggcaccctgtggcccaaccaaattgacattattaaccatcacctccctcttttgctttctgtcgtctgtttatactggacctctcctaacttttctaatatgttacattaattctgaactctgggctttgtacgtgctgtttattccatctggagtgctttttcatctggctcattctaattcatctatcagctgaaattcccctttcttaaagggcacttcccaaatttccctggctaggtttattccctctgatatatgtcaccagagcacactacactttccttgataacgcatatcacaattagagttccttgttcattgtctgccttccccactagaatttaagctccatgagggcagggagcttatctgttttgccattacatgcctgacacttccctgctgctcaaagatcattcaatgaatgaaagaacgtattgaaagcttacaagatagtaaattgatttttttttcttttttttttgagatgagatctcactctgtcaccgaagttggagtgcaatggcacgatcttggctcacttcaacctttgcctcccgggctcaagccatcttcccacctcagcctcctgagtagctgggatcacagccatgtgccaccatgtccagctgattttttgtatttttttttttttttgagatggagtctcgctctgttgcccaggctggagccagtggcgtgatcttggctcactgcaacctccgcctcccaggttcaagcgattctcctgcctcagcctcctgagtagctgggcttacaggcacgtgctgccatatttggctaatttttttttaatttttagtagagacggggtttcaccatgttggtcaggctgttcttgaactcctgacctcgtgatccacctccctcggcctcccaaagtggtgggatgacaggcgtgagccactgctcctggccgattttttgtattttttatggagacggtattttgccatgttgcccaggctagtgaagatactaggctcttgacatacgtaaatactaactgtgatcttcactttaatagactgaggcccggagaggttagggacttgtccaaggtcatgtagtcgtatagaagctgggctttaaaataataatgagtgtaaccatggagttgggtattatcctatttgacaacttgcagcaacctaatgagataagtagcccttggatgccccacagtgtcctctgcctcctgatagtcacaccataggagccatttccatctctcaggagtctggtatttgacctggtaccctcttcactctgtagtcttctctggaccatcttcagtacttttttcctctgccccagtaaatgggagcaagagagcaaggttgctggctagcagatacccagttgagaagcagaatgctgctctctgcttactgaaggtactcctgatctttacaggtgctcctttgcctccagccatcacgaatgagagagagagagagagagaaaatgaktgtgtgtgtgtgtgtgtgtgtgtgtgtgtgtgtgtgtgtgaatgaatgcttctccatgaccagtgtactcccctgagagcaaccctctctgcctgtcttccacttacagtgactgagtgggagccaattggggaagctgctttctttgagttggcatctttcagtgacctggcggtacctggtccaataaaaagatgtgattttctgaaatccagtatatacctgtatgttttgaggctgtcttcccaaggtgacttgagaatacgtctacacacacagaatattgggatattgttttctaactgcctattgcattgtgttaaattacaaactaattccccagatgatgggataagttatttttttctctgccaagtcacaatattaataatgcarctaaatttagctctgctgtaaaagagtttaattttcaaagccaattagacaatttgatggctgacttgctgcatttgtctctaactactcagttgataccatgttgccaccctaacagattcttgctgatagtcaaaggagagatgagttgtgggaagtataaagcttttcaattaatttatgatcctattaggtgtaaagcctataattaccctgcggttgttgcctctgccaaaaaagaagaaaagaataaagaaaacccatcttatgaaaaagttattttctgaacataaaagtggcatgggaaaagaaaaaaaagcttgtgcctcccctcctaagtgtgggaaggaattaagatttttggctttctcctggccagtgagttcataaartgatttttttttgtggatagggtgatcatttagaactgtcttcagattctgtttttactttcttgattagacctctcctatctactcatccattcatccatctgttcatgcaacaaatatttataagtgctgctgtgcccagggactttccaggtgcaggggttcagtggtgagcattaacagggttcctgccctcttggagctctcatggggatgagggtgaggggagacaagatgcacagaagtaaattagtcaaccaggtaagttcaagtggtgttgattgttgtgcagaaaatatagaactcagtaatatgatggcctgtggagttcagggagagaggcagctattccatcttaacctgccagaaatgttttggacctagggagctaatgtctgagaaaggctcctcatccccaccctcccacctgaatttgcaaggcagtgctgcacacttggcagatggaaatggaaacctctgcagaaacctggcaaaccattagcaggactctctttggactctcagctcagcttaagtagagcacatagcttctttggggggaaaaaaaggcattcaaagtcttaaacaagagtaaagttctcatttgccactttaatcaagttcattaaaaatggaatgtatatttaaaacttccttttgattaacttaatgtaagtgcatcctgacttaggagagggggagaagtgtgcccctagatgatatcaaactttgaccttcattaaatgtttgcaagtggtaaacctcaaaggcctgcagtataaaatgggataaaatttccaagaattagccatcctggggggaaaaatatatatttggtttgaaactctactaccatagtctgcatgtttcctcagccattgcattttgacagctgaaacaacagactaaaactgtagtttaaaatacaagcacacacactcacagatcaatgcaaaaatactgtgctttggattcgccaataaatatggaacgtgatgcacatatggttgtttggctgaattcttgccctgtacctggccatacacaagacaacttctccattgagtgggcagctctacagagaactcctggcagtagtgaccaggacttcagggctttgctccattgaccttatgcaggacaaacttaagtcaaaatgtgtttctcctgaaagaatacaacagcacttgacctgtccttgacctaatgtggaaagttgattccttcttgaagctagggaggcagtgtcacatgacagttccaagcagttgctgtagaattagaccacctcagctcacatccagaccccaacacttaccagttgtgcaatcccaagtacatggtctcttgttcactttcctcatctgaaatgtgggtataatagggccaatcccttgggttgtcagaggattaaatgaagagagtatcacaggccaggtgtggtggctcatgtctgtaatcacagcactttgggaggccaaggcaggtggattgcttgaggccaggagtttgagaccagcctcaccaacatggtggaaacaccatctctactaaaataccaaaattagccgggaatggtggcacatgcctgtaatcccagttacttgggaggctgaggcatgataatcccttgaacctggaaaacggaggttgcactaagccgagatcgcaccaatgcactccagcctgagcgaagtagcgagactgtttcagaaagagagagagaaaaaaaaccttaccacaatgtgtggcccacagcaaaaagctcaataaacattagcactcttgctgggtccacacatgtcttttctgggtttcatctggtttccaggcgggctgcctctgcgcctttgttttcccagctgccctttctcagtaaagcggcatgaaagctacatcctcaccacctgaggcactattgagaagaaagtgtgtgctgccatgaactcaactctgcattgctttcaggctcagagtggtggaacatgctctcagtgaaatgcagcgtgactgtcctctgtggccctgtgtatgtcgaagacatgtttgggagtttgttaaggaatgtagctgattcagtaggcattgtctccaaaggcttccctgtcagggtaacttgaatgtgtgtgtgtgtctgcgcgtgcgctgtcataagcacattgagatgttggaagagcaaactgaatgctcttcatattatctagggagaactttgcaaagcaagccagcaggctggtgggtcctttctgttctgctctaggacatattgcaagcctgggcaagacagttgccttcttttaccttcatgtactcatctggaagtgattatgaggggtacaaagagacatctgttcattacaacattatttgtaacagaaataagcaataggaaaaaacctttggttttttgtaaacctcccgaggggtcctgggattgcaggtgtaagccaccatgcccagtcatagcagtttttttttaaagcaattgcaagtagtagttaygatacttgtacgaaaatatacatgcacagatgagagagtttgtgatttgtgctactgtgtgtgtgtacagaaatagtgtagaaaggatgacaccgaactgggaacatggtttcctataaggagagaatcaagataagatgaggcctaggggaattttgctttatctattgtatttgaatttgattttacaatacaatttatggtatattacttttgcaattataattaaaataataattaaaatgagcatgaggctgacctagcaaggaaagccccattgcagagtgtacagtgacatacttgtgaaggtattactttacattatttctgcaggaaccccacccacacaccccacaaggtttttagagcattgatactggtatgtttcagatactaattgccagtgattcttcttcaacccaaatccatgttcaattcagatgctaaatgagtccagtaatgccacaacaaaatggacaagtgcttgtggttagatgttggtttgcaaaggaacttaatatgctctgagcggctgcctagaccacaaaaatctgaattattatataattataatatgttttatattttataataaaaattttaaacayatatagaagtagcaagatggctcatgcctgtaatcccagcacttggggatgccgaggtaggaggattgcttgaccagcctgggtaacaaagcaagactgtctctacaaaaagaagaaaaattagttgggcataatggcatgctcctgcagtcccagctactcatgaggctgaggcaggaggatggcttgagcccagaaggtagaggttacaaacgtgagctgtggttgtgctgacagagtgagacaatgtctcaaaaaaaaaaaaaaarraaagaaaagaaaaaaggcaagaatagtattatataatggactttacatgccaatccctcccaagttactttgtggcaaatcccagacagcatgtcatttcatcctcaactacagcattttagtttgtatctctaaatgcactcttctaaaaaaacataaccacaatatctttaccacacattcaaaaagtatcctaaaatatttagtacttacttacatttttttaattgtcacataacattttaagtttttttaattgggatccaaaggtcatagtcattgggtgataaatctcttaaatcttaatctctacgtttcttctccatctcatttttccccttgcaattttctgtttttgttgaagcaatcaggtcttttgtcttttacagcagagcttctcaaagtgtgatctaatgctggtttgtgaaaagtatagaaattgacagtaaatgtttagaaacttacagcaatttgacattgctgcaacatccaagcacatgagcatcatcatcggcaaacatggtttgggtttaaattgtatgtatggggatattctaaggtgctgctacaatacaggaaagcattctagagtacagagcggaagaagcatgcaccataatgtaagtcaacatactgtttccttcaagaatatcttactatgaaaaaatttcagcagaattaaacaggcttagtaatgcagtgaaatttatttatttagataaaagctaatctgttaaggtyaagactctatcatgtgttaagtggaaggtgatcataaacaatagttactacatgttgaagtatggtgggaagtatggttatctagggggaaattccatcaaatgtaggaaatcctagagttcctcaggataagaaaccagtttggttccaactttttctttaaaaaaaaaatgtgaatttgatctctttgatattttaatgatcttaatactttcatgcaaagaagaagagcaacatgtttttcaatgacaagatcaaaaggccaaaaaaaaacttgaaagaacagagtttcaacagattcttatgacatattccataatttgataactagcgaacaatgtctacatgtgattatacctaggtacaaccttttgaattttatcaatgtttgattttaattgttcattaaaagaagatccacatatgggaaatacatggatttaggaatctatttctttcattgaaagataatttaaatttaatgttacaggatgaattactagaattggctattataaatttaaggtgaattatgaaaatggaatgtcagttgtctcattttgaataaaaattaaaaagtaaatatcttggaattattatatcttggagttaattatggatttaaaaattactttaaaatctgttgtttcatttacataagcatacctctgtgagactgtttttttctacggtgattgttattaaacattgaaacagttaatataaatatccccaagtagtgttgtccttaacccagtttaggattaataggctagaagaaaacattwaaaatttttaatatgaaaaataatgatatacatggtgtttatgcagtatgtatataagcatttattatgaagaattgctacctcctttataactttaaattttcttttcatttttgtgggtatatagtctgtatatatatttatgaggtacatgagatgttttgatataggcatgcaatgtgaaatacacacatcatgaagaatgaggtgtccatcccctcaaacatttatccatcgagttgcattctttgttattttaaatgtagttattgactatagtcactctgctgtgctatcaaatagtaggtcttattctttttttttttttacacccattagccatcctcacctccctccacccrgcccccartaactccccaacctctggtaaccatccttctactctctatgtccataagttcaattgatttgatttttggattctacaaaaaaaaaaaaccagatgtttttgcgatgtttgtctttctatgcctggcttattttacttaacatgatgatctccagttccattcatgttgttgctaatgactggatctcattattttttatggctgaataaccacatttttgttatccattcatctgttgatggacacttaggttgcttccaaatcttagctattataaacagtgctgcaacaagcataggagttcagatttttttttgatacactggtttcctttcttttgggaatgtacccagcagtgggattgctggatcatatcgtagctcaatttttagttttttgagggcccttcaaactgttctccatagtggttgtactaacttacattcccaccaatagtgtacaagggttcacttctctccacatcctcgccaacatttgttattgcttgtcttttggatattaagccattttaactggggtgagatgatatctcgtagttttggtttgcatttctctgatcagtgatgttgagcatcttttcatatatctgtcatttgtatgtcttcttttgagaaatatctactcaaatattttgcccatcttttgtttggattgttagattattttcctatagagttgtttgagctccttatatattcttgttattaatcccttgtcaggtggatagtttgcaaatattttcttacattctgcaggttgtctctttactttgttgattgtttcctttgctgtgcagaagctttttaacttgatatgacccatttgtccatttctttgtgttagttgcttgtgcttgcggggtattgctcaagaaatttttgcccagaccaatgtcccagagattttccccagtgtttccttgtagttgtttcatggttgcggtattagatttaagtctttaatccattttgatatgatttttgaatatggcaagagatggggtctagtttcattcttctgcatatggatatccagttttcccagcaacatttattgaaaagacgatctttcccccagtatatgtttttggcacctttgtcaaaaatgagttcactgtaggtgtatggatttgtttctgggttccctattctgtttcattggcctgtgtgtctgtttgtatgtcagtaccttgctgttttggttactatagctgtgtagtataatttgaagtcaggtaatgtgattcctccagttttcttctttttgcttaaggtagcattggctactctgggtcttttgtggttccgtataaattttaggatttttttttctatttctgtgaagaacgtcattggtattttgataaggattacactgagtctatagattgctttgggtagtatggacattttaacaacattgatttcttccaatctgtgaacacggaatatttttccattttttggtgtcctcttcaatttcttttatcagtgttttatagttttcattatagagatctttcacttctttggttaagtttatttctaggtatttaattttacgtgtgsyttttttttttttttttttttttgagatggagtctcgcactgtcacccaggctggagtgcagtggcgctatctccgctcactgcagcctccacattccgagttcaagcgattctcctgcctcagcctcctgagtagctgggattacaggcacccaccaccaagcctggctaattttttgtatttttagtagagacgggatttcactgtgttggccaggctggtcctgaactcctgaccttgtgatccgcctgcctcggccccccagtatgtgtggctattataaatagaattactttttagatttcttttttacattgttcactgttggcatatagaaatactgttgatttttgtatcctgcaacattactgtacttgtttgtcagttcctatatatagttttcatagagatatatatatatagttttatatatatcttatatgtagttttcttatggagtctcataactttacctagttatgactgcagaataacagaaagttgtgagtataataggaattttctaataattgtctgtatttgcaccttcgataaataatgtgtatagctttcctaattttttttcttgttcttttttttctaattagaatgtacttttatgtcttttgaatctatgaataaaaaattggggcttatattttataagtatttttctcttttctaatgtatttttattgtatttatcaatacaatttttaaaatagtgacaggttagaactaaaaaaccaagttagaaacaaacatgcctgtggtgtcatttaacgtgctcttctgtttctgtatttcgtgtaccttggtagttagatttcctgaaagcttcgtcagagtygggcgctttttctgggtgagagggacaggactacttcacaactgacgttacgtacttttagcaggaggacacactgtctagttgctgcttgtctctttctgtgatgttacctgttgatgattattgtcaagagccattagtgtattagacaatgcacagtggtgatattctaatcctgttattcctctttcatttatctctatgcttatttacatctatgggatacttttagaaagggaaacttcatcttgtcaactctttgaccacccccccgcttcccgagacacaggaggcatagatagtatacaaaaccaagtcctttgacattactaaaagtcctcgtacctgattccacttttctagaggtctcttgtcatatagaaacagctctcaccaactggttaatgagtatctactctttgcaaaacacggtgaagacaagtcggggttaaagtagagtaggacgttgtcttttaacctcaagacttttgtctcactgtttggatcagctctgacacctgaaattatttaagatcaccagtataagtaattcagtgctaaatcacttcactccacaatctactcatatgagggcaaaaatttactgaaaggtattcttaattacagccttctaatttcaatttcagaaactggtagcatttttgttcttcctgtttatctaacaaacttctgtttctggtcattaaacagaatgtaactttgtgggaagggtggggattttatttatccaaatgaataacctttattcagttaaaaattgccaaatgtctgtttgttcttggggttttttacggtacttaacattcagcctgcctgatagcagataggatttaggttgccaaatgtggaaatgcaaggaatgtcagacgtggcgaaagcaaatctgcagagattccttgatgccatcttgtaaaggaaaatatactactttttatgagtgatggctgccagctattattccagggacaacataccatattttgctttatagacttaagaaaaggaagacctatagatattatttttctgtggagggtgttctgactcttcctcatccagggaaccattttgagggtctgctagtttctaagtatatttacctcatttatatacttggggacaaggtgcttctgtggacctactagactcactgtgaaaccgacatggccacagctccacttgtcccctggactccataagcccccactctaacgagagaaccaccattttagatcctgtggtgtcagggtcagctcagacccgtatctaacagtctgaaagatctggcattcccctttccccagcacccgcctgtggcctgtgatcctagtaggtggtagaaggttcttttgtagagggatcagtgaaatctttatcrtatgaactgtgcgtgtgggtattgcaggctccttcctcaacaagacctgtcctctcctcagacagtagactctgagactgaattgcagcatctgatgtcagcctctgcttttcagctccctctcttttatacaagtcaggtaacacacgtgtcagtttctgtctrtctcgcccatgccaatcagccacagatcctttgtggtcaaagaactccggttgccactctggccttgctgtccgttatgacatttacatccatccttgcctctggttrattgttaccacctggcctctgctattttggaatcctaccatcccccattaattaaaaagctcaataccgtggcagtgtctcttactgtcaactccagccaacagaggacaaaaccactgagcttctcaatgacactgtgcccctcacagatgcacttatccctttagtgaaggaagcgacctctcggccctcctgggatcatggtctgatggttggctcttctgatctttcataagasatccacactacatgcccactcttgagccttttgacctcctcaatattctgccaaggcagtaccagcatctccatttaacttacacgaggccattgttgtgctcaggccgcaaggagccatcccaatgtccgcagaccagctttaggtgtctgccggaatactaaactacaagtcacagcagagtgctcccatgcagataaagcctcaccaatctagcctgacattcacctcatcaccctcccctttccgcctgttccccaggctcccatcagtgcagtgagtcctgtccgggcrcagtggctcacgcctgtaatcccagcactttggaggccaaggcgggcagatcacaaggtcaggagatcgagaccatcctggctagcacggtgaaaccccatcgctactaataatacaaaaaattagctgggcgtagtggcaggcgcctgtagttccagctactcaggaggctgatgcaggagaattgcttgaacccaggaggcggaggttgcagtgagccaagattgtgccactgcactccagcctgggtgacagagtgagattctatgtccaaaaaaaccccaaaaaacaaaaaacaaacaaaaaaaccagtgggtcctgaaagtccttcagcatgaagctattctctgcatgatccttatcaactggagtgaaaaggatttgaggacgggaagcatcatcttaagaagtagctgcctcagatgaggtctttacaggatttctaggcaagaagaggttgctctcctctagtaagaaagggmtgtttcgggccaggcacggtggctcacgcctgtaatcccagcacttcgggaggcggaggcgggcagatcacgagatcaggagatccagaccatcctggctaacacggtgaaaccccgtctctactaaaaatataaaaaattagcagggcgtggtggcgggcgcctgtagttccagctacttgggaggctgaggcaggagaatggcgtgaacctgggaggcggagcttgcagtgagccgagatcacgccactgcattccagcctgggygacagagccagactccatctcaaaaaaaaaaaaaagaaaagaaaagaaaaagggctgtttctactggcccagaaagttcgggggaatttgggagttcaagattctgggacttgtccaccaaatgtccttatcgcaagtatcagggtggttccatctgggtaaactctccacatctctgggttgtgacagtggtttcctgtagcggtagtcccactctttggtgtcagagaaactctatcccaggtgaggtgctatgtagctctactggtcatagcagcagtagctgagatagtgcagctgagaggattatgaagtagcgcacaggaggtgtttgtacaagccttctctatgagactttatttctgaggtcagataagtacttcatttaaacccagaattcctgtgtgacgggtacagtcacaggaatctcaggaggccaagtgttgcccctgaagtttttcaaaccccaaaagatgaactaaatcttgaagaaaacaacattgaacttgaatcaaacgtggttgttgttataacaatgataayagcaataataatcatggctaccatttactgaccattattaaaagatggcatctggattaaatgttctgtgtatattattttaatttattgagacagagtctcacactgttgcccagactggagtgcagtggtgcaatcttggctcactgcaagctcttcctctcgggttcacatcattstcctgcctcagcctcctgagcagctgggaccacaggtgcccaccaccacgcctggtaatttttttgtattttttttagtagagacggggtttcaccgtgttatccaggatggtcttgatctcctgacctcatgatctgcccgcctcagcctcccaaagtgctgggattacggcgtgagccactgcgcccggccttactttaatttttataaccatctatcagagagatagtatgctcagtttacaaaagaaacagctgacactttgagaagttaagcagcttcttcacagtaaaaacaccaggaggggagtggggcttgaatttgaacctaaatttatmtgactctaaaatgttaaccatctggtttataacagctattttgcttctccagccaagccataaaaacttaagaaatatatataccagtcagaatctttcatatatatgtaatttttgaaaaagggacagtgtaacaagctaatgatgttccaaaagttgtgtggtgggcggggggacagaagggctgaaagcagtgtgatgattgattgatcgattgatcgattgattttgagatggagtctcactctgtcacccaggctggaatgcagtggcgtgatctcggctcactgcagtctccacctccaaggttcaagcgattcttgtgcctcagcctctcgagtagctggggccatagccgtgcgccaccatgcctggttaattttgtatttttagtagagacagggtttcatcatgtcggccaggctggtctcaaactcctgacctcaagtgatctgcccaccttgacctcccaaagtgctgggattataggtatgagccttgcctattatatatttttaactgcagtaaaccacatttaagagaaaaagaaaagaaggaaaaaatggggagatgtccctgtttcataggaccttctcactgtgattggcgttttccaagatgagcgcctgcagtcagcccctctctagtccttggcacttacaggatacctgttgagctgctgtgaaatatcacttttaagaaacctcattttttattttgatttttttgagacaaggtctcactctgttgtccaggctggaatgcagtgacgtgatcacggctcattgcagccacacctcctgggttcaaatgatcctcccacctcggcctcccaaagtgctgggattacaggtgcataccattgtgcctggccttaagaaacttctttatggggcactgttgtgggccattgctaagaacggtaactagttacaacttgttatttgggggggggttacataygtgttctagcaatgagttgaggcagatgtagggggcagtggttaatctggcaagggttggtcttagaggtgggaaaccactgttggcagccctttctgctgctacctccaataagagccagcccagctgagtggtttcactggtgtgtgggatgtgcctttgtcatggcctgcagacctgatgttgatgctcttgcccatgactgaggacaaaggggcggggtggaaagccatcaggtgtggtgtcttgttcccaggcctccgggggtgtcacctgcctctggggggcagcctgccctgctcagctaactcatgtaggggctccctgacagcagctgcttggcagcgcaccagcggggctcgggaaacaactcttgccrtcccctcagtattagttgctgtttctctgcttgtggatattccttgatggcaggattttcctctttttgactgaacagcaaaccagtttaactccttacataatattttatagaaaattgtatcctttattggatctgatagaaatcattgagtatatcccaggaatgtcaaaaggtaagttggctgagagccagctgctaccatttctgtcacttcaattgttaatgggcatttcctatgttcatcactgtggcaaacactttattaccttctttggttctcacagtaaccatatcaatatttttttatcaccctcgttttacaaagaaggaaaatgaggcttacagggcttcaatgacttgcctgtggcatatagcatgcagtcagttggaatgaaatccgtgtctgatttcaatgccccaacacctaaatagaattttaaaaattgagatatattttacataccataaatttacccttttaaaagtgtacaattcagtggttttcatgtatattcacaaagatgtcagtcatcgccactaaatccagaacatttacatcaccctaaaaagacatcccatacccattaatagtcattccctattctttctcctggcaaccactaatctactttccatctctatggatttgcctattttggacatttcatataaatagaagcatgcactatgtggtgttttgtatctggcttcttttacatagtttaatttttcaagatgcatctatgttatagcatgtatcagtagttcattcctttttatggctgaataatattcatggtgtggctatactacattttgtttatcagttcaccattgatggacatttgagttgtttctactttttggctgtttgaataatgctgaagagaacatttgtatacaagttttgtgtggtcatatgtgttctgttcacttagacacagagctaggagtggaattactgagtcatatggtaactttatgaattaactggacttttacttgaactcctgagtcttctcaaggtatgaaaataaagtagataaggcaatttttaaggcagtgctgtagaagcccagcatattatagagaggagagttcccactgctgtgaaaaaagaggcttctcctttggagctttgttattattttgataaaattatacagtggcgaccagtgttagcaaatgagggttacgcagcgtcttagtgtgtaggctggaaaacacatgacttgcatagtaatagttaggtttccatttctgttatctctgctatggtttgaatgtttgtcccttccaaaactcgtgttgaaatttaattgaggctggctgggcacggtggctcacacctgtaatcccagcacttcaagaggcagaggcaggtgaactgcttgatcctaggagtttgagaccaacctgggcaacatggtgaaaccctgtctcaacaaaaaatacaaaaattaactgggcatggtggtggtgttcacctgtagtcccagctatttgggaagctgaggtaggagtattgcttgagcctgggaggttgaggctgcagtgagccatgagcrcgccactgcatgcctgcctgggtaacagagtgagactctgtctccaaaaaaagaaaaaaggaaaaagtttaattgccattgtaataatattaagaggtgagatgtgggaccagtaagaggtgattaggccatgagagctctgcacttgtaaattgattaatgctgttattgcakgagtgagttcattataaaagagcaagtttgcctccccacccccaahcccccaccacyccacaccctcccttgcccttctgtccrtagctatgtgatgatacaacaagaaggcccttgcaagatgatagcttctcaatctttgatgtcccagcctccagaactgtgagaaatagatctctgttcattatgagttacccagtctcaggtattctgttatagcagcacaaaatggactgagacaacctcccatgcattcaggtattttttaagcctgctttgataagaaatcaaaacaaaaacaacttggagtttattcttacatgactttcttttttttatgtgactttttgaagtcatagactgctttttagagtggtgaggaacagacagaagcccagtgccctgcactcctgcctytgggacacccaatgccttatatgcttcaaacagactgatgggtacatttgaatgtgagaaatatgcatagaaacatcagctacatcaaggtgggaggattattgaggccaggagttcaagaccagcctgagtaacatagtgagacctgtgtctctttaaaaaaaaraaaraaaaaaaarraaaaaaaaattagccagacttggtggcaggccactgtagacctagctactcaggaggctgaggcaggaggatcacctgggcccaggagtttgaggctgtaataagttctgattgtgtcactgcactccagcctgagcaatgagattcagtctttaaaaagaaagaaagaaagaaagaaaccagctacagttaaacatatgtatgcatacctatgacctagtaattctgctgttaggtatatatggtatatatatatgtgtctgtatattcaccaagagacatgcatataagaatattgatagcagcaccactatttttttttaatacacagaatgtaagattacctaaaatctcttcaacagaagaatggataaatgagctataatatagtcacataatagaactctatacagcagtgagaatgaaagaatcataacaatattggataaatttcacaaataaaatcttgagtgaaagaagccagatgggaaagaatatatcctgtgtagttccgtccatataaagttcaaatatgggcaaaactgacctgcaatattaaaaccaggacagtgactactcttgagggtagtgattggaaggggtgtgaggggctgctggatactggttagtcttttcttgactgaagtgctggttacacaggtacatcctgttagaaagttctacatgctgtaagtgtacacttttctatatattagaattttttaaagaatgagtaggccaggtgcggtgtctcacacctgtaatcccagcactttgggaggccgaggaggggtgatcacttaaggtcaggagttcgagaccagcccagccaacatggtgaaaccctgtctctactaaaaattcaaaaattagcagggcatggtggcgggcgcctgtagtcccagctacttgggaggctgaggcaggagaatcgcttgaactcaggaggcagaggctgcagtgagcagagactgcaccactgcrctccagcctgggcgacagagacaaaaaataaaaaacagcaaaaataaaaagaatgaaagtatatgtatacacacatacatataaataattggtttcatgttttccctatctctagttctaaaataaatcttaaacatgatacagactatggaaatgtaataaattcaatcagagagaatccctttgttaattcagcaaatatctgaagagcagagcctgggctgggaggcagtcttcttgttaggaakggggtgggatttgagaatgcctcaggaatgggagggactgagcttgagcccccacctatcgtcagtagctgcatcttttcctcacgctgrtatgctcactgtcttttcatgtcattcttcttcctttgcgtctcctctcctacccccagctcttcctgcctttttttctgtcaccctcttcccaccatgctgtttgttttgacattgaactagatataaattatccaagaggcgatctggctgaggctggggaatgtgcaggactgtcctcgyccagggctttgggagatcccccaggaaaagggttgtcaggactggaatgtccacccaggagaaggtctgtggattttccctacaaaggactccccaaagactgggttccaggcccctgagattagggaagaggcaagcccaagagagaaagctccatcatctaccacagcaaatgcagattttctctatgaagagaagaccaagccttttgctatgagatcagtagggaaagggcacagggttaacctgggactattcacagaagagtcttaagctttgtaatttctcaggttattttggatcctgcctcctgaagactgctgaatctcagctaatttttgttgtagaaataatttgcctatgataataatgagactatcctgagagagatgtttattttaagactgtttaaaactctcaggaataaatatccctggggctgattctgggcattaaaaayacaattcaaggtgagtttcatttctcttcctgcggccttcacattaggaacctctttttacaaagatgtggcagaattttgattttaaataattcataatgatactgttgacaattttgtatgtttgtcatgtgacataattattggttaaggaatgtagtggaccaaacttgctcatggctaatctgtggctgaaacttaaaatatggacaatatccaatttggaagaaagccttagctcggaaataatcagatataaccaggattagggagatgcygactgaagataagctgacttcagacagggtattcttgcgaagcatgtcctccacctaactggagcattaccttccttaggggtcagagtccaccaggttagagtgcttcttcctgccatggactgcacatgcacatggctaatcatcatgtatgatgacatgagtataggagaggaccctcagggcctccctgatggccagctgtacctgaagtcctcctagtcccccttatctgcagagacacttgatcccagcaaagctcagtgctgaagccaaatactgtgtcatgctgcgtgctgagtaagkccaagagaccaaatgaggatttgggcagcgcttgggaactataaagaagaggtgaaggtttaagagacagaggaaggagtagatgttgggaagggcttggaaatctaattggagaatttagcctcttgttgacttyacataggcatacatacaccctaatatttagtgagtgctttttctgtgccaagtgccgtgcttatcatctactcccttgggagtagctccctagcgtattctcctagctaccctatgaagtcagcagctatcattattatccccatttttatagatgagaatattaaggcccaaggaagttagtcatataacctgcctagggccatgaagcrcattctatgggtggactgcttaaatagattctctccttcccttgcttctccccactcctgcctcagccaaccttggaagagaattgagaaggggacctagcggagtcttttgtggatagtggtgtggacagtccatgtagtaccggtgtttccagaccatgatgtcacctctcacaggtggtagacattatcagcggaaaatcacacctaacctggacatgcatgttgatagctgcagagagctgtgagagaaggtcatgtgggttagggagagtgagggatgagagggaagagcagtgtgtgtcatagtatctggaataatctagcatcagatggatatcatttcaagaaatgcctcagtggcagaatgattgaataaaatgggactcctggaatgaaaaccaggcccagaagagtcagaaacaccatttctggaggagggtcacacagccgactgatagcagaagcaagtatgtgtcactgggagagattgagcgtgtgcctgaggatggcgggctcactgacttgcaggtgtcctccagccctgggagaaggcctctgtcctctgtgggatagcgtagaagaaatactgttggaaaccaaattagagtagcaaatcacagttggtgtttacttctgagtagatattcatgtttatgggaagcaaaggcttccctttgccatattcaggactatgtttgcaggattatagtcagacatttaattccccgctagcagagcagcttcctggttttttcaagcttatggtgcagaattggaaagtgacaggctgtcacgctcatttcagttcagtggtgtttcctgtgggagattactgaggactcagtctgactcagctggcagctggagagaccccagccagcgtgcctctcgtctcgccctcaccagcaggacccacttctcctgctgacatcatgcccatatcaagtgcttccccaccttactttctccctcacaaaggaatgagtgatggataattaatatgtagaagtacatataaagtgtatgaaattgtatgaaggatatgtagccagtaggactactcttgcccctggaacctgaccatccttcaaacagcagcaagggacccttaggttacaaagtatttacaggtgttgaagtgacatattggagctctggttcttggccctaaagatgggggggtgtgagtgacttcaaaaagggagcacagcctgtgattttcagtggctgagacaagtaattggtgaagagttattgagcatccattacgtagaaggcattcctatttcctttgactgccgtaacaaaccactgcaaacgacatggctggaaacaacagacatttatgctgtcacagttctggagggcagagtctgaaatcaagccactggtgaggtcgcattgcctctggaggagactgttcccttgtatcctccattctctggtagctccagggttccttggcttgtggccatatcactccattctctgcctctgtggtcacatggcctctttttcttctgtctcaaaactctgcctctcttataaaggacacatgtgactacccacccagataatccaggacatcaacggattaacttaatcacgtctttttttttttgtcatataaattaatatagattctggggactaagacatggacatatcttttggggacccaccattcagttcactatagaattctattagtttatctggaaacatgaaaaagtaagagaaggtatcagctctctaagagtctgtaatgcagttaggtgaatatagatgtgtttatttatccaataagcctgtattgtttccatgccacgtattgttcgtgtgacaggctgtgtggttgcattgaacttacatagtggaatgagacacagcccctgtgctggagaagctcagagtctgagaggaaagacattgtacacaagactaacctgagagaatttcagtctctcatggtccagtgtttgtaagaagatattcaaagaagcacaatccgaagaccaaaattaacttgtaaatgcattttaataacttcttgttctcaaaagtaaaggaaatccaaaatataaccccatagtacaatgttcatatcctggttttctttcctaattctctcacattcccccattctgcatggcacattcatttctccctctccgcctctctctatcctctcctccctccccsctttctctccatcctctcctcccccccttctcttctcatcctctcctccctcccccctctctcccccctcccccgcctcagcgtttttttatatagatgggcttagcctcccttgacaagtcagctttattctatctcaactctcccgcttgtcctctaagtctacatcctaaagcccaggaatttctctggttaggacagtctccttagaaggagaggcacatggagaagcctttttacttagaatataagaagagaggccaacagtactgacatcacacaattgcagtccagtttgataagtattacagtgagattttaaaaatacattattttgtgctggcctcattcaatttttgcagcaacccagtgggtaaaaactgtagttattcctattttatacataagggagtgggcttatagtcattaagaaacttgctcaaaatcagtagcagacctgggatttgagctcagggcagggtgatttcacccttgggaccctggaggttggaagagtattaggagaacctttaagaggaggacgcctttgaatcaggtatctttgaagtctaagaaggagtttggacaagatttaaagagaattctaagcaaaaatgacatggtggggctttcaaggtgctctaagtaccttttggccaagctagggtgcaggatgcagcgggggagaggtatcagaagaaaaggtggttggaaacagactgggatgagactatgcatggatttgtatatctctggactttgttctgggggaaatatgtgtcactgaggttccaaggagaggagaaacacaatcacatttgtgttgtgaaaagagcactgtaacatcagggatcacataaatcaaggcgggggagggagagggcaggacttgaggcagggagagtaacgtggcagaatggcttttacatgcaaattcagcccataattagcagtcccactagccccctgtatggtctgtttacataaaacactctgacaagaggcacagaggaagagcagtccatagataaaggcaccatagacctagcaaacaccrccagcagtctgccccctggcaagtgggcacagtggcagtggctcctactgcattgcagctcagctgtctgttctcaacctttgccatcttgaaacaaactgaaggggaagggctaggttctcattatccctttcttctaacactgacacaacataaagcaggaacttgcctctcattggctcattgccctctaagatccagacagagcacagagaatttaaccaccatgggctcaatggttctgtctttcctgggagtcaagttaaagaaatcccaagaactagctgaccagcttgtgctgacttgtataaagttatcttttattgaggacctgttttgagacaaagcacactcactatctgaatcctgaatattagtctggctttggcttctgtttttccctaagtgaaaacccatctgcagaagcagatttccatatataagctgaaacctgctttacctcttgtcccaatttctaagtttagataatcacagaatttcaagaaacattagcaacattcagttagagaccgttgcaataacccaggtaagaaatgatgacaacttaaggcagtggcagtacagctaaagaagatggaacagatcaaggaacatctaaacagtaaccatagaaccatgcttatgttaactgagcactttctatgtggcgggcattgaataaaatgtgcattatctcattcaatctttgcaacaacctaatgaggtaggaactgttatcccttctattttacatgtgcagaaacagactcagagtcattaagaaatttgcccaaagtaagtggcagagctgggatttgagsccaggcagtctgacttcaaagcttatatttttagtctctaggccttactgtctcaaatcaggatgatttggtggtttagtgaatgtgggatagggggaagggsaagaagagaaatgggggaggaatgttccagattagggaaatagatagctagatgaaagatggagcccctcatcaaggtgaggacacaggaaaaggaacaggtttgggaggaaggatggtgatttggttgtgaatacattgatgggggacatccaaggaagatgtctggtaggtggttgggtgtttaaatatagagcttcagagaacgtgattgagggtaaagaagtagactcagaggaatctgtatctaggcagcagaggagcatgtgagcagaagggagggggagcactgagatctagagaagaaaatgagcagagaagatgcccaaaaacctcaaggacctgcaacatttaaggtgtcagtgaaaaaagcattcagtggaagaaaggaatcgtccaagggatggttaggagaatgaggagagaatggctcacaggaaccaaggaggaggaattttgagggagggatggtagcagggcccagtgcaacagagaaatcatgtaaaggaagagtcaaaaagttactattgcatttggcaattacgtcaatgtaaaaccagccggtgggagtgcaacatggtacagacatgttagaacaggggtccctaacccccagaccgtggaccagtacttgtccgtggcctgttaggaaccttgccacacagcaggaggtgagcagcaggcaagcaggtgaaacttcatctgtatttacagctgctccccatcacttgcattactgcctgagctccccctcctgtcagatcagcggcagcgttagattcttataggagtgtgaaccctactgtgaactgcacatgtaagggatctgggtcatgttctccttatgaaaatctaatgcctgatgatctgtcactgtctcctgtcacccccatatggaactatctagttgcaggaaaacaagctcagggttcccaccaattctacattatggtgagttgtataattatttcatcatatattataatgtaataatagaaataaagtgtaccataaatgtaatgtgcttggatcatcctgaaaccattgttccccactgctgagtttgtggaaaaactgtcttccattaaactggtctttggtgccaaaaagtttgaggactgctgtgttagaagacartatagacatttcttacaaagctaaacgctgtgctgccatattacccagcaattgtactccttgttatttatgcaaatgagatggaacttatgtccacacaaacctgcacatgaatgtttatagcatttttatttgtaattgctgaaacttggaagcaaccaaaatgtccttcagtagatgaatagaaaagcaaattgtggtacaatggaatattatggtatacaatggaatattattcagcaccagaaagaaatgagccatgaaaaggcaaggaggaaccttaaatgcatattactaggggaaataagccggtctgaaaaggctacacactgtatgattccagccacacagaattatagaaaaagcaaaactctggagagagtaaaaagatcagtggttgccgggagctttggggcaagagagggatgaataggcagagcacaggggagttttagggcagtgaaactactctttgtggtactttaatggcagatgcatggtattattcatttgtcaaaacccatggaactgtacaacacagagtgaaccctaatgcaaaccacagactctagttaataatactgtatcaatattgactcatcaattgtaacaaatgtatcacactaatacaagatgttattaaaagggaaatctgtaggggtgggggtgggcaaagggctatatgagaactctgaactttctgcccaatttttctgtaaacttaaaatcgctctaaaagtctatcagtgaagataaaaaggagaggaaaggatggaatagaagaaataaatgaaggaggaaacagggcaggaagaaagagaaagccgtgcatatacaatcttgagagtgtagcataaaaccataattataattaattctgtatgcttgtgttacaagtagaacaaaaatatgactagccactcttcttgccaactcctagggctctccatcacaagtgtaagatgcagttcaagtaatttggcatgatgtgaaaatttttcactgcctgactgccacctcattttctaacaccatcactggtctttgccgtgttacaagctccagctgcagttgtctctttgcctttctttgctactcatgacacatactttcagaccactctgcctttttgctcttgctgtttcctctgcctgtgtcttctccccttctaacctaaccagatcctacctcctctaacacactaccttctctgtgaaaactttcctgacctcctttcaccccagcacagcaagcaagaatgatccctctcccagtttccacagttccttatgcccatctcttcaatatatgcttggtactccacaaaataaataacaaaaatggtttcagtggaaaaactggggacagaaaagccagatcagagcagatttaagcaatgggtagaaattgagatttgagtacatagaattggttttattgtgatgctgtgttaattattttgatttgtctttagcatttggatctttacstaacaggggttgagggtggtgagaagaaattcccagagtggccgtggtgctgtccaatgctctggtgctgacaggcctgtctcactgaataaaggatgcctctagagtgataatttttttggccccagaaactgtagtcctctattttgagggggaagggagagaggagaaagaccatgtcccttctctgctatcttttggagggtctggagccagagcctgcctcatctatttggaaaggaaaaagattagttgactaggtgagtacctcatatatttcttacgggatcacaggctcctgaagaccaattgatgactaaaaataaattgattattggtttttctgtcattcattaaatggacattaaaggccatctgtgttcccggcaccatgataggctctggggatacaagatgaccaaaacggggttcctgccacaaggagttcatataaccagggagaccaaccttgagcctataacagcaattatgcttgagctaccatgtctgcttgagctaccataacaaaataccacacactgggtggcttaaacaacagaaatttattttcttccagttctactttccagttcttctggctagaagtcccagatcaaagtccagcagggttcagtttcgggtgatggctgtcttcttggcttgcagatgggctgttttgtcctcacatggctgttcttctgtgtgtgcacactcagagtacgtgtgcaagcatgagtgcgctaattctatcagatcagggctccacctttatgaccaaattcaccttaattatctcctatttccaaatacagtcacactgggggtgtgggcttcaacatatgaattgggggacgcaattcagttcatagcagaagcttatagaaaactgtaggtgctggctgggcacggtggctcacgcctataatcccagcactttgggaggctgaggcrtttggatcacctcaggtcaggagtttgagaccagcctggccaacatggtgaaaccccgtctctgctaaaatacaaaaattggccgggcatcatggtagtcgtctgtaatcccagctactcgggaagctgaggcaggagaatcacttgaacctgggaggccgaggttgcagtgagccgagattgcgctattgcactgtagcctggggggacaagagcgagactttgtctccaaaaaaaaagaaaaaagaaaaacggtaggtgcacagatgagggaatggtcatcttgtctagggcaaggcagggacagcagaaggcttagcagagataacacttggtctgaactttgagtatgcgcatggtcatttgccaagtgatgggagtgcccagccctgacttggaggctctggtggtctagcagtgctggtcagtcaataagttattgtcctacataaaaagggacggtctctacctcccaagccttctgtcagtcacatctttattyggtgatatgtgcttattcctcctatgtgatttttacatctgtaagcagcttttcttggaagggtatgtcacaggtttcctgaataatattcagatgtcactcagctttcactgtaacagcctctatgcctcctgcagaggtggttatttcaaaagattcagtgacagagttagaagaagagagtttttgtgctttaaatggctcaagaaataaacatacttgtttctttgtgacagtggggtgtatttataatgagtcatgggcttgctaaagcagagcgtgtccaccctgtcatttcccttctttcgcaaatagtcctggtgggcaccaggttccgtgagcagtcagtgctgagtgtcctcataggtagtactgtgttaagggccctacctgtgggagtagatcttctcagaaggaggaagtgttctggaagctgtaagaaaatgaaccactccttgctttattcttccttcccactcagtttacacttatcttctggcaactggacttttggtccctgatcgtggcttttcagtggccagatgatgagtttctttaaagtacggattgagtcacattcctctctgttgcagccttacttgtcccccagtggtgatcacagtaacccagtagtgattgcttttggataactagtatgatggttgtatatttttttttaagcttgtgttattctgctggcaatttgtttccccagtgggattcagcctctttgcaatgcacccaccagagtctccagctattctcctgcccttggtgtaaggcaaatgatgaccaaagcaggattgcagtccattccattgccccattacccttggggaaatagggcaatgctttaggacggcaggtggtaagagggtttgtactgacagagtaatttccccatctctgggaccaaaaattctgtctttagagacagagaggaaaatgtggggatattggctcaagtcaaaatgaaagccctctcctttctatgatctctccaggtgggaattagatttctgttgcttcaacaagtgggctggagcacacgcttacaagtttagggcagtcgacagcactcagaacagcttctgaaggggctcagttccctgtttactcccttccccctccccggcagagactgttcagaggagtatttgtgagacaaacgtcgggaacagctgctcagccagacccttgtctcctgtgctgccgcagtcactgtgctggaactctctgccgaggagggtggagtgtctgggctccgctgctcccacaaagcaagcattttcctgttttcttggaggcagtttattacagatttcaaccctttctgcatccctccctcccttacaacacgcacactcatcttttcttgcattactgctgaaattatgcaaacttcgtttctctgtcatctgagcgtcattcagaaatgttcctccgatctgtgaattgttccctgacttcaatcggggcagtgttacaggtcctctgctggcaggagggagcagtccgtgaaaatctgcagacacaagactttcagaagctgtgacgagcagactagcaagccacaaaacattgcaagctgaatggatgtcttaataagcttttagatgtgatttggccagcatcagcagaggaggctaacgggaaaaggcagcgaacattgtaacgtaaatcactgcagatttgctgggagtgacagccctaggaagctaatgatctctccaggaaagaattgaccacagttatccagaaactgaacacgatgtagaacagagaggacagcccctcggatgtgagtaccatctcttcaacacaaggtttggagcagtaggagcaaagctagtttatagctgatggcgctccatagccaccagttcctgggtgcctgtgggccatctctgggtgggttgtacataatgcctggccgggacttttatttgcaggtctcttctggaatattttgcttgtcgggagacagaacgtagtggctttaggatattggcaaattctccaaagtataggagaatttgttgtaaagccccaagagaacagcaaaagcaaaccttatagacctttttctgtaaaaagaaaactgattgcatcacagacaagcagctgtgtgaccctctggtatttgtgatgagagacaaaagaattagcaaattacagagcaacaaaaatggggcagtgggctgggaggatggagggaaatcttagcaagctaaatccctatctagattcagaatgtgcattgcatacttatgctcatgtgtttatttcctttttgcttaaagaatgggcagcgtgtttgcgtttaaggttttcctccagaatgctgtgaaaaatgaacattgtgacaaagaggggtgtaattgataggcttggggcagaatacatttctcactgccagcaatgggaagtatcttgaatgatagctgatctacttggaagaggaggctcagatataaggaggggatgaactgctacagccaaggtagccaacaggttggcagtgaagtttaactctttgattcaagactggtttcacccctctattccctttccctcccaatttactgtcaggggttcccccatcccttcttaaactgccccccacccctgcaacacacacatctctatctggtccaatttgtcaggtcagggcatcagatgagaagaagcagagtgtcttctcactctaaggaatgggtatcattgttctagatgggaggtaaggatttgggacttaggaacagtgaccatgagggagggagagaggtggtgtctctgcttkgcctgcacctggtatctctgctgggcctgcacccacacccaaggctgaaggtgcaggaagaagcagaaaggaagcagaaaagaagaccctcatttgataccttcccacccacaaactgtgtgtaaatgcacctgcasgtgaaggctggagatcctagtaaggaggcgattactgggcttaaattgaaaatgagtttgagatgtccaagcacatagggatggtgttggcaacagactaggaattggaaagctggggttctgttcctgatcttgcaggcagttttctgtatgactctggtagggagagtatccaaagtcctgtgtgagggacctgttctggaggctgctctgtgggtgctttggtcatggtggaggggatggaatgagagaggaacattcttaagtagckgtaactgaaaagcaaaaaaatagaagggtgtttctgcttggccaatgttttctcaccactgtagtatttttctatctttaaccaaacaaaaaggaaaattaatgtgggctgtgcttgcaaagggctgtttaccagtggtaattatctaaacaaggctatctcagtagcctgcagctatggcataagtgtacttcagtctcagtatccaggaggctgaattcattgcatgggactggagggtgggaggggagtggctatcaatttactatgggccagctggacccctgcatccattgctgaggaggctgcacagcactgctggtgtggagcttgtgacctcaactgatgggctgtactgaggttgcagcaaaaaaaacctctaccctcaggggctaagccatggagcagaatgagtagaattttagccatgaaaatgtttgtatgaactgggctgttgtacttgagacatttaaatacccattgcaagaaaggttctagaatggaagggggccgttgggtctagtgtctagagttaacaaatgggtagatgacgggggggagggtgtggctgtggaagggagatcatttcataagtcatggctaatactctattttcctgccatttaggcctggagtgattttgcaatatttgggcaaacagagcagaagctcagtataattggtttgaacaaagcacagattacctgaatgaaaagaggcagcgcacctatgtttttaaaaacaaaccacttcaaatagtgtaacggtctgggaaagataaagcccagactgtggccgttcagcgtgaccatgagaattttcaaaggcatttccagttccattactttcagtgttttgagtctcaactttattccttctttttttttttggcttgttctatttctggcatatcccagggatctcagaccgtgactcaccaagctgctttacagcagacccttcaccagatctgttttgtttctaatgacccagtgagcaggagcaggatgggtttgcgagagttcctctctctttttctgctattctttacctgcattttgagcaacagatggagaatgatgagaaagtttgataattcacaagagtggggggtaagaattctttccgaagttacagtattcacatctgggccatactttcacataataaaataccctctttaatacccaccacagtcctgggagataaatgttctcatgtctgttttatacgtgggcatttaaccctagcctcacagagtggttggccaaacaacctgcctgaatgccacggtgaacgagttcaaacaggatatggtccagggctttccagccgtatcatggccaattccttaatctttagagactgaaaggacatttgggtgtgcctgggaacaaatgtaaaggatggctgcatcttccagaccttcagagttaggatgtgtggtagggtttgggttgaaggatggtatctctgttgtagcattttctttccatttgtatgtactagtatttttaataagtatcttttaaaatgcaaagaagccctcacttccttgctgttctagcaggactggattagacatttaagtatttcttcttctaccattcacccttgaaataattaccagtggctttggttgggtctaatggcagcccaggtatactggggggagtcccagtctttaaaattctcttcattttgctatgtggtaggaagaattcagtttgctactagttactaccctccagatcactgctctgcgacagggctttagtgttccataggtggttttggtgccacttcttttcctcctgttagcaaggaagcaacatgaccagccccctgcattggcagagccactgttagtgtttagcatctgtgttgtccccaaggtggattgtttcagccacttggaacaaggaattggcccaggcctgtgcccagctctccatctgttccagaactcgtgaactacactatttacggtgaaaaaaggttgaagggagagaactgcagtaaatgctaggagaaaaccccaaagagagaacccactcagcagggtctctgtggggtgtgttccacaggccactgacccactggggaagcggcacgttagccatggtggacgcacaaaatccaaccagggggcctttgatgatcacacacggtacagttccctgccaaaggcggtgtgtaaaccaggtggtgcttargggattataccaggcctccgctccctgggagaaaaacagagcaaaccttgcagttctggccatactcctccggaggatgtccctgataggggaagaagggagggaagttggcacattctgctgccttccacttggaagttctgttcaggggctttgctgtggagtgtgcttcctgtgtgtcctgcctcccacagctaccctcccctgcaacatgcaagcagcagaatgccttaaaatcacagagaagaggtgtgacctgtccttgtgtgtcaagtggccctgatggcacctttgttttgtaacccctaggtcccgaagatggcatattcataaagacatcttctgatgattgtgaacatctttacctctgggtgccaggccgggccagtgacttcgtgttgagctgaaggaacttgtctaccgcttccctgaaaacctttctttcctaattcatgagccagcaagatgcggtcgctgcactttcagagcgccttctcgtagctgcgtacaaaggccaaacagagaatgtggttcagctcatcaacaagggcgccagggtagcggttaccaaggtaacaagagaaaaatacgctgtagccattccctgggaactggcctacctcttaaccattgtctgaaaaactgctgtgtttggttcacagctttcaaagaactggcttttcttccartgatggaggtttggggagaaggaggattattaagaatgcttttgttgccatctttcaagtggagcaacttgtaattagcatttgacartctttaaaatcacggtggcttttctcacctatttctttagctaaatggagaggagatctcttgggagaagttgggacacaaaagcttactggacagagtgtgcgataatcacgttagatgggcctcccggggaggtggaccarcttgtacacagcccctccactgtgcagagtctcattgtccccgtctgtatgatgacggcctggaccagatgactgctacaacctctataggctttgatttcatgtgggtcagtgaagatgggtggtaagctttggagggcattgcttaccctgcgccaacagagaagactatgaaagataagagaccatactggccaaaggcagttttgtagcaaagccaagaaaaggcaggctccgcgcagctagagggagagtttaaatacactggcaaagtaatgctgatagcaagcacttattgagccctagtattgctgtaagcactttacagccttctagaagagattctcttctcattcctgttttggagaggaggaaacttgtccagggtccctcagccgctgagtggtggaaatgcaacttgtacccacagagtctggctccgaagcccaacctccagtcctccccagaaagagctgtgaagaggggcaaagtttaattttcatagaaggtcacctgttaacttctgacctcctgtggcagatcggtcagctcctattttcatgtttacttatgtgcagttttcacattccatgccggcctccagagaggtcttgagctacttgtaggtccccatggaggtgaacaggggtttgcccatagatggtgattggattgtttggaactgaaggtgaagggggccttaactcagagcttgtgtgatctacccatagcactttccagggcccaggcaatcacaaatgggagagagtgcagactctgtagttagggcacctgctcacagattttaactctgctttgtttgctaattgtgcaagttgcttaacttctttgagcctcagtttcttatctgtaaaagagggatagtaatgtcagcttttcagaattgttataagaacaataacttatttaatgcacttagggcatagtctgcaagttttttctatacatagacttaattatttgctattttataaacagctttattaagatataatttacgttcattaaattcacctattttaattgtacaattcaataatttctagcgtatttataccaccactgctatgcactgaattgtttctcccccaaattcgtttttttcaaccctaatccctaatggtatttagagatatagggcctttaggaagtaattaggtttttaaatggggtcatgagagtggagcccttgtgatgaaattagtttctatgtaagaagaggcaccagggtctgctgtctctccttctccctgctatgtgaggacacagtgagaaggtggtcatcagcaagctaggaaaagggcccccactggaacctgaccacgcgggtaccctgaactcacgcatcccggcctccagaactgaggaacaaatctcttgttctggcaacctgagaagactaatataagcacattcaaatattagaacatttctattgtcacaatagaaaattttatatatatataatttttttttttttttttagacagtgtgtccgtctgttgcccaggcaggagagctcactgcaacctccacctcccaggttcaagtgatccttgtgcctcagcctcccatgtagctgggactacaggcacataccaacatgcctgcctaatttttgtattttgagtagagatagggtttcaccgtgttgggccaggctggtctcaaactcctgacctcaggtgacccacccaccttggcctcccaaagtgctgggattacaggcatgagccaccgcgcctggctcctagtaaaaatcttcgtacccagtagctgtcacttcccattcccacccccagctcctggcaaccatgaatctactttttgtctctataaacttaccttttctaggcattttatgtaaatagaatcatatggtatgtggtcttttgtgtctgacttctctcacttagcataaagttttcaaggttcatctctgttgtagcatgtatcagtacttcattccttttcatgactgagtaataatccattgtatacatatattctgtttatttctttatcagttgatggacatttgtggttgattccagtttggggctattatgaataatgcttttgtgaaaatttatatacaagtttttgtgttggaaatatgttttcagttctctagagtatattcctaggagtggaattgctgggtcgtatggcaaatctgtttaacacgttaagaaactgccaagctattttccagaatacctgtaccattttacattctaccagcaatgtatgaaggtttcagcttctctacaatctcaccagtgcttgcctgtctttttttatacatcatttgctttttcatagttatctttagcaaagattcccattggaattttaaaactattagttcaaatactgctaaaggtttttaataaaaacagtgatcccttagcccagtcccatttacactccaaagaaacaactttcagccttctagatgtttcttttctggtatttgtctccatatttccaatgaatatgtatgttctaccacctgattcaacagtttagtttttttagtgaagtcaagtttaatattttatttatgttatactcgtgtgtgtgtatgtgtgtatatgtgtgtgtgtgtgtgtgtgtgtgtgtataatttatttaagatatgctcccctctgtcacccaggctggaatgcagtggcatgaacatagctcactgtagcctccacctcctaggttcaagcaatcctcccacctcagctccctgtgtagctgggactacaggcatgcacactgttaattgttaagacagggtctccctacgttgcccaggctggtctcgaactcctggtctcaagtgatcttccctcctcagcctcccaaagtattggaattacaggcatgagccaccatgcctggcctttcttttatatttttaaaatttatttattgtggtaaaatatacatagtaaatgtactacttcaaccatttttaaatgtatagtttagtggcattaaatacattcacattattgtgcaaccatcaccaccatccatcttcagaaatttttcgtcttccccagctgaagctctatacccattaaacactaatttctcatttcctcctcccagaccctggcacccaccattctacttcctgtctctgaatttgactgttagccgcacctcaaataagtggaatcataccatattgtccttttgtgactagcttattgcacttagcgtgttttcaagattcactcatgtagcatgtaccagaatttcattctttgttaaggttgaataataatccattttatgtatatgccacatctggtttatcccttcatccactgatggacacttgggttgctaccgccttttgcctgttgtgaatattgctgtatgaacatgggtatacatgggtgtttgagcccttgctttcatatcttttggttatatactcagaagtgaaatatggtagttctatttttaaagttttgggtaacttccatactgttttccatggctgttgcaccattttacagtgctaccaacagtgcacaagggttcccacttttccacatccttgacaatacttgccttctgtttttgtttgtttgtttttttgagtcggagtctcgctctgtcgcccaggctggggtgcagtggtgctatcttggctcactgcaagctccacctcccgggttcacgccattctcctgcctcagcctcctgagtagctgggactacaggygcccgccatgatgcctggctaattttttttttatttttagtagagataaggtttcaccgtgttagccaggggtggtctcgatctcctgacctcgtgatccgctggccttggcctcccaaagtgctactatttttactgaccttcctaatgggtgtgaggtgatatcttgctgtggttttgatttgcatgtctctgattattagtgatattaaatgtctttttatatgcttgtttgccatttgtgtatcatctttggagaaatggctattcaagtcctttgcctattgtttaatctggttatttgattttttttggtgttgagttgtaagagttctttatatattctagatattaatcctttatcatatatttgatttgcaacattttttctcattctgtggttgcctttaggagtacttttttagagccgttttagattcacagcaaaattgagaggaaggtccagagatttcccgtattgctcccrcccctaaacatgtttaacctatcccattatcaacatccrccaccagagtgatacatttgttacaactggtgagcctatactgacgcatcattatcacccaaagtccatagtttacattacggcttattcttgtacattctatggatttggaaaaatgtataatgacatacatccaccagtatagtatcatatagattatttttactgctctaaagatcctctgtgcttcacctatttatccccttccctcctcccaccccaatccctggcaaccactggatcttcttactgtctccatagttttacctttttcagaatgtcatgttgttggaatcatacaatatgtagcctttttatattggcttctttcacttagttatatgcgtttaaggttcttccatgtcttttcatggcttgatagttcatttccttttaggactgaaaaatcttccgttgtrtggatatactacagttttggaagcattcacctactgaaggacatcttggttgcttcccaattttggtaattatgagtaaagctgctataaacattyatgtgcagttttttgtgtggacatacactttcagcttttttcactagataccaaggagtgcagttgctggatcacatggtaagaatgttttgttttgtaagaaactgccaaactgctggattcccatcagcaatgaatgagatttgctgttgctccacattctcaccagcatttggtgtttcaatcttacggattttgaccattctagtagctttacagtggtatctcgttgtttgtagcttgtctttttactctgctgattgtgttctttgatgcacaaacattttcaagcttgatgtcccatttgtctatttttgcttttattacctgtgctagcattgtcatatccaagaaatcattgccagatccaatgtcatgaagcttttccccttgtagaagctttatagatttggatcttatrtttaggtttttattccatttcgagttaattttttatatagtgtaaggtaagggtccatctttacttttttgyatgtgggtatctggctttcccaggaccatttgttgaggagactatccttttcccattgagcggtcttggtatctttgctgaagatcatttgaccatatacatgaaggtttatttctatgctttctattatatttcacaggttttatatatttttattctaataccaactgttttgattactgtagcttttaatgtgttttgaagtcagaaagtgtgagctcttcacagtttgtttgtttgtttgttttgacacagagtcttgctttgtctcccaggctggagtgcagtggtgtgaacacggctcactgcagccttaacctcctgggctcaagcaatcctcctgcctcagcctcctgagtagctgggactacaggcatgtgtgccaccatgcctagctgataataatgagcaacttcctgggcgatcctactgcctcagcctcccaaataccacaattttaaaatcagacttataattattgtgactrtgtaaatgctgctcactggttagctgagaatgattacttttttaaaaaatatatatcttattatttttcctggagctgatagttaccctaattttttcacttgtttaatttgatttaaatttattggtaaatgtttcatctactatctgataactctgtaaaaccgttcttagtgcaattctccatgagtaaacctattacatatttatcagcccgagtcttttcctggggatatcccctctggagtcatttatccttctttctgattgatctgggttgctctctagttctgcacagtcatcttgagaagtcctttcacctctcccctgtattagatccctgtttgctggaacccatgtcactctaactttgatactgcacattctttgatttcttcctaagaaagggaatatgtacataaattttttgagagtctgcatgtctgaaactccttattctaccctcttgcttacgggacaatttggtatagaaacctaggcagagaattattttgcctaagaacttcaaacgcagtgcctcatctttgaacttatagtgttgctgttgggaaagtcagcttatagtgttccttgcaactgtcttctgaaaggccttttgcatccactctgccccttgaaggacctgcccattcaggactcagctcaggagccaccaccaacatgaagtccacccagtgaatggtaccctggatggaatttgctctcctcccaattgatgtaaccttgttctctatgcattctgtgtccttcatactgctctgtgggtgctcagaactccccaccacatcatcactgtgacctgggtcatagtgtctctcttacatttatctgtgtttgacagaggagaaaggcactgaatttggaatccaaagaccttggtgtaggcacctgttctgctgcttattaawggcttattaatgtaggccagggttgttcagccttagcaacatcactgacattttgggccagatcatcctgtgctattgggactttcctgtgcattgtagggtatttagcagcatctgtggcttcttgccatagatgtgctggtagtacttcctttccttggattttgacaaccaaaaatgtctctggacactgacagacatcccctgaggaacaaaatcatccccgcctcagaaccatggattaggccaatcatgacaggagtctctatttyctcacaaaccttagagtttccataagcactaaatgtgatagcacatgttgccatagttataaaatctaagtggacataaaatattgattattttttaactcatccagtgcctakcaaggtactcacatcccatctgtgccgaatgaggggaataatgttattgactgtgaatttcttacactttgatagcaaktgcaaggtattaggtactcttgtaagagctctacaacaattaagtattttaaacctcaccatggctattatccccattttacagatgaggaaactgaggcaaggaatgatcaggtaamctgccctaagtttcccttagaaagtgtcaaaactgggactcaaaccctggccatgtggttcgagagtccttgctcccacaggaggcaaggaggaaagttccccttggcccttgaaggctcactgaaaaatcagctgacaaatggcagataaattgtagaagaggcataaaaatttatttaacatgtacatacaggagccttcagaatgaggacccaaaaatgcaggggaaattgtccatttttatgcttaggttcaaaagagtgtggatagccatgtagaaatatgattggacagaaagggcacgatctaatgctgattgcatgggaaacccagcaaagcctgtctgtctacattcttcttggcctttctgagctgagcatttctgccttctaggtatgaggcaggaccctctctggaatggagtgttaagacctacattcaactaggtcagataatttctttatggcttgcttttacgcagaaaggggaggaggggaaggttagagtaatatttttaagttttatggctggctttgasggtagcagattctggtttctatgacctgccttgggggaagagggattctagtttctatggttagcctctggggaggaattgaggggccagagataggagggcaggaagaggtcagagaaaaacttttgcttgtgaggccttccttttgggttgttttttgagccccaacactggtaaccatcatgtttccactatgtggtttataagtttagattgtgaactttctatgggctgctgcttgttagagcatattccttggcacctgacacattgtggatataatctgcaaatgttttattgactgggagctcaatatgcccaggtactttacttaaaaaaaaataagcgatttcccaataatgggattgtacttgtrtaaaacatttccgaattattttcatgtatatgttgcttgtccccagaggcttgtaagatatatatggtttcccttgagaggaaatgaggtcacagaaggaaagtgacttgttcaaatagggcatgccagagcccagatgagaactggaatgtcctggctcctgtggacattttctctgccacagataagggcatctcttctgtcctgggaattttacttcaactcmtagtgggtggttccagtatgttgtccactaagtaaggatggggttgtcatgcacagaacatgtcttcagagcaagtggggttgggagctggaaattgatgtgggaactacatgtaagaatttaaaactcatgttttaagagaaaggctcactaagaactatgattttccatttgcacaactttctttcttttttttttttgagacggagtctcgctctgtcacccaggctggagtgcagtggtgcgatctcagctcactgcaagctctgccttctgggttcactccattctcctgcctcagcctcctgagtagctgggactacaggcgcctgccaccacgcctggctaatttttgtatttttagtagagatggggtttcaccatattagccaggatggtctcaatctcctgacctcatgatccaccctcctcggcctcccaaagtgctgggattacaggcgtgagccaccacacctggccatttgcacaactttcatatttcgaccagttgtacttcatcatgttgacaaacacattttcagctggaacaggtaatctgataaaagcactgggtatgctgagaagtctgagatatctctggagcagattattaaagacaataactcaggctcrtgacccttcacttttctgctactcctttcaccaaagtcaccttttccttccctcatctagacaatatattttgagcttcagctgtgcactggtgaacaagacaggaaaaaacatcttggtccttgctggagcttgcattcttggtgagacaggctagaatttgacactgttgcctgcactcctatccctgaagctcccgttgggtctgtcagctctgcctcctggttttcctccccaaggtgccttctccatctccttttgcttttcctgcctctaaaattggctttcctcaggccctctgcgctcatctgctctccctctggacacccacttggcttttccagctcaaggctggttaccatgtctccatctccagcttcgccctgtctcctgatccccaaggccagctgccttcatgggcattttttattttttatttttttttgagacaagagtctcactatattgcctaggctggtcctaaacttctggactcaagtgattctcctcccaggtaacagggactacagtcatgagccaccatgcccagccttcctgggcatctttatgtgcagaatccacaggttcaaatcgaagtgcccacactggaagctgcagcccctcctgaggcctggtcctcttcccaaggtccctttttatcagtacgagggagccccatttgtgcacacctcaagcagaagcccaaagccatcgtttcttcttttgggtctttgacatccctccactgacgcttcctgtcagtgaccaagtgaggctcattatgcctcctaacttctctcaactctgtgtctttctagttgcccctgcaggcactgcttgagatgtttgatactaaaacaaaaaaatgggatatattttttctttgcaagaaagctctggttttataaatgaacatattctctccagttcccttgtgctttagtcaaataccttctgatacagctaattttgttacctcagtaccaacaggtgttttgtcatctggataaatcctctacatgctccttagtgccaagcattggccataacattagagttgagagcctctaggagtccccaggcagagtatcatttcctagaactgttaaraagctggttagcctgggaaacatagtgagaccctgtctttacagaaaataaaaaattagctgggcatggtgatgcacacctatagtcctagctacataggaggctgaggtgggaggattgcttgagctcaggaggttgaggctgcagtgagccatgattgtgccactgcactccagcctgggcatcagagggagatcctgtctcaaaaaacaaaacaacaaaaatgctggtccttggaatgttttactgaagtttttatcttctccaaaaggaagtagacaaaggttgttttatgcaagtttggttaagaagaaaattcagtatcattcataaaattcatctccatttgatacctaccactctccctgagtaacgaaattggaatttagataattaagcacaaaccccagggcctcaaagagcttgttcatagagggtgagccccccagagttctctgcagagtgggcaggcagaaaactcaggaggtgccacagggcaggtagcatggagaccatacggtgtgatctacttcagtttaaataggcaagtctacttctctccacaaatgtatgctttcatttggtgagccaggagaacgacatgggacacatgagactgttaacattggctgcctagcaaggaagacgattagctttttccccctcccgccyccttttttttttttttttttttttggaaacagagtctcactcttttgcttaggctgtagtgcagtggcccagtctcggctcactgtaacctccacctcccgggttgaagcgattctcctgcctcagcctcttgagtagctgggactacagacacgtgccaccacacctggctaatttttgtatttttagtagagatggggtcttgtcatgttacctaggctgatttcaaactcctagcctgaagtgatctgcccgccttggcctcccaaagtgctgggatcacaggcatgagccaccgcatccagcctgatttttttcattgtattgtttcagttattaaaataagcatatattaattttgtactttgtcaaagataaagtcaagtttaaaaatatgtgttgagtgcctgcaccagcagtgggccaggtgcttgccatatactatctggttgaaatccttaccacagctctgccaagctagtgctcttatcgctgagataccaataaggaaagggaggtgctagacagaaagtaacttgcccatgaccaaagaagyagtaggtgctagccctgagaaggagccagctttatgtggccctgaggcccacatgtaggcactcctgacccttgtttccagcacctccatagtccttgcccttccaccactatgctggccacccctcagtgcagacagagaaagaagctgtctgcagggtggcccaaagggaattttctcctcccctgtccttgcctcctgcacaccatttccagagttttatagcaagttcagaaattcctgatgaaggcggtgtagtgtagaaggtacaagcgtggatgcaggagccaggtgctctgtttcaaatgccaatgatatttactagctctatggtcttgaggaaataactttgtgcatcatatcatcacctctaaaatgaggattaaataatagtagctacctcattaggttctttaagcactacctgaatcagtatatgcaaactacttagaacagtgcttagcacatagtcagtgtcaaatatagtaggcactgaggggattctgacaatgcaacaatgctaagagctgtggtccaagtatcaggcagggagtcctgagtggaagacacaaggccattcagtatcctacctgaaaagtgaggataatctcagcctcatgagatcgccatcaagactaaatgaaggccgggtgcagtggctcatgcctgtaatcccagcactttgggaggtcaaggctggtggatctcttgaggccaggagttcaagactagtgaaattccatctctactgaaaatacaaaaattagtcgggtgtggtggtgcacgcctgtaatcccagctacttgggagcctgaggcaggagaattgcttgaacccaggaggcggaagctgcagtaatccaagatagtgccactgcactccagcctgggccacagagcaagaccctgtctcaaaaaaaaaaaaaaaaaaaaaaaaaaggctaaatgagatgacaaagtgtctcagtgtccaacatttaataaaactatcagctttttggagtagaagttgagaagctgattctaaaatttatatggaatgcagaagacctagaatagccaaagtgacgttgaagaacaaagttgaaggacttctgctacctgatttccggacatactggtatcttccagacttactagaagagtcaaaattatagggacagaaaatagatcagtgattgctaggggctggagatggtgggaaattattgactgcaaaggagcaggagggaattttgggtgggggtgatgaaaatcttccatattttgtttgtggggttggctgtgtacatttctccaaccacatgaaagtgaatactttaaaaaagttgattttgttgaatggaaattatacctcgagaaacttgattttttttttttttttaaagataactctcttaattgttacagatgaggaaacagaagcttcaagaggctgaataagtcctttgtaggttgcttgtggttcccgtggggcttttgcatcatgttgtctccccatgctggtaactactgtactccaatatgaactttaaacttttaaaaagagaaatgcaaagagttcaattgtagtaaagtagtaactttccccagcatgagcacctgatgatgttttcagaaatgaagaggatgcctggctggtaaatattttccggcagccactttcaagagaacgctggaagtcagtaagtggtatacattcatggcctcaagaaacacagtgagaacaggctytgcaccgagaggctctcctgctgccactcgctgggcttcctgctctgaaacctgtttccagtttcgacaaaacctcacttccacgagggatttgcgatgctggtgttctaaggcaggggagcagtggaaacgaaggatcttttgtggtggtcatttgctttgtttttgatttcctgggtttgtgtttaatgttaggacttaccagaatggcgtggcctgaactcgtgtttgccgacctgctggttcctagtcatttgctttaagctgtcactccccaggacgtgggggaaattgacacttacaaggtggttggtcaggtgaaagttttcacttgggagaatgtgttgtatatagcatgctccttccaaaggaccccatacacttattttaattggagtaggtaatggttctactacagaaggcacaaagtttgcctagtcctcstcccatgctgcccccaccactcagtgtttccctccctgaaggcacctgtcttacctgcttcttacattgttcctgagatatttacgtacatacactcaagtagatgtatctctgtgtgtttccccattttatacaaattgtgggatactatactctccttcattttaattggcttaaccaatcccctattgatggatatttagattatgttaatctcctgcccttacaaagcatgctgcagtgactctgtttggaggtcttattgcacagtacgattatgtttgtgggataaatttctctaagtggtacttctgagtcagagcatgcatgcccttgcaattttgacagctagagctaaattgctctgcagagaggttgtgccagtctatactccaccagcagtgtgtgaggagcccratgggactgacctttaaacacacagtgccagtggtacactgggctccctctgctgcctctcctggcccttcaccatctgagctcatcttacctttctagccttctctccaggagctctctgctaaggtgcatttggcctctggcctcggttcctcttcacttcagcatgggttttgcagaattttctctgggaatcccagctgcctgggaatcaaagggaaaagtggggggagtgactgatgggaggggaatagaagagggggatctccacacctctcctccccttccccatcctccattccgaaatggaaaatggaattccttcccaagatgcctgggtcttttgttctgaccccaagtattccagtgtgttgtcacatccagagcaagggcaggagcccatgcagggctgctgcagtgcttcgttctgctccgggttagcacatccacacactgtgtggagcaggtgtcttttcactgaaacaaacagggcattgagggtatacggttacatggcaagtcaaacaaaatctgcttgtgttctacaatagctagaagcatcactctgtgggaagaaaatctcaactgggaaagcttaggcttttgtagtttatcatcaaaaatctctggggaagattaacatatggtgctaattctgagaaagttataaaatgagcacgtgttaacattttatttaactcattaattaaagaggaaaccagtaagatgatacaactgttttgaaggagaattgtcaggccaggcccagacaattaaaaaaatttttttgtagagatggtgggggtggagtcttgctatattaattgcccaagctggtcttgaactcctggcctcaagagatcctcccaccttagcctgccaaagagctgggtccacaggtatgcaccaccatgccaggctaactttttttactttttgtggagacggggtcttgccatgctgcccatgctggtcttgaactcctgggctcaagcagtcttcccacttcagcctcccaaagtgctgagattacaggcatgagccaccatgcccagccccgtcttaattattttcaactgttcaatccagtggcattaactgcagtcaacacagttgtgtcatcatcaccaccatccatttccagatcttttttcatcttcccaaactgtaactttgtacccattaaacactaactccccttttctccctcccamccagcccctgccagccaccattccactttctgtctctatgaatttgtgatccattttaaagtctctcacaatctttccttacctagaggcaatgaatcacatttaccatcttttcgaccctgcccaagttattagcctccttgagccttcatttcctgtctgtaaaatcagcataacagcacttacctcaaggatatgtggtgaggattatatgaggtaatccatgcaaagtgcttagaacagtgtaattaaggatgtagaaagagctcaacggatgggagttgctattatcatgaagaccatctctccacctgagtcagctgtccttggagacacaaaagtcagtggttctcagtattgactgcacgtgtaaccacctttagagccttaaatactgatgcccaggcccatacctagatgctgtggtttagttggtctgggatatggcctgggcttggggatttttcagagcagcaaggcagagaactactcactgctgttggtatttccccctgaggtttcagagccttccatgcagggcaggacaacactgtccattgagcatcgggccaagccagtggttagacatctggaagttgtactgctctttgtagaacaccatgaaatattgatattctaaatgccatgactcaagctagaaacaagtttattagcaggaaataaatgtctcaaatatgggaaagcaaacatatgctgtgaattgttgtgtggcttgtctatgagataatgcatggaaaattatgggatcaataatatgaaagtcttaagtgttaacttactatgataaggatggtaattaggcatgtaccacagtgactcatgtttctagcaaaggtaggtaggtgtccctaggagatgctctttggaggaaaaagaggcagcccctcagattgagtgggataatggaagaattggtatggcaggtcagacacgctgtaattgaggagaacaagcttcagaactttggggatgggcccccaaagctaactcaagcatcttaggagaggctattaggctgctgttaaagagtctaggtaagagttcatcctgaatctcttggctgctctctcctgcccctcactgcctatgcagaattgcaatgtcttttcctcctgccctctgtaaaagcccaccttatttacagtggttctcagtggcagtgaaggcaggccctgtttgccccctgcttctctcctcaactctaggtaggcttggtgggagtttgggcccagaggccccaccaacccctgagtgttcaatcagcaagccatccaccatctrccaccaccgtgatttgtccatattgcatcctgttgccttagcagattgcacttaaaagtaagtctaactacactgctgagtgctttataacccagattatgtgctagtaaaactccctgaaaacatatatttagtaggtcctaaccactctagacgagacattataatattgtggcacagctgggtgtcagcgtttaaaaatcctccctaaatacctgtacctttcctgaacaaaatgcgttggaggattgctggtttccaggccagtaatcagcatgttgtgaggcttgcatgggtgattctccacatccccaccctggtagtgctgtaaaatgaagaagccaaagagaaaaggagctctcgaagccactgagctgcccacttgggcctctgctcagatgccagtgcaggtggtcttaytggcgaattccctgaggccctcttagtagttgtcttctttttcttttctttcttttaagttataatgacttaggtttcagaaaataaattaagccaggaacttgtcgggacactgaaaattctttctcagcaggccagtcagtttgtttctagtgagagtgggctgttacatgtttccttgttctaagccaataatttagggtatgtgggtgaataggtagcagctctgcctagtctgcttttagctcatcttttcagtgaatttattgagcaatgtgtaagaattataaactatgatgaagtgaaatttattccaagtatgcaagactgggtcaacatcagtgtaatctaccatatcaacaagtgccttagctcaggctgctataacaaaataccacgtattcggtggcttaaacaacagacatttatttttcacagttttgtaggatgggaagtcttaagatcacggtgcctacagattcagttcctggtgagtgctctcttcctagtttgtagatggctggcttctctctgtgtggcagagagaggggtctctagtctctcttcctcttataggggcactaatcttatcagggccctaccctcatttcctcatccaatcctaattaccttccaaagggccccatctccaaataccatcacgttgaaagttagtgcttcaacatatcaatttcagggagacacaaacatttagtccataacaagctaaacaagaaaaatcatctgatcatattaataggtacagaaaaagaatttgacaaaaccaaacatgcatttggggaaagaactctcagaaaaccagaaattgaggaaaactttctcaacatgataaaaagcatctaaaaaaaaccaagagctaacatcatatttgatggtgagagactgaatgtttttctgctgtgataaggaacaagacagggtgtctgctcgttcactatagtgctggaagttctagccaccacagtaaggcaagaagaatgcaagcaatttaatccccaaagaagtcctagacatggatggtggtggtgcttgtgcaacattatgaatatacttaatgccactgaattatacacttaaaaattgttaaaatggtagattttatgtatatgcatatttgaccacaaatttataaatcacaaaaaatgggcccaagaataagcagaaaacttagtctaattagcataggaaatattggaaacacgattagagatgcaagttttagaaagtactagggccggccrgatgtgatggctcacgcctgtaatcccagcactttgggaggccaaggcgggtggatcacttgaggccaggggtttgagaccagcctggccaatatggtgaaaccctgtctctaaaaaaatacaaaaattaaccgagcttgatgatgtgtgcctgtagtcccagctactcaggaggctgaggcagaattgtttgaaccctggaggcggaggttgcagtgagccgagattgtgccactgcactccagcctgggtgacagagcgagactctgtctcacaaaaaaagaaagcactagggccagatggtttcatggtcctgttttatattttatcaacaagaaaaaatccaatgtttaaattattgtaaagcacagaacaaaatagaaagctgtactttttcatgtagtcagcacaaccttaatgtcaaaaacagatcaataagaacaagaaacaccaatctcaattatgaatgttgatttttaaaattctttataacattacctaatagaatgcagcatttatgagaataataatacagtgtgatcaggtgggttccaggaatgcaaggattgttccataatttgttataccaacaaattaaaagagaaaaacacatgattatattaacagttcctgaaaaggcagtgattcttgttttctggtttttgttagaaaccagaagagaagcaagaacagtccttatatccaaccatagttcatcatgtattggcctaccgtgctgtgctctgtcagcgtcaacccattgaaaatgtagtctggccaggcgtagtggctcacacctgtaatcccagcactttgggaggccgaggcgggcggatcacaaggtcaagagttcgagaccagcctggccaacatggtgaaaccctgtctctactaagaatacaaaagttagcagggcgtggtgtcacatgcctgtaatcccagctactcgggaggctgaggcaggagaatcatttgaacccgggaggtagaggttgcagtgagctgagatcatgctactgcactctagcctggtccacaaagcaagactgtcttgggggaraaaaaaagaaaatgtagtctgggctgccacctgtgaggagtgtgtgggccattaactgatgtcttaccactcagggacaagtgtactgtagaagctgatggaattcttaatacccagttaagttgcctgaaatattttggtccttctttttggtggatctttatagaaggaagcccarccctagcaattactgagttacctcaaaaggaattcttggccgggcacagtggctcatggytaaaatcctagcactttgggaggctgaggtgggtggatcacttaaggtcagragttcaaaaccagcctggccaacatggtgaaaccccacctctactaaaaatacaaaaaaactagcggggcatggtggtgggcacctgtaatctcagctacttgggaggctraggcaggagaatttcttgaacctgggaggcataggttgcagtgagttgagatcatgccactgcactctagcctgggygacagagtgaaactccgtctcaaaaaaaaaaaaaaaaaaggctgggtgcagtgcctcacgcctgtaatcccaacacttcgggaggccgaggcaggcagatcatgaggtcaagagatcaagaccctcctggccaaaatggtgaaaccctgtctctactaaaaatacaaaaattagccgggagtggtggcgcatgcctgtagtcctagctacatgggaggctgaggcaggagaatcgcttgaacccgggaggtggaggttgcagtgagccaggatggtgccactgccctccagtctggcgacagagcgagacttcatctcaaaaaacaaacaaaaaaggaattctcttatcaattaaacccaattgttaggaataactgattcctaacaatatacatttcaaatcacctctccatatcatttatkattattattattttacagggccatcctaatacttccatccttgtgtgatgggactgttggcccccagtgcaggaattaccctctgcccccattacattttatctttttaaaattagcctattccaatctgagattgttttggatcctgatttgtgtcagccaaggaatttattcccttgccgtttcttgtcaactattgtctgattaagatatgatgtgtcactcatgtaagtagactagtagataaaatatatttgcaacaaggaaagaaaactctgaaagcttcttaaaytataaattgtttttaaatgtaaagttttattttctttgatcgatggtactttttcaatttttttctcgaatgtgttccatttttttcttgaatgtcttcataactttgtcttcattgaatcataagcctgagaaggactttgaacttttctgacccaaatttacaccattccaggctgttgaagctctcagggaacaccatctatgataagaggacccttggggcacttagaaaagttggtggrgtcttccactttttaaaatctaaacgaggagccaggtggccagaattccagctattgcagttctgccagaaataagattggaggtattgagaattcatttcatctcttcagccaaatgaaactctcaaagactcttcccattctgaatatcatgtttgtaaaatatgcgccactcttattttagtaatgttacaactttcttgcctcctactacctctctcttaatgcgacagataatataggcagactgactcaaaaaaggcttgactcaaaaaagactgcatgaccctgatccaatgtatttctcatggtctcttgaagaaaagaagctttatgaaatgattacactaatttaacctaaattcttcccattacaccatttctccttgtctgggtcacagcatgcagctgccctccttgttacagtccccagtagagatggttaaattgttttattgtttgagccaatgagtctcaattcctttatacaacctttccctactcccttccttcagaktttctgcccttttattcctttggcttctgccccaggtctccttttgactctggtcataagaatatcattgagaccaggcacggtggctcacgcctctaattccagcattttgggaggccaaggcaggtggatcacctgaggtcaggagttcgagaccagcatggccaacatggtgaaaccctgtctctactaaaaatataaaattagctgggtgtggtggtgcacgcctgtagtcccagctgaggcaggagaatcgcttgaacccaggaggcagaggctgcagtgagctgagattgcgccactgcactccagcctgggtgagacagagcgagactctgtctcaaaaaaaaaaaaaaaaaaaaaaaaggtgttccaggaatggctaakcaccacacctttccttctcacttttcaggtgcattctgttgggacgggtcttgtccaggtctgctctgttagacctgtcattcctgggacaggtactgttggtctgaaaggcctgccctttagtaagtagggtccaagatactgaagcaggagcgaggagctgggacccaacctgcgtcctggctggagtgatgagggaccagggtcatggccctgggctcccaggccccgtgcagtcagtgacaggggcagttgactggcttgtttctgtaggttgtagttctcaaatggctctggttcgcctccttccgagggtcctggcccctcctaggaagggttttctgacataacgccttggtctacctggagaatccaggaaggaggctgagcaccagtctgacacctgctgggaacaaaaacacctccacttcctttcagggtttcttttaagyggattacctttggctgggctcccttgtcatcctcactggcgggagatcattatcttaacgggaattcttctcctggaagattcccactcccaactgggaattggcctcttcagagtgaatagcagagactgtttcattctaggcatcattgtgatcacttgttcatgtaatttattgcctgctggaatgggagtcactctgatgttcccatgcagcagttatgctggagttagatccacagggctcagcctgaacaaatcatcatcccagtcagtgccccagtggtgtggacagtggggacacatttttgtggttgttgcttcgcaacatctcaagaccctttgatttggttccctggaagcaaggccctgagtctgtgcctcttcctgattggatcagagggagatgcaggaagtcagggtgaatactgcctcttctcctcacccctgccggcctcagatggcccagcctgataccagggccccttgaggaagcagcacctttaaagggtcaaaggcagtggtgataacctccagccacacgtggagatgcactgaaaatgattggataaaaatgataatagttgtattgggttgtggaattatagaggatattcttttccatatttttagtaatgtcattacattgcttatatactctgaagatctsggaagctgtaggttgtggcaaggcagtattttaggtgttttatattgataggctgatgagagcatcaacaagaatgtaaaagagatatggcccttgctggagcaggcctgaagtgcgggtttagcctaagkgcctgtagctgtccagggagggtttatcctggcccctcctcatcccatcctgtggttctcaacaaggtcacacattagagtcacctggggaggttgtataaaaactgcctgggcctcaccacagcgagttgatgagagactctggagggagaggcttacacaccaatacagagaaatgacaacagaccaacctccccaggagagccagatgcagagaaaatagaaaacatctctccttgtccttgagattctaaaaaaatcaggttatttttaaacaaaccccagaggttagtggctgggctaaggtaaaacacccaagaacttgggagctgagcttcctaagggtgagacatgaagcccctgctctgccagagaagaactttgctcctacccttacccccaacacaaccagggcagcacacagagtggtagggaaagcatgcggctgagctcagatggctgacggggtgaatccagactccagttagctgctgtataacttagaacaagtgacagtctcccaagcctcagtttccttatctataaaatgggttcgataatagtgtccacctcataggataattgggaggatagaattagctaacgtgtaaaattcttaagatagtgccttctacgcaataaatggacccaagcgttcaataaattctggccgctgctgtctcttgctctgcccaattattggtctygctgggctcaccagggcctaggttgagttaagctgaactgatctttgacgataactggggtaggactcagggcaaattgatgctttaaaacttcgtcctttttttcttttctttctttttttagrgagaaggtcttattctgttgcccagactgaagtgcaatggtgcgatcacagctcactgcagccttgatttcctgggctccatccatccagcctcctcagcctcctgagtagctgggactacaggcgcacaaaacaacactcagctaatttttgtattttttggtagagatgacattttgccatgttkcccaggctatagaactcctgggctcaagtgatccacccgccttggcctctcaaagtgctgggattacaggcgtgaaccaccttgcctggcccaaacttcttattcgttaatacatggtcttttctcctgttcccatttcttcctgtggccagtcctaggggcatggaaatggaaatgagagcagttgcatccttaagtctaagtcattcaaaggtgcctctaaggatcaatttttatttgctccttcacccttaagaggggttccagcttttcccattagtcggacatgcctgggggcattcctatgtgctggataggggcagcctcttctccaaagggctctatttttgttgctatttactacagaatgttctggaaaaccaagtacatgtctgctgctttcttgcttttctcctttggtaggtggtgtgtgtttaagagggtgggccttgtgctaggaaagccccaggacggaggagacagcttcagcttctataggaaaccgattactgcctttgctattgctgtactttaaycagaggccagaaaaggagccaagaatgtgcagggaacacagcccctcctcagaaaagctcctgtaccattgtagctcagctcctgaagctctcaggatgtcacacctccttgctgacagggagcctgagtgctgtgcgaggccaggagcattgctggagaatcagggaagtcatagtttggagaatggtgttcttggtgaagaatgcccttccaagaagagacacagagactgggaaccacagtttacgtttcaaaaatggaagtggacaagagggccaggactggctggtgggtacctggaccctccagccatagcccttctggttggaagagatccaactcttcacccaaatctgtttgacattggaaatatctcactggtctttgcgaaggcaaaggtgtagggtgtcgaagagcagagggagtggttggggtgtcctctggggtgggggctaaggacagctggagggaagggagacccatgctagatgatggacgttacctcgtgtccttatttcaagcctgtggagtgggcagtggaggttattcctattttacagatgagaaaatgcttagtttgggggattaagcaccaaatgacacaggtgttattagtcagagctgggattcaaactaagctctgatacctctggcctttcatttctccactggcggttcttcactgactttggattagaaaggtgcctccaatccaggcccatcctgttggtaatttagtttctaaagtgccctcccagaagtgatcttctttgaacctgtcctagtccatttggcctctctaacaaggtaacatagagtaagtagtttaaacaacagacatttgctcctcatggttctgggagctgggaattccatggtcagagtatcaggaggtactcatgcatctgggaccccaagcacagcaggaggatctcttgagacacacacacaaaaaaacgttgccaggcacatggctcacacctgtaatcccagcactttgggaggctgaggtgggaggatcacttgagaccagcctggccaacatggtgaaacccgtctctactaaaaatacaaaaattagctgggcatggtggcacgcacctgtagtcccagccacttgggaggctgaggccagaggattgcttgaacctagaaggcagaggttgcagtgagccaagatcgcgccactgcactccagcctgggtgacaaagtgagactccatctcaatttttyaaaaagtactcctgggtctgttggcctctttccagcctccccaggcagcttctctccttgctggtctgtattttccagctgcccagaagcacttgtgtcccaccatgctgtcacctccctcatagcacacacttctctgtcctcatgtgatgaactcccctgtgtttcagaatgtcttaggaaactttgtgaagggcacatactcaatgtcaagaagtccttgacaaggatatgtggtgacagatgaagctggggaccaggcccagccagtggaacctggtcatgccactctatctgatcagctatgatttcattggaagaatcgaggttagggagcacatggctgagcacagtcactgtcagagaaaggtcactcttcatctcagatgctgcctttttctgaaggctttttatagcccacttttttggggagtgattaaagtaagctctgacctctttccagaatcattctagtgctttggtcacatttcatggggagaaattaagatcctttattgtctgttatctctgttttcctccatggctcattacccatggcaaactggtgctttcttgaaatcattaatgtgtatcctgctagagtatcaataaaggcctttgggaagaccttaggggtatgcttcagcatgggtggggccatggttcattgatgtttgaatgtttcttcacagtgaaacttgtaggggaaagcaaaggaaacatgtttgcttgagaatttggagtttggcagggcagttctctagatagaagttgattcacatcaaaaagtgttatttcttctggatgtcacccttgatgtggcaccttgggagccgacatgcttagagcatttgaagcgaatggtcttctctatgacccagcaacagggctaagaaggctactcaggtgcacaaggagaggaacacgctgtgttctgcaacctcctggcattagcctggrtgcccatcaggaggaggatgagtaaataataagtgaaccagaactacatgaataacatgaaaaacaaatctcaaaaatacaaggttagacaaaaaatgccaaattatattgtatagttgaaaactattaggccaggcacagtggctaacgcctgcaatctcagcactttgggaggccgaggcaggcggatcacttgagcccaggagttcaagaccagcctaagcaacatggtgaaaccccatctctacaaaaaaatagaaaaaattggctgggcatggtgacacatgcctgtggtcccagctactcaggacactgaggtgggaggatcgcttgagccaaaaggttgaagctgcagtgagccatgatcatgccattgcactccagcctgggcagcagagtgagaccctgtctcaaagaaaaaaaaaacaaaggtttgaaacaagcaacacaatgtttatatatattgtctttgactataaacatgtagtaaaaaatataatgaaaagcaaaggagtgatgaataccaaatttgagagagtggttacctctggggatggaagagaaatgagacctgggagttgttcacgaggaatgtcaatgatttattttttttcttgaaatggttggtggttatgtgaagtttagaatattacttatgttttttagtggttgaaatacttcataatttcagtttagtgtttttgtttgtttgttttttaaggcagggtcttgctctgttgcccaggctgaagtgcagtggtacaatcacagttcactgcagccttgacctcctgggctcaagtgatcctcacaccttagcctcctaggtagctgggactacaggcacatgccactgtgcccagctaatttttaaaaaagaaaatgtttttatagagatagggtctcgctgtgttgcccaggctgatcgcaaacccctggcatcaagtgatcctcccacttcagcctcccaaaatgctgagattacaagtgtgagctactacacccagcgtagaatttttttttaaaargaggaagaaccggccagtcatggtggctcatgcctgtaatcctagcacttcgggaggccaaggcgggtggatcatttgaggtcaggagttcaagaccagcctggccaacatggtgaaaccctgtctacttgaaatacagaaattagctaggtggtagtggtgtgcacctgtaattccagctactcgggaggctgaggcaggagaatcgcttgagcctgggttagcctggcattagcctgggtgcccatcaagaggatgatgagtaaataataagtgaaccaggatgcagaggttgtggggagccgagatggcgtcgctgcactgcagtctgggtgagagagtcagaccctgtctcaaagaaaaaaaaaaaaggaagaacctttcctaatcagttcaatcaacagttttaattttcacctgttactaactggactcctctggggctgatgaccatgacatcttgctgttctcccacctcttgcccaggttcatcatggccacttcattattcctcagtattagcaccagtgagaaattaagagaaggcacaaaacccctcgttttgctacttgatagtctgatgagtggagagtagaaataatgcactaaaggaaatcttcacattttgaacatatcgtgttcattgattgcaatgacaatagccaaggttaactgagacaaacttgaattttggttaacccataagaatctcctgccaatccaaaggggcaggagggagtgatcatccgaaagcccctgtgcaaaccttgctctaggccctctgtctcccaagggagtagcattgaggacttgttcygaaatcattgttcattttgcattcacagcatggccggactcccctgcatcttgctgccaataagggccatcttcctgtggtccagatcttgctgaaggctggctgcgaccttgatgtccaggatgatgtgagtagaagccatcattctatcaggctgagttggcaggggaggttttctggctagaaatccacaaagtgtaagctgtgagatgggagggtagtagatgctctcgcagcacattttagctgcatcttggtctctgtggcagcaagaacttcctctggaagacctgctctgaggcccattctcagtagcaagttagagtttgggagtgtggggtggttctccatcatggttcacttcctgtctattattcaagtgatcacttcctctctattgtacaaaatgcctcaaaggggatttttgcctgtgtcctgtctcagcataaagagacacacacatgcacattagtgagtatgggcaagacttgccggaaatgtgtgtcaatgaccaaatttaccattggagaaaaaatggggattaaaaacttaatttttttctcatcttaatttctcttggkcagtgaatatgacatggaaaatgatctattcaagttggggagttgggggaagacacagatctcatggaatctaagaaaaaggaggcctccagaaagagtttactctgccaccatgctattattgagacatggccatcaaccaactcagctctgagtctattcattcaggttatctagagatggactctgattggctcctctggcatcaagtggccaatcctgagtgagtcagcagtggctggggtggagtcacgtagtacagtgggctgccctactgggtctttggagaaggtggttctctaagaaaggaccatataaattgtcctccaacagctattaggaaaaggtcttttgataatacagttgaaaactatttttagaaatggttgcaacactaattcatgtagtagaactctaagaaataagaacttttatggggaacacagaatgttggagtgtttgcacttataacctcttccaaattcacctttaataactgtagttatagagtgtgattcaaatttcacatcttcagatatgctacagtgtggtttactaaagtgcttctagttttctttgggtctgtgtataatgtcataaaacttggcaaacacacagtaagaaggacagtacttgcaaagaaataactatgactgttttatgcatgggcagaaggccatccagtgtctttcataaatctctggttatatctggaacttgctgggtcatcaaagatgttattttcaaaaaatgttgatttagctttaagccattgatttctaccttaggtcataatacttttttattttcctgcactatggtcatcataacattctcaactatatcatatccttagatgacaggaacaaaaatacaaggagagagaaaagattttggccacagaaaaggtggggaattgagttattactggtgcaaacatgttgggatgcatttggtcttctcttcgcataattaaaggctttgcttgccacagtggcaaggccaaaatgccaggcatgctaacccattccaacttgacacccctgcctcacatcctgggctctaagtatcactgtgttctcatgcagcaaaagccttgctaatttcctagaactgctgctgtttataccaggcaaggtaggaagtgaaacaggcaagaattttcttaggtagccaaagtgagacrtgtcagcagaagaaaagccagctctacttttagacagagagagtcccttttatttattgaaggtattttcttgcatcttttccttgtcctagagagacaatgcatatattgcttctcccagataaattaaaataaaaatacaacaacaagaaataattgggagtggagaaggtagamttgaccttcactagttctgaagaaatgcatttgccagcaatatgatccatgcctgttctctgtgtatttaccatgctgttgatgaccagccttgaaatacatgcaagaaatcaaggaagaaaactcttgatgtgtgtcctttaaagaatctargagatcagttatttgaaaaaatctcagaagttacctgtcttggatggtgggtagaaacagagaatgttaatgatatgaagaatttactcctaacttcatattctacagatactgatctttatggcatggtaagaactgagaattagttgaagaatgacctccagtggcctggagtgggattattatgaatttcaacctgtggaaaccagttctttagattatgcaactccaggagcaaattctttcttgcttcctgccaatcgtgtcaactctcattggagygctaatgccatctctgattggtcaatgagcaatcacatagctcccgcctcagaaatagtccaggatgctgtggccacagtgaaagccatgaaagaagacaaaaataagaaaaaccacagagggaaggttaggaaggaccctagaagatcagagagagaaaaagaggtcagcaacttgctttacacacctaacctgtcttgagcttccttgcagtatgtctgcctgtgccacatgggggtgkttcctcttgaagaggcgcacactgcacccttgcatgactgaaatctgccaacactacactcactctttttcaccatgtaggaaagaaaaataacagtatttcaaaacaaagatttagaccttataggcaccaaarctcttaaaatcccaaagtgagaaacactgtctcagaaaaactgagagctggcagttcacgtacttcgcaaatgggtcaacatgttccaaatcaaagtgccaaactgcaaggttgcaggcccttcaggtttccagctacagcatctttccttctgcttcttgtagttaatcattcaacaaatgcttttggggcagctctagtggctatgctttactttatgaaagaggcagtcccaaccccacagatgcatctgaccttttctgaggctcgtcctaaggttaatgacttcacaggttggaagcagsttggggtgagtgcaaagagccttgacaatttgatttctggtccaagcatgctgtcctaggcttatcaataaaatgagagaattagacatcaataaaatgagagaattagacttggcacacagtagggagtcaataaatattcagtccgggcctggtggctcacacctgtaatcccagtgctttgcgtggctatggaggaaggattgcttgaacccaggagttggagaccagcctgggcaacatggcaaaactccatctctacaaaaaataaaaaaattagctggacatggtggcaaatgcctgtggtcccagctactcaggaggctgaagtgggaagattgattgagcctgggaggtggaggttgcagtgagctgagatcatgccactgcactctagcataggtgacagagtgagaccctgtctcaaaatgagtggatgttcaccaaatagataattcagtaaacactgttgagagtgctctaccttttcccagcatttaagaatttcatgattgacttaggtaggtatcatatgcaagtaagaattatgtcaaagtagccacttgtatgtattgaggccacatcttgtttcttcgtgtcatttcaaggaggaaatgtttcaatggtaaattttaatcttataggaggaaagagtccatttgtagataactgaccctgtttcaactgagggcctcaaggtactaaattgtgttgtattctagggaagaatagatccaagatgataacctgaggcagctattgtttacatgtttcatgtctctcacctcagagcctttaattctcatcttggttacttgagaagggtgggtttttcaaagcctgagaaagcgtattgcccagtcctccagaaccattccagctagtgtcagcacagctagcagtacagccaaggacagccacttttggtagggagagtccgagcctggcctgacagcagtgtttatctgacccgggctctcggtgaggtctctgtctgagaggacggctggagggggagctgtggcctggaaacaggcaggacagccaaaaggtcccccagaggaaggggtgtgcaggacctttgccagcagcttaggacactatgtgttctcgccgcaacctcacacaagtcattagatttccttgagtcttgctagtctggaaatgtcctccyaaggtctgaactgaaagttagattgagctgcttgcattgagctagagtttcacaaaggaaaattttctcaaaggaagcaaatacagtagattgatgatgaaagcaagtaataaataacttggtgccattccggctccaaagatacctcaactcataatttagagggcagcttgtgaaacatgacaaaaaatatttgacctaaaccaaggcttaggttagtctgtgccgtaccatccagtgaaggcccttcgtgaaataatttgtacagcaagagtggctaacacgacccatatgctcagggcttgttgctcatacttcatgaacaatacagagtgataagctttgtcctggaaaaagttgtttttattggtccaaagagcactagagtgtaagtagtttgtggttatattaaaaagcctgtaagaagtggaaatctaaccaagtcagcactaccctgaaagcgtgagctgcagtcgcgtggttcttgctaagaagggcacygtctttcttakcaggtcagtaatcatcattgcactggaggcctattttgggaaattccgtcaccattctgatagagaaatgggaagtcttggaaatcttacggaaattttaaaaagttgagacgtggggccaggcacggtggctcgcgcctgtaatcccaacactttgggaggtggaggtgggcagatcacttgaggccaggagttcaagtccagcctggccaacatggtgacaccttactaaaaatataaaaaaaaaattaggcatggtggcaagtgtctgtaatcccagctactctggaggctgaggcagaagaatcgcttgaacctgggaggcagaggttgcagtgaaccaagatggcaccactgcactccagcctgggcgacagggcgagactctgtctctaaacaaaaacaaaaagttgagacttgggcagtatctcatatgattactagtttccttgtctagaactgctttctaagaggtctgaggtagacagcgcaaatggcacagcctacctcctgcagccactgacccagcggccacattctttttttaaccactgcaagggttctctttgaataaggggtctgggaaggtggatgagaagaaaaycagcctgaacctaactgataacaggaataatagtttaggatgctgaaggggggaggtcggtggtggcagtgctgaggacagtgatctgtcctcagtgtcctgaccccccctcactgcagaaattccttaccttccacaaatgaacagtgggaagagagtctgtgacagggacagtcctgttactggggtattgtttctgctcagacttctaataagtagcggtttttcctgatgctaaaagttayccgtgttaaatataaaaagctggaaaatattaaaaagtataaaaagttaaaagagaaaaatcctttcatggatttttaaagggagactttttaatttwaagaaagcaattttgagttttaactaggattttttattgtaataaaatatacatagcattaaatttactgtctgaacatatttacgtatacggttcagtggcattaagtacactcacattgttgtgcaaccatcaccaccatctatctttagaactttgtttcagattacatgtttttaatgtgcattgtttgttacagatctggggagtttagtaagtagaatcagtatttcgttaaggttgtttataggtagcagtgcatccttcttttaaaaaatctgttttatcttatgatggcctctgtcctcttttgggccaagcacsagggacgccccagaatgttttctttgcccctctggtgctctgccaggaaacttcacaaaactctgaccagccacatcatagaatccaagaaggcaatggagggaccctgggatcatccagggtgacacacctgaggtccagcagggtgacaggcttctagcaagccatgcacagcccaggcctcctgaccccttgtctcgtgctcattgctttccacmagaacatttccacactgcccacccatcctccctttcaaggctggaccacaggctcagcttgatttacctcaacttagcttcctgaggacctgtcagagataaagggtgctcttagagacttcagaactctcctgttacagtcttgacctgcttacctctgggagtgtttcatccttcactcaactgcaattaggaagagtcaagttccctttggcgcctaaaggagaacaacggccggcaatcccaggaatccgatcatagagaagagggctcagagtgcagcataaatcagtgaggatgttgtcatgaactctctgaagaggcttcttagaaatatgcagtgatagctgcagtccctggagtcctcagatgaaatagggcaaacccctgcattgccgttgactagtacaggtcaatgaacaaatgacccgcctgtcatcaaatcatgagtgctgctaactggcagagctggacagtggtccccctgcaagctggaaactcggcaggcagtagagattccaggcattgctgctttaattgcatagcacacacctgccctcacacccactcttcacacctgtgatagtcatagcccctggatggcaggagagagcctgaccctcattttgaggttggctctgtggccgagggctattcttgctgtcggcttaaggtccccctcttagtttatgaacaaaatttctctgccagcgtgcgttgtctactaacaagaccacaaagcccgccttgcctgtggtaaccaagcccttctgcgaataaccgctctgctctgtgtggggacgggaggggtccttgtgtccaagtgtcaagtgagtagtgcaagcagggggtgcaggggagctgactgctgttcctgcctttgtgtcactttgcagggggaccagaccgccttgcaccgggccacagtggtggggaacacggagatcatcgcggcgctcatccacgaagggtgtgccctggacagacaagacaaggtgagtggacactgagyttccttactccccaaggcaagggaagccagtggctcaggggagctggaggagcccgctctggaaacttttgagtcctcgaggtattataattcctgtcttaccacttatgatttaacatgattaaatcagcctaaaattcctttgaaacactatctggtatcccagccaattgtaatttttttttttttttttttttttggagagagggtctcactctgttgcccaggctggagtgcaatggcatgatcatagctcactgcacctggaactcctgggctcaagtgctcctcccacctcatcctcccaaaatgctggcatgagccattgtgcccagctgccaattgtattttttaaaaatctttttccttgttctatggcaccagkgacaaccacataaatcttaaatggtaaagaaaaaaatctagaaataaggacctatgtaggcctgggtcgggggggtaagggatgtgccccagactttctctttactttcttagataagtgagcaagttaatttctttaaactatattgcagggaaaaaaaagtaagctcaactgggccaaacacagtggctcacgcctgtaatcctagcactttgggaggctaaggtgggaggattgctcgaggccaggacttcaagaccagcctagtcaacataacaaaccactgtctccacaaaaaatttgaaaattaagaaaatatatattagcaaggcgtggtagtgtacacacctgtagtcccagctactcaggaagctgagatgggaggattgctaagcccaggaggttgaagctgcagtgagccatgactgcatcactgcattccagcctggacgacagagtgagaccttgtctcttaacaaataaataaataagattgatagatagatagcaaaattggccaggcgcagtggttcatgcctataatcccaacactttgggaggccaaggcgggcagatcacctgaggtcaggagttcgagaccagcctggctaacatggtgaaacccygtttctactaaaaatacaaaaaattagcagggcatggtggcgcatgcctgtaaactcagctamttgggaggctgaggcaggagaatcgcttgaacccgggaggtggaggttgcagtgagctgagatcgtgccattgcattccagcttgggcaacaagagcgaaactcttgtctcaaaaaaaaaagaaaaagaaaaatwgattatttaaggaatcctaatgacttcttacatattaacctaatgtttttaaattttcaaacaatcttaaaacacaaaacttcacaattaagtgcaattcagcctctgcttacttttttttttttctttaaagaggctatgctgggaagaactctgctttactttttaaaaataacttttcattaaagtataatatacatacagaaaagtggacaaataagtgtgcagcttgttgaatttcactagcagaacacacctgtgtgagcacccagctcaagaagcagctcattgccagcacccagaagccccataccctgtgccccctgccccttgcatccccgctttcctttggcttcctccttctgcagtcagtcccactgcccgggccacacaccgccaatacagttcccagcaaccaccccatcccctggcctttgagaccctagacttccccttgtggaggtcagctgtgttaggcctttatttttagctgtttctaggggcatggatgtggttgagttaaagctgaagccagagcctggatgtaattggagaatgcacctgcactgacctctgctgattgccctgcacccttccttctccgggctcttccctccctggaactcctgccttcccgcccccaccccactcaattcattgcacttaatgatatttmtttgtttaaaatagtaagctaagcaaataygagctatgttcattaaatgacttctatttaaaagcaacacattaggccgggcacggtggctcacgcctgtaatcccagcactgtgggaagccaagtggatcacttgaggtcaggagttcaagaccagcctagccaacrtagtgaaaccctgtctctactaaaaatacaaaaattagcaaggcatagtggtgcatgtctgtaattccagctacttgggaggctaaggcaggagaatcgcttgaactctggaggcagaggtggcagtgagcygagatcacaccactgcactccactctaggtgacagaacaagactgtctcaaaaaataaaggccacacattgaggatacttgtttgttttatttccaaatcactgtttcctcagtccctgttcattatttgtttggggccctgaggcttttgaattaaggtgggtgagattaagtttcagtgaaaaaaagttggggaatcgatcaggcccctgaatcttatgaagatggcctcttcctttgcctgatctttgcagggttctctctgatgccaggagcagagcagactctaagggtggtggaggtgggaagaaatagatggcatgctatcctgatgatgctttctgttaaacgagagctgtggatggggcctagagcctctctcaactggggttcctagagagacttaacctctaatgccttatgaacaatcatccatggttcgtcatggattcatttctcttctgtgcatctagaatggttcttatgatgtatcatttctgggataatggagaaacttaccactcaaatcatcttctgtagtctgtggctcagatgagaaagtccaattgagaaaggccgtctggtgttccgtaaaaatccactgtgatgtattgatcataatgagaagaattaggtcttgggtaatgtgcctttcccacctgtgtgtcttccttaggatgggaatacagccttgcatgaagcatcctggcatggtttcagcsagtcrgccaagctgctcrttaaagcaggagccaacgtgcttgccaagaacaaggtgaggcctggcagatgctagaatgcctcattcacaggtgaggatggctgtgggtttctccccctgtgggagccttcttccagtgagaagagtgagagcccagagtggcacgaggaacctgaaggtccrttcggcccagaagtttcatttgcagaaaaggctagaagctgattgatattccaggtcaggagcaagygcaccaacagcgccaaaaccctgcttatgtgagaggcccctgactgctgctgggaatctacatgcgattactgtcccatagtttttttgtattcaaaaaatatggcaatggagttggcattaaaaaaatcagcaaaagaactttaaaatgctaatacygaaaattagtaaagtgggctcccctagatgctgctgggaaagtgtgatacgaatagccacctttgggagacaatttggcaaaacaaatcaggagccttaaaatggtccttttttggcctggcatggtggctcacacctgtaatcacagcactttgggtggctgaggtgggtggatcacctgaggtcaagggtttgagaccagcctggccaacatggtgaaaccccatctctaataaaaatacaaaaattatccrggaatggtggctcatgcctgtagtcccagctacttgggaggctgaggcaggagaatcgcttgaacctaggaagcagaggttacagtgagccaagattgcaccactgcactccagcctgggcacagagtgagagactgtcgtgggggcaggtgggggcgggggtgggccttttttggccaggtgcagtggcttatgcctgtaatcccaaacttttaggaggctgaggcaggcggatcacttgagaccaggcattcaagaccagcctggccaacatggtgaaaccctgtttctactaaaaatacaaaaaattagctggatgtggtggtgcatgccgtcatcccagctactcggaaggctgagacacaagaatcgcttgaacctggtaggcggaagttgcagtgagcttagttcgtgccactgtactccagcttgggtgacagagtgagacccggtctcaaaaaaaaaaaaaaaggtcctttttacttggtacctacctttcttggactctatcctaaaaaggtaataaaacctgctattgaaatgaaatatggaaaagaaaaaaataagcaataaaaccagtaaaattttaccgacaaagatgttcatgacagcagtagttatattttttaactgtggggagggagacttagaattatggttcattcatacagtggaatataattaatattaaaatcgtagttttgaaaataatgctttccactgttaaagaacatcacaaagagatataagatcatatatagtacatgtcccagtgcttaatataaatttgtgtatttaaaaatttaagcacagaagaatatcatcagaatattaacagtggttatctctgggaattgaggctaagattgatttttatttttgtacctttcccaaattttccaaaatgaacccattatttcttttacaattgggagaagagacttttttttttttttttttggatacagaatctcgttctgtcacccaggctggagtgcaatggcacactgtcggcttattgcaacctctgcctcctgagttcaagcgattctcctgcctcagcctcctaagtagctgggcatgtgcccccacgcccggctaatttttccatttttagtagagatggggtttcaccatgttggccaggctggtcttgaactcctgaccctgtgatctgcccgctcagctccagtcgctgtgccccacgtggctaattatgtagagatacttgcctcttgaactccgtgacacctcggcctcccaaagtgttgggattacaggcgtgagccactgtgcccatgccaagagatatactttatctcaaaaataaaaaagcgttatcagtactctggagatatttgcagttgaggtaagaagggtcataaaagnnnnnnnnnnnnnnnnnnnntttggatacagaatctcgttctgtcacccaggctggagtgcaatggcacactgtcggcttattgcaacctctgcctcctgagttcaagcgattctcctgcctcagcctcctaagtagctgggcatgtgcccccacgcccggctaatttttccatttttagtagagatggggtttcaccatgttggccaggctggtcttgaactcctgaccccgtgatctgcccgcctcagcctcctaagtatctgggcatgtgcccccacgcctggctaatttttctatttttagtagagatggggtttcaccatgttggccaggctggtcttgaactcctgaccccgtgatctgcccacctcggcctcccaaagtgttgggattacaggcgtgagccactgtgcccatgccaagagatatactttatctcaaaaataaaaaagcgttatcagtactctggagatatttgcagttgaggtaagaagggtcataaaagggcttaccctcttttctttccctggatggccagattgggtctgtagcaggggcctgagaatttcccacagtgcactgccacatcacagagtggtagcttcagctaatagtggtaggataatgaatcaggtgggctagaatggggttctaggtggcagtagcctggggacaatgggcagcagtaagtaccctccctaatacacacacacacactatatatatatatatatgtacaatttcatggccaagtcaaatctgaaaccatagtatctctagcttatgacacacagacatctgcatacaagatcttcaacagcaatgccaggcaaatcaagctatagaaatataccccatcaatgaagtgacttctccagaccttgcatgctgcaggaaatagaaatgacagcctgaaactcctttgtgaacgtaatctctgtgggagcaagagaacccacctcagtggctttgccctccggtgaaatctcctggctctcactacttttccattggttcattagagagcatagttaagcaagccatgccttcgtcattttcatccgtctcccctctccagtccctcattacatcttaggacatcttcaagtctcacacctgttcctctttccatgctcattcttaagcatgccctggattatttcagatgcctcaagcagattggcaggctcaaatctagtccctcctttcatcctgctcttcctctgctcagcgaccttcycataaagctcctgyctgacactgtctataagcctctgctggcccacctctggagttcctcctggctcctttcccctagagcacctcctgtgccctcagagtggggctcactggcctgcttctcattcctgcctatagacctccaacctggccccaggccctctccctccccgaagacccactgggctgcttctgcaactctcccttggcaccgcatgcagctttgtgctgtcgtttcctagttcatatttttcatggttccctcatggatcaaaagcttgaggtctgagagcagcaagctacgtatggtaatatcgccggtagtgcctggctcacagctcaggaggtgggtggctgcccatttcttcaaaatgcatatggtctggaacaggagttgatggtgtgtaatcacttttttttttctttttgagacagagtttcactcttgttgcccaggctggagtgcaatggctcaatctcggctcactgcaacctccgcctcccgggttcaagcgattctcctgcctcaccctcccgagtagctgggattacaggcacctgccatcacgctcagctaatttttgtatttttagtagagacagcgtttcaccatgttggccagactggttttgaaatcctgacctcaggtgatccactcaccttggcctcccaaagtgctgggattacaggagtgagccacygaacccggcctgtaatcaccacgtttttttgtttgtttgtttgttttgagacagagtctcactctgttgccaggctggagcgcgatctcggcttgctgaaacctctgcctcccgggttcaagctattacgctgcctcagcctcctgagtagctgagactacaggcacacaccaccatgcccagctaatttttgtatttttagtagagacgaggtttcaccatgttggctgggatggtcttgatctcttgatcttgtgatccacccacctcggcctcccaaggtgatggattacaggcgtgaaccactgcacccagcccagaaattgtttctgtgtaaataaaatggcttcagaaggacaggtcaggaaactcatgcgtctcaaagggagggacattttgtaccagycatagcccgtagaaagatccttcttattcagcagatgtagcagctcctgtctgggaaatcagtacccactactcagggtggggaaaaacgcctgctacatatatatctaccctaggtcacattttctaatgtcaggttttgagatataggtatgaagtcacgctgttctgtgagttttgacaaatgtatacggttgtgtaacccccaccataagatatagaatgtttccattgccccttaatgttcctttgcgccctctggtggcaggcccccagtcaccctctcccagccccgggcaaccacggatctgttttgcttgttcataaaggtcatgtaaatggaatcatacagtatgcggccttctgtgtgtggcttcttaaacttagcataatgtttttgagattcctccgtgtcgttacatggaggaatggttcacgcctctttattgctgaggagtattccattgtgtggatctaccacaatttgtttatccaaacctatggtttttaattttcttggtgcaaatgcttttccacatcatygatatttccttattggcaatataagctttggtatgatctatttctagaggcatcagatttctttcatttcactcatgtattcaacacgtatttagtggttgccatgaagcccataacttgcagacaacttgagagtagtgtttttaaaacctgggcagaccccttgttgctgagaactaaactagcagtggttctccacctggctgcacattagaccctcctggggaactataaacaaacgaaaaaggaaaaaaaacaaaactwaaaaaaaaaaaaaacctgaagaccaggcctggggtgatggactgtcccagtttgccctgggctaaagggtttcccggaatgtgggactttcagtactaaaatagggatgctggatacccatccccaaggccacataaatcagagtccctagaacggttgtggctgtgcacagggctggtttgaaagcttccccaggtgattctaatgtgcacccaagggttgagaaccagcgagcctgctagaacctcaggcctgtaatcctccctgtgcctggaggtaaaagtgagacaaaaggtccaccagggctggttggagctaaggtgaagagaagggggataagcaaactggccgcatccagtattcctctattttttttttttttaactcatttctctttttaaaagatcaggaatctgatatactggagtatcggcagccaggactgtgagatccagaagggtgtgaactaggtgagggagaagcaatgaacaggcagtgtaatgctctgagcccacgcacctgcaagcctgacccagcacttgagctcagcagaaccaacgcggagcttctgtgtttaacctcctgagtgcttgcaggctcttggatgacacaatgtcacctatyacacggccttgytttcttgttacttttctaggggttatcagcggcctcayatgccctactcccatagactcaaaagttctgttcatgtcctgcaattttttcctgcagtattgctatggaccttattctgacccttggttgtcattgtgatgtggtttgttgaggttctcaaaaacaagaaggacccaaaaagcaagagggtctcaatctgtgtcctaagtgatagatgcaactgtactgcctgaaaggcagggcctggtgtycatagttaaaattttgatgtttcaagaaaaatacaagaatgggtgacttgaaaaaggctaacaagttaaatctcagttgcattagcctgcccttccaggaagtggctagttttactttttttagcccaccattggyagggattgtaaccacagctattgcccatgtggggcaggaagtcatctgataggaattgagtactgtgcatgtgtccagcattgtgtgttaagaaaacaccttcctagacactctgagtcaatccccatagttttaggatgtgggggtcatgctccatttcccaggtaaggaatttgagcatttgaaaaggmtggcttttagttagtaagttgcagagccaggacttggaaccaaggttttatgacaaataggactcttctgcctgttcagactccaaattaaatgttcttacctctgaagcatccccactgaaaccatcgggcaagaggcagagaatgtgagcgttgccttttcccccgagtaagtactgcccctctgcaaggcatgcaagtctgtgcggaagcatgttrctaatatgtcctccctctctctgcctctctccaaggcggggaacacagctctgcacctggcctgccagaacagccactcccagagcacgcgcgtcctcctgctggccgggtcccgcgctgacctcaaaaataatgtgggtgaacaaaaccagattctcacgttctctctttcttgtgtcacttcagaaaataacttcatgagcatacttgaaccttaacatctagaaattaaaatgkaaaaagtatttggggactatctctaaagtgttctttttttggcarttttctaagggatcattcaggcatgtgagaagaagaatcaaaagacttggaaatactgcttttctcccatcattttcccttcatrcctcatctttggtttatcatttcttacagtacgtgtctggccaattacagactaggaaaccagttaatgttttaagaaagtctctacccacatagagtgttgagtgttgtactattatcagcaaatatgagctggtgccatttacaggggaggtcctctaatgccccatgcccagcatctatagygagcaggtcctactgatgactgaggcgtccttgggatgagctgaccggaaaggtcacatgggtatygcttcttcacaaagaagctgtatttcctttataaatcccctgccttagccacgttggctaaataaataaataaatctgaggcttctttctaaagtgtcctcaggtgagggtctccctgtttggggtagactcatctaatgctctgaacctcagctttgagcttggttccgtcttaatgcaggggagaaaagtatgccaagtggccagtgttctccagacagagctaggatggaaatggcaagaaaacactgcaggcagctttttgtctccagttctttattgtctttgtgggaacagggttctgcctgttgtgcttactgagcatcctgcccctgagtttttcttcatrccctttttttgctcccagtgattgcttccttatgagctcccctactacatagctccatataggatattggggtccaactgaagtgggatactccttgaacttcagggggtacgtgtaatcttaagatttgacaacccccctgctgccctgtcctttcatccatgagggatctatgctgggaagggctcatttccaaagcaatgctgttggtcttaagtcagtatactactgaccttttgggttgtagggaggctagggtccctggatcctcctcaagcacaggtaagcagagcctgccttagctcttggaaaggtctcatggggagcagacgtctagtttcataaacgtggaagcagtgattctgtgaccacgtggttgttctgcacaggcagaaagggagcagggctgcccacagcagcaaagaatggcgagccttggggtggagcatctatgttaaaagagctgcttatgattccctaaagagtacatgatagtctgctagcttttaaataacattttctttctacttttctctatttgttttgtaactgctcagattgtgcttagagtttgatttttgtccgcaggcaggagacacctgtttgcacgttgctgcgcgctataatcacttgtccatcattaggctcctcctcactgctttctgttctgtccatgaaaagaaccaggtcagtgcatgtatyctcttcatggctgccagcacccttcccacaaggctaccggacaggtctgttagtgcaaacgggagcagaggctgctgggaagctgccatgtcacctacctgggactcagccagcagtgggctttgcatgggtgtcacactgagttctagtggccctggcttatctggcctgctagagaaagtgtgcccttataattcctgtgcatatcaccacatttgcatattgaacattttctggagatcctggggcaggctttgttttttaaatgtgattttaaaaagaaaacccacgaggaagaatgtgatttagtaaagaagcaagggaggccgggtgcagtggctcacatcccagtactttgggaagccaaggcaggaggatcacttgaggctaggagttcaagaccagcccgggcaacatagcgagaccctgtctctacaaaaaatttttttaaaaatttggccggccgtggtggctcatgcctgtaattccagcactttgggagactaaggtgggtggatcacttcgagttcaggagttcaagaccggcctggccaacatggtgaaaccctgtctctaccaaaaatacaaaaattagccaggcgtggtggcgtgcacctgcaatctcagctactcaggaagctgaggcaggagaattgcctgaacccaggaggcagaggttgcagtgaaccgagatcatgctactgtactacaacctgggcaacagagcaagactacatctcaaaataaataaataataagttaattaaatttaaaaattgggcagagtggcatgtgcctgtagttccagctactcaggaggctgaggcaggtggattgtttgagcctaggagtttgaagctgtggtgagtgagccatgatcttgccactgcacaccagtytgggcaacagaatgagaccccgtctctttaaaggaaaaaaaaaaaaaacaaaaaaaaaaacccaccaagcaagcataggaattagaagtcttataactccctaagttctgttccttgcactgccacttacttacacttgagctgatagtctttcattcccataaaattgggcatataatctgtagagagtgccatgcaatggggttttgaaataaagctgtgaatattaccgtcttccttagaaatgtgcacaatttccagcagtcattggatttgaaaattagattgtcttggtatttattgacacctatgtggtacattgtttcrcttttctttgttggagtgcataaatcttaactaaaaaaaaaaaaattagattgtggtgtagattaaaaataccatggaatggtggtttctgaccctggctgcatatgagaatcaacaggggaattaagaatactgttcctggatcccaccccagttgaaagagtcagaacctctgggggtgaggtccaggcaatggtgtttttaaaaagctctctgtctgagtatacagccactgacctaatcaagtagcacggcctccccagtggggtgctagatcatcaggtgacccctgcatagcccccaccaaccagtgcctttcaaccttggcagcgtgtcacggcacttgagagctttaaaaagtccccctgcccagcccacatggtagaccaatgaattcagcatctctgagagtgggacccaggcatcatcattttttaaagctctgaagcttattccaatattcagccaaggggaaagcactgtgcagagcttcccttcaatacacatagctaagtgactcagaaatgaaataaaaattttcccacccctcacaaagatggctgaatgttcatgctacccaggaaaaaagtatcaggcgctttgcctgatcacctgataggagaaagaatgaattgtttcacttctcctatatttgtctggtttatttatatcattgtgtttggaaaatgacagcatttgcatttggaattggcccactaagctgcagttgtctttatcctcctttcatagttgattttgtgaaagcatatttcttgtataaagataatatgaacatttatttataggctatctgtaagatgtagaaaacagttggtcttgagtgaacactggttcttggtgtttccacccgcacaaagcatatcctgagcctgcagatggattgagtcccagtggccccttcagatctacccgctgtagctgcaggctggcctgtcacctctccggtgcttgcagaagtagccatcttcacggcttctcctgctcaatccagcactcagacaccaagcagttttctgacctctgacctccctgggtaaaagaacagagccaaaagtggaatgactagcctgcctgccccaggcctcctgcctgtcctcctgtcctcgtgaggcttcaggtcccaccattctcaacaacccaggccagcattactttgcccctgcgtttaatcctgctgcgtgatttcaggtatcctcactcagaaagaaaggtgatattggtgccgaggtcacttagttccaagacctctttaagtagagcctcataacgctttaacaaagggccccatttcagtctcaggcaaatctcagtttgactttgaagagccacacctaggccaggtaatgaaaagctgggggctgtaggccatgagcagatgaggtttagcagaccttctaatcaattccaggctggagacacagcacttcacgttgctgctgccctaaatcacaagaaggtggccaaaatcttactggaagccggagcagataygaccattgttaacaatgtaagttgagttgcaacattgctttctaaagtggttcccacccctttccagaatgggatgtgtactaaacccctgcagacccccaggcccagcgyactctggaagacgggggatctctgctggaaccacagcccccagggccattggggtggacttgaagggtacccctgctctgagcagccccaggagttgacaagccttggggcctgcttttagctgcctgactgcagtgaacacaacctggcatgaaaaagaactcagggatgtccagttaaactgacgagtggatgttacccaaagtgagttccaagctgtaaatgcatgtgatgctcagaaaaatggccacatggccctcagtttagtcagcttcaaaattctaaagcaactcctttctcttccactttgcctgacctcactgtttccctttccctctccccctctcactgtgtgtcctgcagatcctagagcaggcaccagctcaggtgcgctttcttcttcgaggctgtcctgcggtctctgcccctctgaatggttcagcagggcctggagggtgcaacagctgctgtgtggaggtttttttgaggggtgtgtggtctgggactgctgaagctggcacaaggctcttcagcttccttggctcctgtatctagctcccctctttctcctcctgccttcttttagctctacaaccagtactgggggtgcagttccatgatgccttgaatatcttccttttgctatcaactcctgggttttggcttcatctcctgagaacctacattatggccataactcgtagttgcttttcatattcaacttcctgaatctctctggccagccctgatctgctcctccggcgtcttcccactgttttccaggggagattaatcactgggctgggcctcagatcctctgtggtgtttccccaactgaaacattccccctggatgctgtctgagtgctacgttccctcccctctttgcagggaagcactccttggtgggtggtrcccaggccttggcctcctaaagcacttcttgcccccttggtctgcccttgccctctggtgtcatatattttacttagcgtgtcttccagtgtgacccacctccctcactggagggtctgaggctgatgaccagggccatatcacataggtggccatgttttgccacgtasgtgctgggtgtgactgggtgtggaactgcctgctcctggccagagctgtgccagctgggctatgtgcgtgtgggacccgtggccctttctcacctgtcctactctgcctctcctcaggcaggccagactccgctggagactgcccgmtaccacaataacccggaagttgctcttctccttactaaagctccccaggtaggatttactgccctttccatggtactgattatgcgggactacaaagttgttgggactcctggttgcaatctactgaagcctcttcaaactaacttaaatatggaatgtaaccaggcagtrgaggtataggcatgcatgggggcccaggatgacgggagtcaaaggcatcaagtccagctcttcgtgttcatgcctgggccgcctcatcttctccctgtggctggatctttgtcacggccagctgcctaggtcatagtttcccagctactcagccaaggaagaagttccagtttaagacatcgcaggacagggccatgattgcagagtttaggccaaatgcccatccctgaagaagtgggacagggactttaagaagagaagtggcattccccagagaaaggcaggagggaggggacgattctgggcagatagtcgcctgccggagatagttaagtacagtctagttttctttcctcttttactgactaatggtattttgaccatcatttaattttttttaaaatggtggctgatactttagttgaggttgacattatctaagtaacaataaagaaatgtcataataatttataagctatttataattctagccccctgaaacaactgtttttgtttcatccacaaaatagatgaaacagacacataatttttacataattgtgcttacaatgtatatacccttttgtatttcttccttttatcctattataaaacaatgttctgcagtcttcataattattcattataatggaggcataatattatttttgttgctattaatagtttattaagccatttccttaatgttggacatttaggttatttccagattggcactattctgtattacattacagcaaacactgattggctttccatcttattctgcaagaagaagataaagtctcagggagtcaaaggaagattttgaacacaaccctgctgcaaaataacccgacaacagcccagggtttgggatggcctttattttgtttaagtttttaaaacgtgcctaatataactagtagtttctggaaatggttaagatttttgtcttttgcaaaattgatcaccttcttgtgcatggagctggtccttctcagtggtctctggaaggccacagagctcccgacaaaagaaagtcagtaggaaaagctgcggggtttccacctctagcagcttttatcgtaagtggaatcacatccatgaatcctgatagaaaaatgctagtctctcatggatctaaaagtatgaagtgctgtataaacgtcagaacccatcacatttctctggcaatttcagtatgtggtaatttaatggacagccagccccaccctcagccatacaaagatcaagtcttacagggttggagggttccccaggcatagaaagattgacggatctttaatccacctgtcatttgtcttccagagcccaaggatcttcacttaaagggcaaagagccttactgtggaccatttccctgtgcagttcttttttgtttccacttaaaacaaaaaaagacttaagcaggtttctccatgcttacatcgaataacaaataagttggatggcatgctatgaaagtttattttatgcataattgtatatgctgaggctttttctcaacacaaacaaggaactttaggcataagatgttacgcatactgttctcttgatctgtggttacagaaatagcattagtatttgctttgcctgaaaagagaaaatccccttgccttaggcccgtagttggacgtggattttaaatgggccacagcagtactaagaggatactgtttatttatttatttgagacagagtctcgctatgtcactcaggttggagtacagtggtgcaatctcagctcactgcaacctccatctctggggttcaagcgattctcctgcctcagcctcctgagtagctgggattacaggtgcctgccaccacacccagctgatttttgtatttttagtagagacgaggtttcaccatgttggccaggctggtctcgaactcctgacctcagatgatccacccaccttggcctcccaaagtgctgggattacagacgtgagccaccatgcccagccataggatactacttttggaggcctsaaggtcaatattccctcacttctgtggactggaaaagattaatgacatcccatttcgtagatggtctggtttgctgagaaaggctggaagccatgcaaagttattttcactgactaatgatatggtgaatggagggaattttgctgattcttattttgggtttgggtgacctctgagtgtcacttgtcattttgattggtgtggttcacgaacgctctgaaagtacattttaggctgatcctggtgctgtattaagagtccatacatcaggtgagcaatgggtatagtcactgtctttcaccatacttgatttcctggtgaatctgaatttagctttagaaatgactcggggaagtggttctcagacttcttggtctaaggactcttttacatttttaactattacggaccagagattgaaggtttccatcaactcaaagatctgtattctgttaaacaccccctgccaattaagccacctgaaggcaggtagggaagcacctgacagtgactgacagtccactgcatgccagccacctattttttcttggtgaatcccaacgactccccgtttttctttctttttcttttttaaaaataaagacgaggccgggtgcggtggctcatgcctgtaatcccagcactttgggagcccaagatgggcagatcatgaggtcaggagatcaaaaccatcctggctagcacggtgaaaccccgtctctactaaaaatacaaaaacaaaattagccaggcatggtggcgggcgcctgtagtcccagttactcgggaagctgaggcaggagaatggcgtgaacccgggaggcggagcttgcagtgagccgagatcacgccactgcacttcagcctggggcacagagtgagactctgtctcaaaaaaaaataataataaaaaaataaagacaaggtcttgctttgtctgccaggctgctcttaaactcctgccctcaagcagtcctcccactttggcttcccggagtgttgggattataggcatgagccactgcgcctgacccgtttttacatttgagaagacagagcgcagagaggtcaaatcacttgcccagagaccctatagccagtagctactgggttcaaactgagatctgttctgacccacctatgtttttctgtgtccattctgtcactctgcactgtaagaggcagagtaaatgcttccttttggggaagagataactgtcccgtggttggtactatggctcatagatacactttaataatattttgaatcaaattgatgtgacttggacacagtttggccaagggaacatctgctgggctagctcaagtccagtgtaccaagatggagagtgagactgtgcctcacacggggctgctgcgttgcacaactccaggagacgccattcatatcctagtttatgtgaatggcactccctggagcacagtctctgtgcatgtagttggcagtcccggcccagcatcagtgtctgtagttattatcatcatagactttaagcttcttgaggtcagggataatatcctacctgtctccgagtccccgtggtgcccaggacaagacctaggaggatggtaggtggtccagaggtgcttgcttgatgtgaacacctgctctcaccctctaagctgtaaattccattaggtcagagccccaggtccaaggagaattctctcacacagatgctgcgcacaccagtggttgtaacaatgccgtttgcctccttcaggtcttgcgcttcagtcgtgggcgaagcctgaggaaaaagagagagaggctcaaggaagagaggagagcccagtctgtgccaagagatgaggtggcccaaagcaaggtggggggcagtcctcccgccgtccccacatccacccatgctcagagggtgggaaactatctccctgcttcggccaggttcacctggtggctgcccggccctctctgcctctcctccttgctggagctcttcaaactgttgccagtctttttctctttggtttcacatcctccattccccaaggtttcaggccatgtgcctccgtgtgcgctgcccattacccgtccagtacacgtggggggcacacttaccagcccaggtatctgtggcctttgcccatgtcctgcgggtagcactgcctctctaacaccatgcccagattgtgtagggcagtggctctcaaaatgtggtgtccagtgtgtcacctgggaccttattagaaatgataattcttgggcctcacctcaaacccacaggatcagaaactcgggtggggcccagcaatctgtgttggaacaagccctccaggggattctcatggggactaaaatttgagagccactggcacaggccacttccattgagggaggggagcaaggctatgctagcctgtatggctcccttatatgaattagaaaaagatgtcccctgggcagacccactgtgcacagggcacgcatggtgagcagagcccgagctgatttcagctcctcttgccccacacctccacctcagctaggtgctcttgtgccgtgtagccctggaataaaccatgcctttgagttcactcaggagggagaagtctgggatatagagacagcttttggcacagaaaatgttatcaccaagtacttgctcttctatctgctatttcacaatcctctcatcaatttccagggttaaggcattacaactctgattaacttcctagatgtgaattgtacatattcagttgtgaacgttctcacaaggaccagaaatatgatattttttcatttcaaaggattcttactctttgccatgagtgttgtgggttggggtgggggagtggggggtggggggggcgggaggggggctgcatccgaggtcaaagaatgagtgagttatgttttgttgaaatctaaacgatcaaaaatctctaatgctgaggtgttttgtgtcgggtaggttcctggtgttctacaacatcgaattggacccaggaatatatttagcttaggacctaataaatacaataaaagccaaatgttcaaccaaccaggaaaacgttctatgttagttaagaccaccaagcagtgtttcctatgtctgaaatttatgttatttgcaaaggttctcgtgggtcccttaccatatggaatcttgyaaagaawatttgaccatattagtgaaaaaggccaaggaagcaaacacaatgggtctctgggctttttccttctgtagggcagtgtctcagcaggagacacccccagcagtgaacaggctgtggccagaaaagaagaagccagagaagagttcctgtcagcctccccagaacccagagcaaaggatgacaggaggagaaagtcaaggcccaaggtcaggagacacagaaagcagcccagaggggtggctgggaggcagggtggcgagggtcctggcagagcgtcatgcccatcagctaaaaagccactcacttggctggctggtttggagccagagcacagaaattaaatctggctaacatcagacataaggtgaatgtgctgatatatttcttttgacatgtgtggcttggagtaggacaccatgaggtgaaacaaagtggggctctttgcccaaatggggtgacatgggcgccaccgactggtgtcagtcttgcagaggtcaaagcgttcaggggtgttgtctcttcctctcttacaggtgtcagcrttttctgaccccaccccaccagccgaccaacagcctggacaccagaagaacctgcatgctcataatcaccctaaaaagaggaacaggcatcggtgttcatccccacccccaccccatgagttcagggcgtatcagctctacacattgtaccggggcaaggatgggaaagtgatgcaggtacctgcaaagcagtgtcaggagaagggaacrtaggccttcagcaagggtttttgtttaacggcattcctgggggctgataggcactttaggcattgacttagttgagcacaagctttgaaggtaagccagatggcctccccacctgcacggtgcagatccactcctgctgctaaggccaaggcagacagggtgtgtagctgcagagcttgctgcacaatcctcaggtgactaggtatcttgaggccccagggtatataaaagcaccttgaggagagggaccatatcttaccctctgaattttagtgtctgctacacccaaaayttggcctataagatgttccaaagttatgacaaggatgagcctatctcttccatcatctctatcccctggtatactgcctggcacrtggatggtgctcaaaacatacctgatgaaggaatgaacaagggattgattccttttttgtttctctcttaggcaccaataaatggttgtcgatgtgaacctctaatcaacaagctggagaatcagttggaggctactgtggaggagataaaagcagagctgggatcggttcaggacaaaatgaatacaaagctggggcagatggagaataagacccagcaccaagtatgtcataaggcccagcttcctaattgcaaggtgttctggcagaacatgaactcaggaaccaacttcgactttagcacacccttccaccctgggagtgtccagtgggctgtcagggaagaggcctgcttctgcttatgtgattttgttaaagtacatttatttcagctttttaaagaacatgtttaaattgcttattatagaaataagatatccccattacagagcatttttagaaatatgaaaattaggaaaataaatcacctataagcccactgtgctgaaaagcactgttaatatttgggtttaggctgggaatggtggctcacacctgtaatcccagcactttgggaagccaaggcaggcagatcacttgaggtcaggagttcgagaccagcctggccaacatggtgaaaccccgcctcttctaaaaatacaaaaattagcctggtgtggtggcacacacctataatcccagctactcgggaggctgaggcataagaattgcttgaacctgggaggtggaggttgtagtgagcagagatcattccagtgcactccagcctgggtgacagagcaagactctgtctagaaaaaaaaaaaaattagagtttatcttttttgagtttttttatatgtcaatctttttatatgtcaatttttgctacactcctttcccattgcatacaaaattagaataattatgtatttttttcttttcccaactttttattttaaaagttttcaaacatacagaaaagttcacagaataatggagtgaatgcttgtatataatccctgtagtcagccagttaatatgttgctgcatttgccttgtctctctgacacacatgtttttttaactcttgaactatttcagatttagttgcagactgtcctgacagggcatctctaaatatttcagaatgtttagaataagaataacactttcaacttcataacaatattgctttcacacctgagaaaacgttatccagcccatattcagattttctcggttttcgtaaaatagtatttgttacaacttttttttttttttttttttagatggggtctgactctgtcacctagagtgcagtgtggcaatctcagctcactacagcctctgcctcctgggttcaagcgattctcccacctcagtctgctgagtagctgggactaaggcggacgccaccatgcccacctaatttttgtatttttttggtagagacggggtttcaccacgttggctaggctggtgtcaaactcctgggctcaagcgcctcgcctgccttggcctcccaaggtgctgggattttaggtgtgatccaccatgccctgccctttttttaaaaaagtttttgccaaattgattaaggacattttactgtttaagttttatttccttgtttactggtaagatgaaacatttttaaggcttatttgctatctgtattttatagaaaggccattttaaaaatattttcttaggtcaataatagattagtgaagactgttttgtatataaaaaccccacttcgcctagcctaagctgaaagaggaatgagagatgaatgttgggatacctcaagggcctcacttcagttcaagggagtgacagattggggtgtagaatcttagtcctccttccaaatcaccaagaaaggaccgtggcacccttgagtcagatgctcatacccgagccagttagtgtgacctgtgaacaaagcaatgtatacctatggctgctcttgaaaacagccacctggaggaagaggttaagggagtggggagagtaggccaatcctagaaaacaggaggagcacaggtcacaggaaaacatggactgaagagaaaaacagaaggtgctcaccacgtctccagaacggatgtttcttttttcttaatgttttgaacatctgggtgtggaatgccacgtgtgtccctgacaggaggggagctcaccagtgagccttcgcggattggctcttcctaacaatagttcctttcattctttggtccttgtcaaagcagtgaaagtttggccctcctaggtgtrggggtcccacaggaaatgccaagatgaagggtactccagaagggcatgtgattaaaaagtgacaactgcttgttctctgaagcaatcctttaagttccttctacactcttcttacgtactttagctacttccaatgaagcaccaaaaatatttgctcactgcaagagccggataaaagctcattttactgccttgtaggcaaccactaacattttttaaagtggggttggggaagagaaaaatctccatactttgagatgtagttttttcttacagtagtctgggaaataatgttttaaggcctacaaggcctgcatgggctcaggttgtgtatttactggatattcagagtctctctctcttttttttttttttggctcactgcaacctctgccttccaggttcaaatgattctcctgcctcagcctcccaagtagctgggactacaggcatgtgccaccacacccggctaatttttgtatttttagtagagatggggtttcgccatgttggccaggctggtttcaaactcctgacctcaggtggtgggagtatggcgcaccacgcctggcctgtatattcatagtccttatacctcttaaactttaacaaataagattttttaaaaaacgaaacgttggcctcatagaaacatgctcaagaattctgaaagagttccatgagtcctacatgcaaatggaatcagataaggggttgaagtttgcatgcaggggctcctacttggttccccaagcccctctgcaggagctgagaagccagggctcaccctgagatcatctcaktcttacactctgctccacttcactcctagmtgcgtgttttggacaagctgatggttgagcgactttctgcagagaggacggagtgcctgaaccgcctgcaacagcactcagacacagagaagcatgagggggagaaacgacaggtaggaaccagcatctgctagtccttaacttatgatttaccacacaggcccactgagctcaggcaggcctgccactgaaaactcagaggctgagactccctaagagcttttacattatatagtgtatcatttttatgatactgaaatgaggttaatagaaaagaacctgtagttctgtttatgtccgtggctgaatatgctggcaacagatgaagacygaacatgctggggaagatgccatttctgtcctgaactcattccatgtattgtgcattgttaggccattacagttttagaacaagacatagtttctaccctcagggagtttactgtctcaccaagataagagacatggaatgagtacagtgagtgtgtgagaactcaggctttctaagcaaccagaagtacttggtttggaagatttgggtggttttgggggttgagtttaaggtggctctagtcacttaatgaagattgtagatagctctctgcttgggtgcctgctgtggcctataggaaggtggcttaatctgtctgtgttgctataaaggaatacctgaggctgggtaatttgtaaagaagagagttctttggcttatggttctgcaggctgtacaagaagcatgctgccaacatctgcatctggtgagggcctcaggaaattccactcatggtagaaggtaaaggggagctggtatgcacagatcacctagcgagacaagaggcaagagagacaggagggaggtgccaggctgttttaagcaaccaactccttcaaaaactaatagagcggatgggcgcagtggctcacgcctgtaatcccagcactttgggaggcctaggtgggcggatcacgaggtcaggagatcgagaccatccttgctaacatggtgaaaccccacctctactaaggatacaaaaaacttagtcaggcgtggtggtggacacctgtagtcccagctactcgggaggctgaggcaggagaatggcgtgaacccaggaggcagagcttgcagtgagccgacatcgtgccactgcactccagcctgggcgacagagcgagacttccatctcaaaaaamaaacaaacaaacaaaaaaaaaaactaatagagcaagaacttactaaccgtgaggatggtaccaagccagtcatgaggcattcacccccttgacacaaacacctcccatgaggccccacctccaacactggggatcaaatttcaacatgagatttggaggggtcaaatatccaaaccatagcagtgggcaagccataacttttgggtttgttagatggtatcctcaactgttataattgaaaagtccatccttgatgctttaattcataaaccatgtatcaaattcacttgattcttctatgtacttatttgtggggtttgtttttttttttaagatatccttggtggatgaattaaaaacctggtgyatgttaaagattcagaatctggagcagaagctttctggagattctagggcctgcagagctaaatccacaccatctacttgtgagtcctctacaggtaacccacacacagagagcccttttgtccaaaaggaacacgaccagcagctcttgtactctcctgcactgaaaggcagtacgtatgctagggctgtgggaaacactggatggtaaagtgcactctgtaggggcaaggactgtattttgctcgtaaccatatactcagttgctatgtaataataaagcactcatttatgtgctcaaacttatttgaataaaggaattaaagaattgttgactggtgataacattgccttgagtacagtgttgatagtatcagagtggaccccaaagatgagaggtgatgaagatccatcggtctcctcagcagggctcttcctcccttgccttttgtgccttttacctcttccttctctttgatctgccttttacttttgtccaactatgcaaatcctcattaaacagcagttcttacatagaacttgcccccagtgctagataggaaatgctgcaagcaaaccatctttacattagccacagtgattatactcaataatgacaattttgaggacattcagagcctgggtaactaggcctcagtgggggattttgatataagtgctttgtgttaccacaggccatctctggaactgtggtttcatctttgtgtcaacaacatggggaaacatcccaggaaaatgtttcatgctaggactactcttagggcttgtcgtggagctctgggtgtggaaaatggggcctcctttccaaattggagcttgggtcaagcagttagtacactggtagggaataggcccagacattagagaatgggaatacatattctcatagataaatgtccaaatctgctttgagatacttggtgagcggcatcatcyttaggcatcaggaaacaggaccagagccttctcaggtagattgaggcgggctgaaggaaaagccagcaacttttttggcttaaatgggaccagtgtggctaacacagaatccatgaaagctctgacaagccaaagtgatcatcagaggagacaaagtggaagggaggaacagaaaggtgagaaaaggctcagaggagacgttacacatggtgggtggtgatggagaaggctggtgatatacaggatccttaagactctaaaatactgacccgcagccatatgactgtgtgaatgtggatttgctctcacgtttgttttccttctgaaaccaggtgtggaccaattagtggtgactgcaggtccagcarcagcttccgacagctcccctccagtggttaggcccaaagagaaggccctcaactccactgctacccagagactccagcaggagctgtcrtcttctgactgtacaggctcccgactgagaaacgtcaaggtccagacagccttgctacccatgaatgaggcagccagatctgatcagcaggctgggccctgcgtcaacagaggcactcaaactaagaagtctgggaagagtgggccaacaaggcatcgtgcccagcaacyygcagccrgcagcacctgtgggcagccgccaccagccasaggcagcgagcagactggccctcacattcgggacacctcccaagctctggagcttacccagtatttttttgaggctgtttctacccagatggaaaagtggtatgaaaggaagattgaagaagcacgaagccaagccaatcagaaagcccagcaagataargctacattgaaggaacacattaaaagtttagaagaggaacttgccaaactaaggactagggtgcagaaggaaaattagcaccaataaaraggaaatatgaaaggattcttgaagatttccagttttgcaactgcataatagctatgcccaaggagtcaactattgtatatattgcagatttgcctttttaaaaaaatcactaattctacaatgtgccagatacatgtttcctatgcccaggaagttatgaagacttcaacaattaaactgaaaccaggggaagcttgcttagttttgggtttcattataaactcttagcctcagtccaggttaatctgaagtttgaaagctcagattaagcaagccatgccaagaaactggacgatgtgtaagcctagactctaaaattcaagatgtgtgaaataatataagtcaaaagcaagaaaaacgtaatcccgtctgaactcaagtagtcattcatataaatttgaacacacctgctgtgcctagacaagtgtctttctgtaagagctgtaactctgagatgtgctaaataaaccctctttctcaaattcgtaattctccaactgttgacattttaatcacatgaaaagttatcagatttttgaggagaaatattttcatgatgtcacaagatccaatatatcttatgataaaatttattgaaaagtcagtttatttaaataatgaataattggctaacagctctggaaacaatgagatcaaatgagaaagattcaaattgtttgttattttctgtattttcagtcaaaaaatcagttatatagtgattttaaagcagattaatggaaaaaaattcatgtaacaattacctgaaaatttataacctattcctaatcaaacccaattatatcagaatacctttctgaatttgagatttttgctctacattttataatgaataaggctattttttgaargtatttcattttgaattctgtcattaacctcaaaagctttctactgctttgcggtgaaggcaaaatattcgataactcaacttaggccccactgttccccaacttcatggaggccagaagactttactttgttccataatgaaatataaacacagaacaaagttgtaaaagtagcatggatatgttgaaactttggacaagcttcttgtcctttggaatatgggatttatattcatctcctcaatatcccatgtatgcacagaaacttcagttctatttctatagacacaggaacctagtgactattgaacgtaattgtaataaaatgctgctcattgagccaaagagaagaaatgatttattaacatggggacaccaagaaaaacaaagtatgcttttattccctttgtcaagctcagttttagggttttttctttttttkatagtgacaatccatagatatagacattcctaaaagaaaaataaataattcagtagatatatgtcactgttacctgaatatggaatgaatttgatgttttttattttgttgagacagggtcttgctctgtcacccagactggagtgcagtggcatgatcacacctcactgcagccttggcctctcaggctcgtgatcctcctgcctcaacctcscaagtagcttgggactacaggcgtgtgccaccagtcctggctaattttttgtagatataaggtctcatgatattgcccaggctgaatttgatgttatttcaagttgattttcatgtgtttgggagcttgtcttgttctcaactactacgcaggtagacagtcttcccccagagactcattagattgcaatatagaggcactttctcatttccctattgttcctaatacagaattgtagagctggagagtaccttcagttttctaaatctattctcaaacaggatatcactaacctctttagaatcattcctcagtatacatcaatttattgagaactgcctaatactcaagaaattaaatcctgagttcagtaggctgtgttccaagcaggaattattttcacttaccaaaatatctcctattacctcaaggtatccttgttgaggaatgctgaaaactaaattttaagtatcaagtctagaccatagagtgctttggtgggagtattttgattacctcctacccatcagaagcaggcagctaatattgtgaactgagtatttttgtcaaaagtcacagggaagagactacagaagaatgagaagggtcaaaaggacctagtgtggcttactacatggatcttgtctcttggaggtctgtcgtagaagaagaaacaaatagaggtgatgaagacacagaacaggctcagtcagcatcctcacccagagatggcaacatctattaagaccaatgcaataccttttcatcttcagcaaatgttgtttcatctgtttttgatccttggcattgtcaaaaacttaactgcaggtccagtgtatatttttccttatttttcccttttagctatctgctaaagtgagtaaatgccacaactgtacttttccaaagaaaaagaactattgacaacttatagcctgtcatgcaggtcatgtttcaaatcaaggctgaaattttcaacagctgtgggaaaaactaaaacacagaaatactgtacagtattagtgtttttttaaagaaattgttagtgcattattgagtatactaaatatctgtgattaaataaattagttctaacttttgattttgggagcccaaaataaagggagtgttgttttcatggttatgccttgtttgtggagtcaagtgttgatatacttgaggcatgttatgtgtcttctaattaatatttttatcaccttgaatttgtgtctcttccaagcattaaagatactatggatcttaaattccttattaaaaaaatgcaagtgtgaatactttgtttagcttacattttaatttattgtggttgaccacattttatggctcctgagtgccttcacccagctacactttaccttgtatctataaaagtgtaatttagagtaaatacattggctgtaaagtcgmgatcaggtgctctccaccaaaagcaaaacaaaactgctgaaatgtggcaaggtttctcagtgcaagcttaaatgtttaaactgttgaccatttggaaaatactggacaaaggggaaggacaaaacatcatttgcaatagttaaaggttatgcaaggcaaggcaacattatactttttgactaagttattaaaagttaaatgcatttcttctttgaagtgtggattataaaagccaatcaaagacaaaaccagtttgaaaaaccttttgtattctacaataccttttatgagtaagagtaaaacatacatttcttatttgtaattttatttaaggagaaatactctttccctttgatacgactataatattataaacagcaaggaatatgttctgctttctgcaattttagaaagtcattccattctgggtgacagaatgaggtaagactgtctctttaaaaaaaaaaamaactcacacctgtaatcctagcactctggccaccgaggcaggtggatygcttgagcccaggagttygagactagcctggcaacaaagtgagattccccctcctctctctgaaaagtaaaaaaaattagccggtcatggtggcayatgcctgtggtcccagctaaatgaaaatctgaagcaggtggatctcttgagcccaggagctcaaggttgcagtgagccatgttcgcgccaccacactccagcttgtgcaacagagaccctgtctcaaaaaaaagtcatctgtgtgtttcttgcaggcacatctatggcaatgcttgtaccatgaatttaaaacttctaacttgatggcacttttttattttttttgagacaagagtctcactctttcgcccaggctgtagtgcagtagtgtgttctcggctcactgcagcctctgcctcccgggttcaatatgaggcagccctcctgagtagctggaattacaggcacgtgccaccaggttaggctagctagtggcctagctagtctcgaaatcctgacctaaagtgatccacccacctcagcctcccaaagtgtgtggattacttgtgtaakccacagtgcccggccttacctgctttaaaaaaacaaaaaaacttaggttttcttggagtctgtgctagttgaatcttgcaaatgcaaaccacatacgctctttaatgaaaacctttscatgcacaccactgttaggaagagcatcattaaatcactgacttctacacccataaaaggatgattttgagtttcaagattttagatttactagagatagcatgtatctatcaatcatgtcacacaaaaaatatttccaaagtgttctctgttcagaaacgtcacaaatgcttctgtttgtcagatcattttgcaacaggttaactaatacttatctacataaaaacctgaaaattggcacaggcaggcattttgaattagtagattacccccatggaacagtattcagaattattttgtcttgtgggctctgaggctctgggaggtagaggtggaccctgacagtccaggtcattaacatccacattcagttgatgcctctcagacacagtccagtactggataccatttatcattctgcaaaatgttgtctacatctttcaggtgctggtcattcttagattagcttcttagctgttctgttgataaacagaagacttcaattttcaggatggatgattccaacatcttccacaagctttcactttcactaaattattttgttataaatttgatctccttcaaaagtgccttgaagtcaattttggttgtaatgtatttgtctctgacgtattcttcaaattctctttgttttttttcctgtcaytggagaactgcacccagaatcttatttttactacttccatgtgaatgttaaggtactcacagaggtttcatccagaagtcttccctcttctttctggtaagtgcttcaatgtgctcattaagcttctctttctcttcccttttcaacaaagatctagattcccagtggtgatctttttgatgagttctctatcaaactatgacacatctgaagaacgtacctgaacaaccctcagggataatgcaggatttttcgagaaagttccagggtatctcctggtgtcagtatactttcagtcctacacctcaagagttttttaataacagctttattgagatacaattcataccttacatttaaaatgtacagttcagtggatttgaatatattcaagagttgtgcagcctacaccacaagctaactgtaggatattttcatcaccctgaaaaggaaccctacacccattagcagttactccattycatctacagccagcctaggcaaccactaatctttctgcctattctggacatttcgtatgaatggaatcatcatgtgatcttttgtgaccggcttctttcacttaacgttttcaaggtttatccatgtttagtatatataagtccttcgtttctttttagtgccaaataatggctatgggcatggggtagaagtgctaactcatacagcagctgtttcatcttttgaggaactgaccgtctgttttctgaagtggctacaccattttacattcccaccagcaatgtatgagggttctgtaatttctgtacatcttcaccaagacttattattatttctctttttaattacagccattctagtgaatgtgaatctcagggttgttttttttttttttttttagagactgtctcactctgtcacccaggctgaagtgcagtggcacgacctcagctcactgcaacctccacttcctgggttcaagtgattctcctgcctcagcctcccaagtagctgggactacaggcaatgcaccaccacaccaagctaatttttgtatttttagtagagatgaggtttcaccatgytggccaggctggtcttgaactcctgacctcaagtgatccacctaccacagcctcctaaagtactgggattacaagcatgagccactacacccgacctcatagtagttttgatttacacttccctaatgattgtgtccagcatctactggccatttgttagtggtttttttcttcttttaagaactgctgagacatccataaacattttcaaaatgcagggtatgtttttcagtgttaaggcaactgttctgatgtgtttttcctttgctctctatcaccaaatactgtacatataaatagtaagactgggctttgtgttgtccattgttaatcctaaatgcaacaaaacacatggagactttgaaaatycttcagaataatgctatagttaagattttgctaaagcaagtgttttttctaactccttgagctgcatattgccttgagtaatcatcatccggattgtatcctgtagaataaagtgaaatctggttatagttttacctggttaaacaaggtatagctataccattttatctgttaaaatcaagaaccaatactacctattggaactgctgccttttagaaaagctaaaagagttccacatacatacatataaaatgtacaacataaaagtcaagtgatgatgctgaagagtgtagatactcttttatctacatattttaaaatactamattttaaaataataatttaaaatcggtaacattacaagcaatgrtcaagatataccagctcagtggcactatattccaagatgtctgctaaacttaaaaaaaaaaattcactgatcaataaaaagggttaggatctgtcctcaccatgattttgttctcacctcttcggkggcacttttgtttcttctgaattcttctcttgcccaatcttycaggtatttgcgatcagaatcatttggaacttgccgaattgtttgcaaaatccttctgtagaggagaagaacttgttgccttcttacgaactgtaaaagggaggagtaaatagcaattactactgcacaatcgccagcctggaaagttctacttcagcaaaccaagctgtaaccagagtacttctcgttggtcaattttgaaaaaggcaaagaaaaacttttttttttctttttttggccagatgcagtggctcaggcctgtaatcccagcactttgggaggccaagatgggaggatcacttgagcccaggaggtctaagctgaggtaagccttcattgcgctactgcactcagcctgggcgagagtgaggccctgtctcaaaaagatgttttaaagaaagcatcacgaggttcatctgatctttttgcttactgctctgtcaaacctaagaaccattaaaaaatcaggagctgcctaccgggctgaaaagggctgccggtctcctagaagttgttattacaacgacagcactttttctaaattaacagttgttcaaatctttggtaatctcatttgctgtttgccacagctcagtgcaatagacttttaccgtgggcactgggcagctgaggcaccgggactcagggaaatcaagcgcctgacgctgtctcacgcgatcgcaccaaaccaaggaagcagccagtgcctcccgtcaggccccgcggagcgaagcaccgccccgcaggcatcgggccaatctcagagggcgcgcacgccgcatcaggaccccggaacccgccccgttggggatagggacagatggagaatccagctcagacccaggtaagctgctttggaaggcagagaaccgccggtacctgctttaacgttagcgtcgctgggggtaagcgggaagcagccatrtccaccagaggtccgccggagcctcagcgcgcaggagcggaagtggggttcgaccaaggggtgtggcgagcccggtttcctargagacggcccgcgggttgctctcggactgagagcgcgaggcttcgggactgagccctagctgctgcgctggccgaagttttctcgtcggtaaaataggataacagtgcaccatagggtcgttttgataaagaagaaaggtagggcacttaacacagttcctggtaaagagagttcaaatgaaagtgaaggaggccgggcgyggtggctctcacctgcagtcccaagcactctgggaggcctgtaaggtgcctgtaatcccagctcctcgggatgctgaggcaggagaatcgcttgaacccgagaagtgaaggttgcagtgatccgagatcgcaccactgcactccatcctgggcgacagagcgagaccctgtctcgaaaaaaaagttaaggtttttttgggggaaagaggtgaaaacgtatttaaatgttctttcgagcctttaaaaatgtgtatagttgaaaatactaaaattgaaagtgttaatttcttttacagtttgtgttggttttttctctttctcgtttttgtcctgttcttttgtagcgcaaaggttttccgggagcggtggccttcatgatcatttgaaacaaagctttgaatggctcacccacttcagtcttaagcacttttcatcactaataacgaggagcctaacatccctaagcctcaggcttttgcttttatktccttatagttgttttatctttcccacaatacacatgcctttgggttaaatcactagaagtggagttagcgaatctttgccatattaattttccaagtggtgttgtatcgaattaaaatagaacgaaaaatgttcaattactagtttactggggacttgcttgcctcgcctgttagcatcctggggctccctattcctagctgtgttctggctatttcccctctcctggcctattacctcccctgtaaagtgaaatatagcatctacctcagttgtgtatctctaatgtactgagaacaggtcctggcacatgtaagaactctaatcattagctcttttgaactttaccaggcattgtatgaatgatgctaactgcatgatcatattatcaataatatatgccaaattttgtctaatacattagctgtaatagttaattgctaactttttaaaaggagtgaagttaaatacccctcgccatttttagttatactgtttttgtgaattgttcatgacttgggtccgtttatgatgaggacatttatatgggctctatattttttgtcatttctttatacatacagaaactttatacaatcatgtatttttgtgccttttgaggcttttcatttcccattcaggcctttgtaattcgttttttaaaaactttaatttttaaaatatttactccatctagaatttactttggtttacagcatcacgtggatctaagttcttttctagatgttaagctgtatcaataccattgattacataactcattcctttttcggggctttatgatggatgcctttttgactgtatgataaattcttttagggtctgagtaatctgtccagaattgtttcatttagggttaagtttttactttttgttttatatgtttttattatctggcaggactctagtttcttgtaaaaaatccattagtactgttctctataatctttagaaatgttttgtatcatttccctccaaatcatcttgtgatcttsgttggaattttgaagtagtgttgaatctatacattaatatgtgagaaagacatttttacattatttcttcttcccatcaagaaacactcaggccaggtgcggtggctcatgcctataatcccaacactttgggataccgaggtggatcacctgaggtcaggagttcgagaccagcctggccaacatggtgaaacctcgtctctactaaaatacaaaaaattagccgggcctggtggcgcacgcctgtggtcccagctacttgggaggctcaggcaggagaatcgcttgaacctgggagacggag

SEQ ID NO: 10014 - DNA, 96902 bp, Homo sapiens
  misc_feature (34183)..(34202): n is a, c, g, or t
ctggtctcaaactcctgacctcgtgatccacccacctcagcctcccaaagtgctgggattataggcgtgagccaccgcgcccagcccatcatatctttcattgacaaaaaatgagataattgacttcagtttgggacccacatagttgttcttcaattcatttgccaagtgctgaaagttgaatttgcctaagttaaatgtaggatgcagctctttaaacttcagatcaatgatcaatgatctgtctacctcgatagatagaaccccaaaacaatattaaaaaaggaagacagaaatcagaaattttctaaatttaaaaactgaaaattaattctttggtattatttaaggctcataataaacctggtatttctttctccaagagttattggttgggaattttcattatattccttcacggagctctattttttaaaaagtcacatgtctaggtcctaccctagagtgaactagttagtttctggggatagatcctggacatctgtacatcttttaagttccacaggttatgttgtttatccctcattaacatccactgttctactacatttaaaagataactacaatttctagtgtagcaattcttcctaaacattatatataaggtatttaactaacacctattatacaatgctgcatcggtacagatctgctcctatactataggaacctaataaaagctttacacaacagacctataaagcgaaaagataaataaagcctgtatatctgtaagttcctttatgttcttccacctacactgtcatattattgaccacatttccccaaggagacatgtcataaaaaatattttatcttttacatttatatttgttcgtttgacaggatctaacacttaataaaaacttaatttactgaaaaaacttttcaaaatatctgctgcaaaggactgctggacgttgtttaattacttgaatagacaggggctctgatatttcatttggtgatgacttacttttgaacaaaggaaattagtcacgacacttgggaagctattacacggaactgagtttttttaaaaaaaagaggagtagggtgctctacttccttttaccaaccaaggaagaattccctaaatctctacttctatgtgtgcaataaagattatatgatgtatatgatgatacatgtcctctcactcaatttctaggtataatgtcatcatcaataaaaaattattttcaaaataatgcaaattcctatactacataatttcagttagctgttcaatcatcatagttaattttgtctgagtttttttaggcagaaaataactgaaaaacccttcaaatcctagtgagaaacctagttgtaaatgtctattaaatcaaaccctccatttagtaagtcaagtcttaagagaaagtatgaatgccttaggcctcttcccaacggcccatcttactcagtacgactgtcaagttgattttatttctgtaaccattatcaaaacatcctacctctgggatttttcaaagaattttttaaaaattagttttggcagcctggcatagtggctcatgcctgtaatcccagcaccttgggagggcaaggtgggaggattgcttgagctcaggaattggagaccagcctgggcaacacagtaagactccgtctccatgaaaacaaaaaaaatagtttcgtaaaatgaagagttcttgagattggatgtaccatgtgaatgtacttaacacttctgaactatacacttaaaaatgagtaagacggtaaatttatcttaygtgstattttaccacagttggaagaaaacttcatctctcatcaaattaatcttttactttccgtatcttagaaccttgtcagaagctttagggtcatttaaatatcatttttaaaaaatccctggtaccaattttactctttttaaaaaatgcgttttgtacacaaatctgcttccaagagatataaattcctgttctagtgtcacagaaattcaattaactacgtatgtgctggagttgattcccaataaatatagcaaagtcctattacgtacataaaaccctcaacgcatactcactgaattcaattaataactgtgaacttgggcttgccattgttagttaactgtgtattgaaggaagtcacagacataactcagggagctggctaacctaattgtgggccttgtacagacctggctgcctcactttccttccttataaatgggggagttgaacaggcctctaaagcccataggaatctgagatgataacttctgagacactcatttcagaagaacctcatgtactgtggcctctgtctcctgcgttgatgttttttcagttcacctttgtctgtgttcagcataagacacaagctccagaagggcaggcactttgtctcattcactgatgtatcccagtgctaacaacagggcctgggaataatcacagctgccacatacacatactctttaatatgtctccataacagaaaatttcttctttaaaaataatcacattcaaaaatgtacatccattttaatgtagaataatattttgaaaagttagcaggaatcaatttcaatacgattattgaaaaattccttaattattaataggaacaagtgttcaactaagtcactggtagagcaatatccaaaatccttcattatttttttttcatggctctattttggaagaaacacaactcaaaaaataataagccattatattatggtctactccaatgtgaaataagtgcatgacatttggcaataaatctagcacctttggatcttaatactgcatcaacagtcagacccaaagcttcttagagcaaagcagcaaatcttttatttacacagctgtttggctccagggaaatataaggtaagaaagtaaagcactagtaccattttactaactattacaaacatactcgtcatctgttacacacagatggctgtggttcacgtgtacactctctggctactggaccagccaaaacgcaaagcacagacaatgaagacagtgacctgtacatgttcaaaaggacacaaaatatatacctatatatacctataattctctctccttttttctttttttttttttttttttgagawggagtcttgctctgtcacccaggctagagtgcagtggctcgatctcggctcaccacaacctccgcctcgctggctcaagcaattttcatatcagcctcccgaatagctgggactacaggcgcaccccaccacacctggctaatttttgtatttttagtagagacagggttttgccatgttggccaggctggtctcaaactcctgacctcaagtgatccacccgccttggcctcccaaagtgatggaattacaggcttgagccactgcgcccagcctctcctttttcatatacagcttaaaataattctgaaatctccactaagggcagattattttatagatgtagaaaaacaaagcaagcttttctgctggatacatataacctagatgttctacaacattccttttattttcttaaattaaaccaacccttccaaataccacagattagattcaaaagcaaaaatcccctcccttaacttcaagtaactttcctaaacgtttcaatgaatttgactattgttcccaaaaagcmccataatcagcttgtaagaactatgtatacatataagaatgggtagaaataaaaccccagttctcttccatattccccayctagacaccagaaagaattatgataaatycaacagatgggtgagcaaaaaagtagttgatgmttctcagccagcaatgctaaaaaccaaccaactcggctagacacaggaagtgtcccactttaaacaccacaaaaatttctgtggatttctttaattgtaaagttgataaaatacaaaaatagcttgcattattttaggataattcaaatgcaagaatcatgaacttccagtctgggccctagaaattgggtttacataaatgtgaaattacatgcttctgtgcctgttccttataaactgttaagactggaattgaaaactgatacatataagacacggttattttaaatacatttgacacctccaaaaaggaaagagctaaaactggctggaaggattttaaaatttccaacyacttttaatttaaatcaatttcttgaacgaaggtaaggcacagaaatgtaggatgaaaataatttaccttatgtaagtataaagcctccctttggcaaagaaaagagagtttataaagatatctcatataagtgcatataacatcaaaaaggaaagacccacacaacacccacttcttgctttcttttcctattggctaacttcttgtttcgtttgttgtaatctgatcacagggagcaatgcaacactacaatatatctaggctttagaaataatacaaatcagaacatttgagtgctgttggacagtttcaagttgcaagaattttaaacaaatgccaagaaaagcaatgaaaatttaatytgatacttaagtgctgattctggaagtaaccttgagaagaagctttaaactatttcactataaaatttctaatgaaagtttcaacgtggacaaaaacgtaaaataacccataacactctacttaatacataagttctggtttaaaaattaacctatgtacttacraagtgaacgtaacaccactttggtaattattttgtaaaacagaaattgttccttaagaatgttcagaaacacaacgtctagaattgctgaaaatccacacaaagatagaggctttgtcatttggatgaaggggaaagaactatgggaggcagacagaaaataaagctttgtttaccctaatcaggtagaaacaaacaaaataattgtaattgggtgcagacaagcaaaaaaaaaaaaaaaaaaacctcaacaatctcaactcctctgcttctcaggtaacagaggtaaaaccaccaggacatgacaatgtctacgcctctttaaaatgggtaaaaggtttaccagcagatacaaggttgaaagcgactcacttagtggccaaattgaacacgctgagaacactgcctttacctataataactgatctattaacttgggaatctacactattttcacatgcaaaggcgaagtcctcgcactgctggagagatgagcgaacgcccttcacacatcgcatttcacctggtgcagagcccccagcacagtcccccttggaagggagatcccgagaaatcccgggtttccaaacagcccctctgggcaggaaaagacgagaaagccggcagcgaatcccattagctccgcgcttgccgaggtgctcggcaaaggtacggggcacacaactcgcccaccccggcgaagaaagttgctcgcgagcccaagcctagcagcgctcgccacaaactttcccgcggcagcgcgagcgccgtcacttaccggctgcagaagtcatgattccccggtgcagctcgcttccccgctcggcccctcaatccatcttcccctttcagtccattgttcccacagttcgggtaggagagaaaagcccccgcagcgcccacattccgtcccgccgcyccgcggcgmagcctgagcgccacacaaaggacgcggccgactcyagcgaccctgcggcgctcccgggcgcgagccgccggggtcgggcgggcgagcactagcaccgccccgcagagcggcaggctgacagccaggcgcgggcacgagcagtgctctcttcggctccgctggcgcgtgcccttctcgggctccaaaaatcagcagtgctccgggcgccccctgctagtcgcggccgtaaaaggcagacaaaagccctagcctcctccaatcggagggctcgagcttcagctcgctcccgcctctctcgcttacacgctcactctcttctccaataagcgggctcgaaaagggggcgtgagcggcgaggcatattgggaattgtagttttctggacccacgggacgggcaggagctggagctccgtgccgcctgtactcccgccttcatttcccatcgtgctgaggcgggtggcatggcggagaaggatgacaccggagtttgacgaagaggtggtttttgaggtaagaggaaaatggcggtgggtgtggattgcctttgtttgagaaggacgagacggaaatcgaggaagcaaggcgttcccggggcgagggatcgggtgacgcgctccagctggcctcgaccaccgaaccccagcgatttcagggcctagagtccgtcgtcgcctgacaggtgtagccagaggcgccctggccgtggccggcctctatctcgggcccgcccagaattcccagacggtgcccggttgccaggctctgggctggagcggtgtctcttccttcctgggaatggatgtgcggcggggggggactgcgcccggctggggcggggccgaatcgtgccttttagatagtcacaacttagcctcctccttttccatccgcgatttttttgggtcagtatccagagtgcttcaggtcactgttcaccgtcaaggcgtggccctcggaatgaaggcagcaggtgcccgttttctaacacggtttaaagtctatttgtgggacctactgtgggtagttagggccagggcatctcagcatctagattcgattcttttgtcctttgctgttgcgctaggtgtagccagttcttctgactcggggctctagatgtgagtgcttttgtgtgggactattttaagacgttctctgccatcttgaatgaaaaaaatcgggcgagtgtttttgatgccatttttttccatcagacacaggtcaaaactcgcacccctgtacgtatgtgtattgcatgtatacgctttrctttcatttatccaactagattttaagaaaatttaaaaatgaagtggcccatgccatacagcgagagagcgaggcacagacaggacagaatgmtaaatgttgaaatatgtacaaactgtcattgaaggattaatttctgttcttgcggcctcccagaggctacacccagtacgcgatatccgaggtgaatctttaactatgaattggattagaaaaaccggcaggagaaaatgtattacagggaaagagaactgattatgccaagcttgggaagtgtgaaagtacctggtgtgcatttttagggggcggggtgtggagggtggctatgtaaagtggcttgatgtggctgcaatgaagaagcagtggaaaatgtggccattttaccgaagtgaagagtctagatatgaggcgttcattagggaagacaagggcctgagatgaaatgagagacgtaatggaataatggcttggacagacacttgtaagttaaaatcgaggcaatgtttatagattgaatgtggtagctgaaggagagagaaatattttctagagtaagggtaactgatgggtgtattttttttacccattatttttgatttctgaatataatagtaatatatgctcaaggaacattttattgtagaaaataagcccccaagttaaaatcatccattatcccaccacccaaagatggtaactattaacagtacggtatgtgttcttatagactttatttctatgtaaatgtgtgtttatgtgtgtgtrattttttagcctctatattaagacacaatgtgtgtgtgatattttttaaaacaaaaggtataccacgtagaattttgtatatatttttcacttgactttatcgtgaatcttttcccattcatcattctctgaaaacattaatattataatatcccctcacgtgtatcataatataacctttttttaaaaaaataccattgtaatcaacagtgatataagcctatttttaactacaactctgattttcctcagaataatttttagaagtagaactagtgggtgaaagaatatgaacatttaagacttacgcagaaaggttataccaattccggtttccattaagaataagagagtattggtttcaccaaatcctcaacaacagccttaacagtttcctttaatctttgctaatttgataggcaaaaataacattccattgttttaatttacattttatgcatttatacatttattagctatttttatttctttgaacatttctcttcatatttgttgctcattttcttattagatgctagctttaaaaaaattgacttgcgtgagttcttcatatattactaagcctttgtcatacttgcagaaaaatttccagtttgctgtttgtttgctctttgatatacacaatttttattgcagtataatttacataaggacagggcacagatcacaagtgtgtggatggttatattttcacatgttgagcacacccatgtaaccagcacccagatcaagaaacgggacagatggggcatggtggctcacacctgtaatctcagcactttgggaggctgaggcagatggatcccttgaacccaggagtttgagattagcctggacaacatggtgaaaccctatctctacaaaaaagacaaaaattatttgggcgtggtggcacatgcctatagtcccagctactcgggaggctgaggtgggagaatcacttgagcctgggtaggtcaaggctgcagtgagccatgatcgcaccgctgtactccagcctggatgacagagccagactctgcmccaaaaaaataaaaaatgaaaaaagaawcaacatcaccagcacaccagaagctccctcctggtcctttccatcactactccctaccccaaaatgatcactatttaaacataataacctagattaattttgtctatttttattgtttagacactgtgcatttccatttatatactctcttatttctgacttttttttttcctctctggctttatttgtgagattcgtccatattgttaacatgagaatttttattttggcatagtattccatgtgaatatatgatcatttttaaattcattcttctattaatggtcattgagtagttcccaggtttaaactagtgctactgtgaacctttttgtatgtgtttggttaaacatatttctggtggatatatatgtaggaatggaattgctgggtcatagcaaatacctagatatttctgtagatattgccaaactttattccaaagtggttgtaccagtttattctccagccaggaatgtatgagaggtcccattgccccacatcctcatcaacccttgctaattttagtgtttttctttttatgattctaggggctatgtcctggtatctccttgtggttttaatttgtattttcttgataaagatgttaagatttttaatgtgtttattagccaattgtatatccattttgtgaagccacgtcaaatttcttgcatatttttctattgggttgtytctttttcttgctgatttgaaggaattatttacatacactggatacaagkcctttgttagagatgcagttggccctccttagctgagagttccacatctgcagattggaccaaccgtggctcacgcctataatcctagcactttggaaagctaagccaggcagatcacttgaggctaggagtttgagaccagcctggccaacatggcgaaacccagtctctactaaaaaatacaaaaactagctgggcatggtggcatgcacctgtagtcccagctactccagaggctgaggcatgagaatcgcttgaacccaggaggcggaggttgctctgrgtgacagagtaagattccatctcaaaaaaaaaaaaataaaggaaatactctggcccagtgaggtggctcatgcctgtaatcccagcactttgggaggctaaggtaggaatattgcttgaagccaggagtttaagaccagcctggtcaacattaacaaaaccctgcatattaaaaaaaaaaaagaaaaaaattaaccaggtgtggtgatgcatgtctgtaatgccagctactccacagcctgaggcagaagattgcttgagcccaggaatttgaggctgcagtgagctacaattccagcctgggtgacagagtgagaccatatctctaaataaataaataaatactcaaaatattcaaaaaataatacaaataaaaaaactatacaggataacaactatttacatagtgttcacattgtattaggtattacaaataatctagagatgatttaaaatatgtgggagactgtgtgtatgttatatgcaaatactatgccattttatataagggacttgagcatccatggactgggtatttgccctagtcctgtgaccaattccccatgaataaagagacaactgtatatacctcatatatcttaccttgggctatatgtggcctctgcactcttttaatcgtgtctttcaatgaacagaagctccttattataatccaattaaaccttattcttttgtgattagtgctgttaaaaaaatatttgcctactctaaggtcacaaagatattttctttaaaagctttatttgacattttcccatttagatctgtcatccatctgktactgatttttgtatggtaacaagtgaagatcaacayttttttttccccgtatggatgtccagttgacctggcaccatttactgaacagatcattttttccccactgaactgtagtgttgcctttgtcataaatcagggaatcttttatgtgtagatctctttctggacactgtcttctttgccattgatcattttgtctattcgtgtgttaataccacattattttaattactataatttaaaaaataggttttaatatctgatagcataagacccttcagctgtatttttcttcaggattgcctttggctattcttggcccattatatttccatataaattttagaatcagcctgtcagtttttgtaaaaaaataaaaaataaaaataaaaaaaccctactgagactttgattgaaattgctttgaagctataaattaatctggggaaacttaacatctttacaatcaatattgaatcttccaatccgtgaacatttattgcttgccttctaaatgaatcargcaacttctcatctcgttctgtgctctaggactgattttacaaaatgagaattatctgtttcttcagagtatagctaaattggcctttcctggggaaaagagactgaatgttgtctatcagctcaatttcttttatggttattgctcaggtacaattttctattttgataacttttttattctgaaaggcagtgtaatatagttaaagatatgggctctggagctggataacctaagaaatcctaggtcagctatttattakttatattagttaatgtgactttgagcaggttacttaacttgtctaagcttcagttttctccatattaaataaaaataacagtaactatctcgtaaggtagttatgagtactaaatgatttaatataagtgaattacttagatgagtacctgacacattgtaaacactcagtaaatgttaccttttattaaatttttccaacaaattgctttttatctaggttttcaaaattattgatatattcttagtagtctctttagtttcatttatagcacaaattagatctgattgttgttatgtttttctttttgttttgcatagatgtgctggagtttcaacttaccagatagacttttcttttttttgagacagagttccactctgttagccttgtcgcccaggctggagtgcaatggcaggatcttggcttgctgcaacctctgcctcctgggttcaagcaattctcctgcctcagcctcccgagtagctgggattacaggcacccatcaccatgcccagctaatttttgtatttctagtagagatggggtttcaccatgttggccaggctggtcttgaactcctgacctcgggtgatccacccacctcggcctaccaaagtgctgggattacagatgtgagccaccgtgcctggcctcaggtagacttttcaaaaaactagttggttttgtttggtcagttctattgaatttgtttgtggttttaaatttttttaaaatttctacttttatctatttccattcatctatttgtgtttattttgctatttttgttctgttttttttagcttcttgagttaaaaacctaaatgcccaaaataacttgtaaggctataaatttccctgagtattgcttcagttgtatcacraaagttttgaaatgtagtttgtctcatggttgtataagttccatttttatttcttatttaatacccaagtrtatagttgagggattgatgttatcattggtgattatttttctccctgtgtccctcagacccataattccaccctgatcattatggactgcatcactgcattcccttgtcctctgggttccatttaggttcggccagtgggaaggacctgcagatcagaggatggaggaaagagcgccagagaggtttgggtgtttcttgtctgaattctttccctctacggctactatttgttagtgattgcattcctgtacctaaagccacaactttttttttttttgacagggtcttgcactgttgcctaggctggaatgcagtgttaaccatcataactcactgcagcctccaactcctggctcaggtgatcctaccacttcagcctctcaagtagctgggactacaggcaggtgccaccatgtccagctaacctgtaactcttatcacgggattcttcttgggaaaggctaggagcagccatcttatttcctgtgtttgggctttaccacctatgagacctgtaaccccctctacccctattaccactttcattcaacttagatctcaggccactgactgagaaaggccttcttttgaagagctgaaagcttgtaaggcatgttttcttgccatctaccacttgattactcagccagtggaacatatttcaggttctgctgagtcagccctacttctagatactaagtactgtgtcacccatacatcctaatgcacagtgactggtttttggcaccagggacttgtttcgtggaagacagtttttccagatggaggatggtttcaggatgaaactgttccacctgagatcatcaggcattagttagattctcataaggagctcacaacctagatctctcacatgcacatttcacaatagggttcctgctcctatgagaatctaatgctgccactgatctgacaggaggyggagctctgatagtaacgcttgctcacccactggcccaccatcctgctggcctcgggctgtattcctaacaggccatggaccggtaccagtgctgtgcaggcctgggggttgaggacccctgttaatgcagtaaacaggaacctgtctatgtgccataagcagaaaggaatttaacatagggaattaatggttagattatcatcggaaggcctacaggatcaagctctatcaaagttgctatatgctcatgaagacaagagcacgtgatcatgatcatagttacaatccaggaattagaagccatcaccactttgggagtccgaggcgggcggatcaccaggtcaggagattgagaccttcctggctaatgctgtgaaaccccatctctagtaaaaatacaaaaagaaattagccgggcttggtggcgggcgcctgtagtcccagctactcgggaggctgaggcaggagaatggcgtaaacccaggaggctgagcttgcagtgagccaagatcgcgccactgcactccagcgtgggcgatagagcaagactctgtctcaaacaaaacaaaacaaaacaaaacaaaacaaaagccatcaccacatctgcctctcaataacctaacaaagtgataccttggtattggaacttggagtctctccactgtctctaccacacctgcagctgtgttatcaagaagctggagaatccatattggaatactgctatagaaacattttgcctccmcagctttgtttcatagcmaaaaaaaaaaaaaaaaaaaaaaaaaaaaaaagagagagaaggatggagggaagagaaggaatgagagaacagacaaatgaaagaacaaggccagcagtggggggatcacttgaggccagcagtttgagaccagcttgggcaatatagagagaccttgtttctacaaaaaattattttaaagaattagctgggcatggtggcatgcatctctagccctagctactcaggaggctgacgcaggaggattgcttaaacccaggagttcaaggctgtgatgagctttgatgaggccactgcactctgccttggtgacagattgagactttgcctttatttaaaaaaaaaaaaaaaaaagaacagttgaaacaaaagccaaagaagcaaaaagtggacttctgctcttcttccaccttccaaatctcttacaccatacacctacttggggaaaccctgatttatatctagaatcctagctgcaagataatttgggaaatttcagatgtagctttcctgcctctgtaacacaagagatacattggaagaaggattatagaatagagattgaacaagccaagccaatttaccatatctatcttagggctgaacctctcttcccctaagaaaatttaactgtgatttttttttttttggtatatttgttgtaatactgttattttaatgatcttcagatagaaatcagagtcattcatgtattgagacttacctagagaattacatgctgcatgaaagttaaaaacttaaatcatgcagagttttggataatattccaacaacatcccttcccttaaaacaaactctttgaggtatcttgttttaatttctgtttcttggattatttgtaaattttactgtactatattttgggtcatttgtatttctccttccagtgatcactttgagtcctcttagtctgagaggactagatgtgcactgaaagatgataatataagagaaggactaagggaggaaagaaagagtgaagtgcccaggcccaattcccatttcttgccctagaatctgattacccattttatcagagctagattccgtatgtactttcaatgttaattccattatattggagcctgactcctcctcctataagatcatttgttttaattagaatcttctaccatcattctactctaagaggctgaattgagaaggacagtataacctcagtcttggacctctcaggctaaacagcaacagaacaaagtttagaaaatgatggatactatgtctaatgtgaatattaacaaaataagcatgaaataccaagattgttgttttactctgttatcgtcatcattaattacagtgttttgagagtaagaattctccaattactttagaaaggtattaaagttctgatgttgctttcttaactgttttttagacagggtctcactctgtcaccaggctggcctccaatagaacaatcactgttcactgcagcctccacttcccaggctcaggtgattatctcatctcagcctcccaagtagctgggactacaggcatgtgccatcaygccctactaattttttcttttttttttttttttgagatggaattttgttttgctcttgtcgcccaggctggagtgcaatggcgtgatctcgggtcactgcaacctccacctcccgggttcaagcgattctcctgcctcagcctcccaagtagctgggattacaggtgcatgccaccacaccctgctaatttttgtatttttagtagagatggggtttcgccatgttggccaggcttgtctcgaactcctgacctcaggtgatccatccgcctcggcttcccaaagtgctgggattataggcatgagccaccatgcccggccaattttttgtattttttgcagagagtgggttttgacatgttgcccaggttcaagtgattgttctgcctcggcctcccaaagtgctgggattacagacatgaacgactgcaccgggccttaaattttaattgcagaaacttcaggtcatctgtcttaaaccttgctattcctagagggaagagtgcctggaaataagactttttaaatctgaaagactaatttttctgcctctttgcatcatttgaagttcatttaaaccattcctttgtaactttcttctagtagggacaatgttgtattaaagggatcttttactcaaatctcttgccttggtaaccttatcctctgtaggtgaactcgttactgtttttggtgtttgtttaaattccttcttcctcttttcttttcttcctggctgagaaagataatttttgcccattttgtcatgatttctttttctcctacttctttcatacttctgtgtaagttattaaatgttaacccttygttggcagtatgttcagctttcgcccttttctcccatagcatttaatcagttaaatgaaaggaaatgactctcacaaaacctttcacatttaaaaggaagttttaaaaaatttctctcttcctcgagagattcccttttctttgtatttttaaaagttattatgcatctctgaggaacatgaaggtactttttccctaagtaataattgtagattctttcttacttgtattattgatttgaccaatggaagaatattgtttttgtctgtgaacatatacatggacagtatttgctattttgataatggagcttcctgtctagaataattatacatataaaatttaaggtattattatatcatttaattttttttaatatatcctgagtttcagtttgtcaaacataaagccctaaattgtattatttaaaataatcttgttccaagtagtagctgagattagaagtatagcaaaattcatgctatcactatctataataggaataatatttattaatagtgctattaaatcacaactctattgacatcaaagattgaccattaagaccaagtctagccagatatggtagttcacacctgtaatcccaacaatttaggaggctgcggttagaagatcacatgaactcaggagttcaaaaccagcctgggcaacatagtgagaccctgtctctacagaaaatgtaaaaattggccagtgtggtggcatgtacctgcagtgcaacctgcttcggggctgaggtgggaggattgcttgagcccaggaggttgaggctgcagtgagctgtgatttcagcactgcactccagcctgggcattgaaataagaccctttctcaaaacaaaaacaaaaacaaaacaccaactctggtttataaccaagatatgcaagaagaaattccatgtttaatatgaattataaaaattattcttggggaacaagtctgcttttttttctgcttatgttgtgtcatttcttctgttttggcttcttcacagatccttggggctccagtttagattaaaattttgtttctgttttatgtctaaacattcaagaaaagtaggtagttctctcttttatgtattttttattgcatttattaaaatgtaagtccatttgtctcaagctatgacacacacagtgcctacattattttttttagttaccttggtattttatgtgcagctatattgaaggttttcatttttttaaaagcattgtggaaagaggaccagacgaggagtcaagagactgactgacataaattagcaatgaaattctgaataaatcacttaatttctctagagcttgtttcccaggatcatcctttataccatatcrtcctttggtatgaaatttttcttaaatccattctaggggatcggaaactatctagtgggttgagtaaatgagagtaggcccttagaggcttccattaattaggaaatacaggaaaagaatctattcatttccagtctctttttatattagaaatcctgactcaattttagttttccctggttctgtaccaggtgttckctgagttcctagaagcaaatcatgccttaaggatttaggagaaaaggcccaaagctcagtgtactcgacaggggcacagtgttagaaagtgtactaacttcgaccagatgtggtggctcatgcctgtaatcccagcactttcagagggtgaggcaggcggatcgcctggggtcaggagttcgagatcagcctggccaacatggtgaaaccccatctctactaaaaatgcaaaaattagcaggctgttacaaatgcaaaaattacagctggtgcctgtaatcccagctactcgggaggctgacgtaggagaattgcttgaacccaggagatggaggttgcagcgagctgagatcacaccactgcactccagcctgggcaacagagagagattccgtctcaaaaaaaaaaaaaaaaaaacgaagtgtactaacttcattgcctctggattttttgagtattgcttatagtatacattgagacttcctgttgttattattcccactataggaaatcagtgtgcccattactttttatttgaaacaatatatttgaggacatcatttattttaaaatctgcattgtaatttatgtagttgacagaatatagcctcctatctcttattgttgaggtttttgctgattaagccacaacttttaatattatctcattaagatctttattaaaatggatttttttttcttttttctttttctttcttttttttttttgagacagtctcactctgtcaacccaggctggagtgcaagtattgcaatcatagctcactgcagccttgaactcctaggctccagctatcctctcctctcacctcatcctgtgtgagccattgtgtccarttatctctcctttttttttttttttatttattttgggataagaagcaaaggaaataaagttggatgttatctcttaatatccaaacattatattaaagtttactgcatgctctcctcacatccaacattttgccaattgtgtttgatcttctggcctttgtcttaaagcagttgaaaatgaagttttgcttcctctccttgcttctgctctgcattcatttaagtgaccgatgtrtgccagttaattagctagatttcaaataatatttaaagtagcatcagaaccaaggggatatcaatctaccattgctgacttctctccatttagttaagacaatccactgctgtccttgctttttagtcaatagagtataaaagctgtgtaagtcagttttctcccattgcatctcttagtcttctgatgggtatgtttgatttttatttagattttggacgtaggtagtattgcacttgagtatctttgtactgttgtataaaaaatcttaaggttactctttttaaaaatgtttgctatttattacatctcatatcagaatcattggataggatttcagcggaaaatattagaagcctgcagccagacaaacttcttaatatatgtgtcttactttttcttggtttatttaaaaacttttaaataaacactaatactaaaaacatcctttgaaggcgtttttaaaactccagtattcctattacctttgtctgtagttgctgagtaataacagcactgaagaaataatgttcagattttttttcagagggctgcttctgataggaaaatgcttagtaatgacagaggcacgccctccaattcagtggccattttgtactgtggttcttctggagaaacaagtgggaatcatcaaagaaagaaatgtatggataaaaaagaatatggacaagaggcagtaaatttttcatttaggtcaactggagaaattagaaccatgctatctgtgagtagtttaattagttggaccaattttaatggacccttttagcttaatctctttaaattctatgattagattttrctttgctgattaattaattaatgcttgaatttggggctttggtatattaatttagatattatgttgaaatgtgtaagctcygaaaagcatttcctattattttatatctttaatatcctatgatattatctaaggtttaagggagataaaggcacgaagtagttaatttcagattatattttgtgattgcgtactgaattaaagataagtgaaaaggctatatagaaatttactacattggcaatacaattatggggaaatttattttccatgatggggttttgttaattttgacagagatttagccttttaagtagattcctcattaaaaattgagaaaaatcactgccttttataatttgttaatagtcttactcatcactttattttgtgatactctgcagctagcctggaaaaacatggaaatcatagcaattaacaacaggagtttaatcctttttagtggtattttccaaaaacaatatattgttgttctatatgtgatagtcacatttagacctatagctttaagctatattcaaagataaaaggtttttttaaatgctttaaaataacacataattttcaggcagatattttcccatcaaatccctttagttgcagataccttttccctagagattttattttgaattaaagatcttttagaggttctgttggcatggtagaaactttaaaaaatatgtaatttacatggtagtatgtagagaacactttttttccagagaaattacaagttggtacaaacttgaggaaaagttacgtataacttggtgaattctgtaacttgggaatggaaatcaaaggctttttgatcctttgaaccagaataagcacagattcatataggtgggaagtctgtgttaacaaaattamttctcaaacattacacagtttcgggcttttgtgccaatgctttgtgcctcatactctcttctctgttagtagctagtgtgcctgtgttttcttgttgctttttgtgtttaatatggactgcatggcccaaatgacatctgacatctgacaatagttagcattttgccaaacctgatagtgtggtttagatatcatactgacattttaaataaaggaatgtataatagttgaagtagagcattagtttttgggttggtttggtttgggtttttttgttcgtttgttttgttttttgggttttttgagacagagtctcactctgtcgcccaggctggagtgcagtgackcaatctcggctcactgcatcctctacttcccaagctcaagcggtcctcctgcctcagcctcctgagttgctaagagcacaggtgtgtaccaccatgtttgactaatttttgtattttttgtggagacagggttttgccatgttgctcagactggtctcaaattccttggctcaagtgatctgcatggcttgacctcccaaagtgctgggattataggggtgagccactgcatccaccccattgttagtttttatatgggaaagtgtattggctcattttattcatttactaaattctcatgtaattaggtaccttcttttttctttttcttttttttttcttagcagaccttaactatgtttttccacwcagataacacatgaatatgttctcattgtaaaacattcacataatacagggaaaggatcagctctcccttaatcccccttttcctttgcaggtccacctttctccacagaagtaccactgtaatcactttcrtatattttcttttttaaattattttttatttttattttttatgttttttgagacagagtctcactctcttgccgaggctggagtgcagtggcrcaatcttggctcactgcaacctccgcctcccaggttcaagtgattctcccacctcagcctcccaagtagctgggactacaggtgtgtgccaccacgcctggctaatttttttgtatttttagtacacacaaggtttcaccatgttggccaggctggtctcaaactcctggcctcaagtgatccccccacctcggcctcccaaagtgctgagattataggtgtgagccactgtgcctggccaatgttggtatattttctttcagattattctcagcgcaattacattcatctatatgtgtatgtgtatatatatatatgtgtgtgacatacataaatatattgtataattccattttgtgggttttttaaaacacaaatggggtttttaaatggctagtactagtcgatattcttgtatgtatatttggcatacttttataattgtattcatagactggaagcttagtggtaaaattgctaggtcaacggatatttgcatttatatttttatacctatactcccactaatagtgtatgatgtatctgtattccaacgttgccaaaactgagtattctcagacttcttaattattgccaactaataggtaaaaattgtgtctttgtttcaatttgcatttcttcaaaggtgaagtttaacatgttttcattyatattgacccatttgtatttttttctttgaactgcttctttatatcctttacccatttctacaatttaaaaaaatattattactggtttatgtggccttattgtaaattaaaaaactgttgcatcatgttagccaaattttctatcaataatcttttttttttttttttttttgagacagagtttcgctcttggcccccaggctagagtgcaatggcgcgatctgggctcaccgcaacctccccgccggccgggttcaagcgattctcctgcctcagcctgccgagtagctgggattacaggcatgcgccaccacccccggctaatttttttgtatttttttagtagaggcagggtttctccatggtggtcaggctgggtcttgaacacctaaccccaggtgatttgcccgcctcarcctccgaaagtgctgggattacagacatgagccaccgcgccaggcttccattttcagtgagttgtttttaaaacacattaagctagttttgaaagtagttttgttttttttgttttttatttatttatttatttwttttttwattgatcattcttgggtgtgatttggcagggtcacaggacagtagtggagggaaggtcagcagataaacaagtgaacaaaggtctctggttttcytaggcagaggaccctgcggccttccgcagtgtttgtgtccctgggtgcttgagattagggagtggtaatgactcttaaggagcatgctgccttcaagcatctgtttaacaaagcacatcttgcaccgcccttaatccattcaaccctgagtggacacagcacatgtttcagagagcacagggttgggggtaaggtcacagatcaacaggatcccaaggcagaagaatttttcttagtacagaacaaaatgaaaagtctcccatgtctacctctttctacacagacacggcaaccatccgatttctcaatcttttccccacctttcccccctttctattccacaaaaccgccattgtcatcatggcccgttctcaacgagctgttgggtacactcccagacggggtggtggccgggcagaggggctcctcacttcccagtaggggcggccgggcagaggcgcccctcacctcccggacagggcggctggccgggcggggggctgacccccacccacctccctcccggacggggcggctggccgggcagaggggctcctcacttcccagtaggggcggccgggcagaggcgcccctcacctcccggacgggkcggctggctgggcgggaggctgacctccccacctccctcccggacggggcggctggccgggcagaggggctcctcacttcccagtaggggcggccgggcagaggcgcccctcacctcccggacggggcagctggccgggcggggggctgaccccccgacctccctcccggacggggcggctggccgggcagaggggctcctcacttcccagtagggccggccgggcagaggcacccctcacctcccggayggggcggctggccrggcggggggctgacccccacctccctcccggacggggcggctggccgggcggggggctgacccccacctccctcccggacggggtggttgccggccggagacgctcctcacttcccagacggggtggctgccgggcagaggggctcctcacttctcagacggggcggctgccgggcagagacgctcctcacatcccagacggggtggcagggcagaggcgctccccacatctcagacgatgggcagccrggcagagacgctcctcacttcctagatgggatggcggccgggaagaggcgctcctcacttcctagatgggatggcagccgggcagagacgctcctcacttcccagacggggtggcggcygggcagaggctgcaatctcggcactttgggaggccaaggcaggcggctgggaggtggaggttgtagcgagccgagatcacgccactgcactccagcctgggcaccattgagcactgagtgaacgagactccgtctgcaatcacggcaccttgggaggccgaggctggcggatcactcgcggttaggagctggagaccagcccggccaacacagcgaaaccccgtctccaccmaaaaaatasgaaaaccagtcaggcgtggyggcgcgcgcctgtaatcgcaggcactgggcaggctgaggcaggagaatcaggcagggaggttgcagtgagccgagatggcagcagtacagtccagcttcggctcggcatcagagggagaccgtggaaagagagggagagggagactgtgggaaagggagactgtgggagaggggagaggggaaagtagtttttaagactagagtaccattgtttctgtagtccccaagaatctttgcagccagtttctaaccttgtgtaacgtgaggcaaatgctcttactgaattctttttttttttttttctgagagggagtctctgttgcgcaggctggagtgcagtgtcatgattttggctcactgcaccctccacctcctgggttcaggtgattctcctgcttcagcctctccagtagctgggattacaataagcccacattacagtctcctgccaccacgcccggctaatttttgtatttttagtagagacrgggtttcactacattggccaagctggtctcaaactcctgaccttgagtgatccatccatgttggtcccccaaagtgctaggattacaggcatcagccatggtgctyggctcttactgaattcttacatgtgaactatagctcatctgaagcaaaaataaggcaattgggaataawtgtagatattatcaggagaataatgctagcctattttgagttttctaacttaatctgctaaatagatttaaaattacaagtttagtttctagttaaataaaacaactatacacagtactacattagaccaaattaatgaacttgtttactcaaaattatttgcaatatgatggggtaggtaacagcactgaatctgtcaggtttttccaactcagaaaaatccctcttctgttgtttactactatctgtccttgtgaccttgggcaagttcccttggtctctctgtgccttagtttcctcatatctaaaatgagccatgcctcataaggttattgcaaagatgagacaggcttgtacataaaaaaaaaatacttagattaattcctggccctgtctgggtactcaataaatgtttagtactgctgttgtttgtggggagatgggtggaaaagaaatcaaccaaccagataggaactacactggatcatcctcctgtgagaaaattgtgcatctgggtagtatcaagcagaattatcagcctccactgayatcaccaaaccagaggttaaacttgctgtaacctcagaaatgggcagtgggagaagatcaagggccattaccaaacactcaccacgtatagcccccatagccttgggaaaacacagcactggaatattattttgttttgttttgtttttattatcttgttcatgttggtgtctgttgtggctctgtttcccttggaaactaaatttctaaattggtaatccattgcctcttgattatttctcttctctgagtttataccttaaaatttcttgacttcttsccatttgctactttatattagccttaggctaataagtatagagctctccctgaaggatgaataaaagtcatggagcctgtagatcataataacaccaattttatatgagcattttctaaaatgttctcacgagaaaaaagtctgtattggtatgttcccagattctgtagcttctatgaaacttaaagccaccaatggaaggggacaatttaagatgaagttagcttgaagagagacaaaaatatgattgaattaaaaattatgccttgcagggttgagcattttgaaccttatagaatatatcatatgatacatatggtgaacttgagagaggttgtttcttttacatctcaatttttctcaaagagacaattttatattatagtttaaaagtatgggctttggaatcagactaactgggtttatattctgatgggtgactttaagcaagttataacctctttatgactcagtttcctcatctgtaaaatgagggtaataataaaaatacctctttatagagttgttagaattaaatgaggtattataaaacgtgcttaactcaatgcctagtaaataagcaactcagcaaatgtcaactatttttagtgttactacattgtttttcaggcttggctctactgttttctaaaatatatatagtaactctgttagggccttcctgtcttctcttgccattatctctagttgatcttccagactacatatgtttctatactggtatgtcatatgagtttgccaccatatttatatgctaaaaacttgaatgtatacattcagtaggctactttcctgacctccagacattttaggtctaagccattcacatttgactatctcataggcacttctaatacatcaccttcctcctcagatttgttgctacgccactgtttcatatttcattaaatagcamcacctgattcttcaaatcagaaatcttaatcttgatccctccattgccaaccatttcaatcagtaatcaagttattttgattttaatacttaaacacatttattaaatgttttcattttttatacttcttgtagtcccagttatccaacaataagagactggataaataaatcatgatagattcatagaattgaaatgctataaggacactaaaaaggaataaggtacaatatatgtcctaatatggaaaggtctctaaaatacattcgatgaagcaagtgcagagaaaagtatatagtatatttccatttgtatagaaattttgaaggctattcatacatatataagtggatactaaattttgggggaaggattcatgagctaaatatttattaccttttgggtgagagactaggggactagggtaggaaaaacaaagttatttctcattttatatctttttgtattttttaaatttttagtataaaagtagcaaggcagtaaaaaacaaaaaaacaaactgaggttgagcagttgagcttagtgtccttttacagatgaaataagttaacttttcttgtatatccccagagagaagttaatggcagagaactgctaaagtaactagtgcctgacacagagtaggtgctcaataaatatttggctagtgataaaggagtaaatgatgattgtcccttttctatccagatgatctttaccctggaatgctgttagcactcagtcattgccatctgcaagagagaatagatagtgtgagggatcagaatcagaatttggccactagttagtgcagactacaaattgcttttctgaaagggtatatggctctgagatcagctcttctgataaagggaaggagagagwctcaagggtgcatcagggctagtgtgaagagctcggagggttcagacagacagaataagtgacataaggcccagcacggtagctcacacctgtaatcccagcactttaggaggccaaggagggcagatcacttgaggtcaggagtttgagaccagcctggccaccatggtgaaacaccrtctctactaaaaatacaaaaattagccaggtgtggtggcacatgcctttaatcccagctactcgggaagctgaggcaggaaaatcacttgaacctgagaggtggaagttgcagtgagctgagattgkgccactgccctccagcctgagcaacagagggagactcgaaagagagagagagagagagagagagagagagaggagagagagagaggagacagagaragaaagaragaaagrgaaggaaggaaggaaggaaggaaggaaggaaggaaggaaggaaggaagragaaaagaaagaggaaaacagaaacattgcaacaatgactactgagttggaagatagacaatcattgactgttcttagcccagtagatgtgctggattgtggacctgtagtattgatattaatagtgtgtcaatatccaaaagaaaccattcrgtaaagtgccatttgtggaagaggctaggtttattgagatatctaactttcctagttaatatctatggcccagatagtcagatttgcacttcttttcttatgttgacaccccaacataattttttaaataaggaaaattttttattggaagactgaagttcagttagatgagcatgaagtttatgtagaaataatctcccaacagcttagctcagctattcttaaagtttttaaaatttaaggctctactggagtaaaacgatgttatatagaaaattattttcttcagatatttttaatactgtaataacatttcttagcctatttaaaggttcatattgattatcacaatacttagtgtaaccaagtgctataattattttggttttatattagtagctgattaaaatttcaatgcataaattctaatgcasttatttcgaaggtaactcatttcactcttagaaagcctgtttttgcaacaggctgttgagcattgcaagtcatggaaaaacagctaattttccattttggtcattgcttttcaaatcagtcatcgtcccaaaataaaaagtaaataatgaaagcagctgctaggctacatatttttttgtgattttttcaatctttgattccttatactcaaaaacaggttctcagccttagaactattgatgctttgggccagataactctttgtgagggttgtcctgtgcaatataggatgttgagcagcatcccgatctctacacactagataccagtagcgctgctcacatccaccccacagttttttggggatttttttgttttgtttttgttttttaagacggagtcttgctgtgttgcccaggctggagtgcagtggcgctatctcagctgcagcctccgcctcccgggttcaagtgattctcctgcctcaggcctcccaagtagttgggactacagatgtgcaccaccacgcccggctaatttttgtatttttttttagtagagacaaggtttcaccatgttggccaggctggtttcaaactcctgacctcaagtgacccacccatcttkgcctcccagagtgctgggattacaggtgtgagccaccgtgccttgccaacaggttttgtttgtttgttttgagacgagtcttgcatggcttactgcagccttgactccaggctcaagcaatccttcactttcagcctcccaagtagctgggaccagaggcgcacaccaccatttctggctaatttttttatttttagtagagacaaggtcttgctttatattacctaggatagtctcaaacgcctggcctcaagcaattcctcctgccttggcctcccaaagtactgggattaaaggagtgagctaccctgcctagcwcacccctcagttttaacaatgaaaaatgtctccagaaattgccaaatgtggggagggggagttgtgcagtgatgatttactttgagaaccactgctttataagaacatagtagtttttttgtttctactttttgtttttaactgtcttgtttaatggtgattttaaaacatggctcagaaaaatcacataattgagaatagtttattccatgaactttacattagtttgtggaaagaaaatgtgaataattcaaattgacaggtaagtagacacttatttgtgcctccactgagactagcaacttgaaatcatgttgctagaggatacctttgatatttgttgaccttggcgaaaatattaaaaagcgtagacattgttgcaggaagtttgcaagtccaaatacttgctcatcattttctgaattttttaaaaataaacacaaaaaatagcacatgtacaagttacactagttgatacacatgtgattaactcataaatttattttagatcttatctatattaacatttgctttttgtcgtattctctttcaatagacattaaaactaccactactatggaagtaccactactagatggaagtttgacctggacatggtggctcacacttgtaatcccagcactttgagaggccaaggtgggaggatcgcttgaggccaggagttcaagatcagcctgggcagcatagtgagaccccatctctaaaaaaaataaaaataaaaataaaatcacctgagactattagatagaagtttgtaagactctaatgggttttttctggtttttattttgttttgttttcttttcttttttagagacaggattttgctatgttgcctaggctggagtgcagtagctattcacaagtgtgatcataggccctacggcctcaaactcctgggctcaagcaggcatcctcagtagctgggactacgtgtggagtgttttaaaatctaataaaatgggccgggcgtggtggctcacgcctgtaatcccagtactttgggaggctgaggcaggcagatcacctgaggtcaggagttcgagaccagactggccaacctggtaaaaccctgtatttgtaaaaatacaaaagtcagctgggcgtggtggctggctcctgtaatcccagctacttgggaggctaaggcaggagaatcacttgaacctgggaggcggaggttgcagtgagccgagatggtgccattgcactccagcctgggtgacaagagcataactccatctcaccaaaaaaaaaaaaaaaaaaaatcagtaaaatgatattttccccagattataataataagttgaattttttcaagtttacatttttgttccatagtattttcttaagccttttataccagactttaggaaaacctagcatctgatttttaaaagacttttattatagaccttaaaaatgtattttaagggagagaatactacaatgaaaactccatggccaggcctggtggcttatgcctgtaattcctgcactttgggaggtttgaggtgggcagatcacttgagctcaggagttccagaccagcctgggcaacctggtgaaaccccatcactaccaaaaatacaaaaagtgagctgagggtggtggtgcatgcctgtggtcccagctacttgggagacagagatgggaggatcacttggaggttgccgtgagcagagatagtgtcactgcactccaacctgggtgacagagtgagacaccatctcaaaaaaaaaaaaaaaaaaagctccatttacccatcactcagcttcagcttcagcttcagcagctgttaacattttaccaaactgtctcatctattcytctcaccctcccccatcttttttcttggtgtattttaaagcaaataccatgtgactcccatttggcctgttataaataaataaataaaaataaagcaaatatcagacattacctaatttcacctgtaaatgtatcagtatgtatctctaacagacaagtacttgctgtgatttaggtgtggtttgtccctgccaaaactcatgttgaaatttaattgccatgctacgatgttgggaggtagaacctttaagaggtaggacctaatgggaggcatttaggtcacgaggctccactttcatggatggcttggtgccattctcacaatagtgagtgagttcttgctmtctcaaaactgaattagttctcttgggaactgattaattcctgaaagagcaggttgttataaagtaaggactttcttagggcttggcccctttgcacatacccactcccgctttgaccttctaccatattatatctaggcagcagagcccttgctagaagccagtggcatgctcttgaacttcccagcctgcagaactatgagctaagtaagcttctttctttataaaatatgcagtgtcaagtattctgttatagcaacacaaaacagactaaaaactctttttttttttcctttttcaagataactctggccaggcacagtgccttacacctataatcccagtgctttgggccgaggtgggaggatcacatgagcccaggggttggagaccagcctgggcaacatagtgagaccctgtctctaaaataaaaaacaattagccggacataatggcacatacctgtagtaccagctacacaggaggttgaggtgggaggattcctcgagcccaggagtttgaggctgcagtgagctatgcacaccactgcatgggtgacagaacgagaccctgtttctaaataaataaataatgataaccccaatataattatctcatctgacaaaattaataataatttcctaatatctaatacctagtctgtgtttgggcttccttaaattctcaaaaatgccttcttacagttgttccaagcagaatccaaaacaagtccctacgttgcatttgggtgatacgtcactttagtctttccccaccctcttgcctcttttttttttttttctgagacaagatctggccctgtcatccaggctggtgtgcaatggtgtgatctcagttcactgtaacctctgcctcccaggtttaaaccatcctccctcccacctcagtctcctgcctctcacctttttaaaagtcatttatttgttgaagaaatttggtaattttttttggtgtgttttttttttttaaagacaaatgcatttcattatttatttagatatgtccttgagtcatagaaactaaataatttgatctacaggatttccatactctgtatttagcttattttgtagcataagatgacatttggtttagcacaaaattctgtattttaaaataccacttttggccaggcaaggtggctcatgcctgtaatcccagcactttgggagtctgagatgggcggatcatttgaggtcaggagttcaagaccagcctggccaacatggtgaaaccccatatctactaaaaatacaaaaaattagctgggtgtagtagcgcatgcctgtaatcccagctacttgggaggctgaagcaggagaatcacttgaacccgggaggtggaggttgcagtgagccaagatcgtgccactgcactccagcctgggtgaaagggggactctgtctcaaaaaataaaaaataaaaataccaccttttatcttgtttctcagagtgtcgtgagttttgttttactacctgaacaagtttaagagtcccatagcattcttactttgtacttaaggaagctgaaacagggagaggatttttctggaaacagagcatacctagaaagtaccagagcactcaatatttccttgataatgttgaaagcttgatgaaccgtggttttatcagaagtattacaagataaaactcttttrggaaaaactgttcctgttttgttttatcccctgtgcctacatgttgcctgacatggaagatgttcagtaagtatttattattgaatcagttgcctaattctgccatctttggcccattcttctctggcccaagacctgaaagcttacaacttgttctatctataagagtttaaagcagtttaaaagagtgaagctaataataaaagcactgtagccaggtagaactgctcatgcttataatcccagtgactcaggaggctgaggcaggaggatcccttgaggccaggagttggagaccagccagagaaacatagcaagaccccatctctacaataaatttaaaaattatctgagtatggtagcttgcacctgtagtcccagccactcagaggctgaggtgggaagattgcttgatctccagaggttgaggctatagtaagctatgatcgtgccattgcactcnnnnnnnnnnnnnnnnnnnnaatgatgtagtaatgacactggcacttgtacagaatacatcatgaatcatgtagaaaacaagcactgccataagtgaatggttggactttatacatctgggagatctgatatcttttcttttttttctttttctttttttttttgagacggagtctcgctctgttgcccaggctggagtgcagtggcgggatctcagctcactgcgacctccacctcctgggttcaagggattctcctgcttcagtctcccgagtagctgagattacagacatgtgccaccatgcctggctaatttctgtgtttttagtagagacggggtttcaccatgttggccaaactggtctcgaactcctgacctcaagtgatccacccgccttggcctcccaaagtgctgggattacaggcgtgagccaccgcacccacccagatctgatatctttatgtggggcctgcagggagcagggctggcaagaagtgtcagtagtgtaggacttggatgagacattttcttaaagagctttcttcagcaaaaatgtgggattttcctgtctatttttgtttatttttattgcaaaaatgtttcggccaccagaacaatcttagcacaaccaaaggttcttggctgtttttcatttagcaaaattctttctggtgttatgatatgtgttttctgtcagctaaaacttacaggaatagtgaaccacaaagatttcctgaggagctcccacatgctgtgtctgaggtttctcatatttcttttggcatcagtaacattctccaatacttcgaaattatagtttgaatccagtgttaatgatttctcttcaaaaaaacaacttaaataaaacatttgcggttttattttgcttgaaccaaggaaaagtcataatagagacaactacctactctgccttaccctctgcacaaaaacacccctttctaaagctaccatctaatactttatgaaaaataaatatttccctgtatttattagtgtataagcctaatatcccaaaacctctaaaatatagtggtcagaacagttgcaatagggagcctccccttgctgtaaaagaaaaaaagtcaaaataaattatgttgagtgatcaggttttaatactaagacattatttgcctttgtcactgtcattctcatgtgtgtatacagagtacaaaaagctcatcagatggttgcatattctacgttaacatttagctatttgaaactattacttgtttcggtacggctattcttctttgatactacaatgatcagaaaagactattaaaatacttctggctttccaactatattatttgtgtaagcctttatttttctgtatacttcacccaaaacaatacattgcaacacattgaatgcagaagcagatataagtatccggcaattttctattaagccaaacaataaagagatttgcaaaaagtgtaaaacaatctgttcttctcaataaatttttttcattttggagaattttttcattaacatatgttgtttaacattgtaacaggtttattgctattttcaagtaaaataataagttttttttaaattttagttttgagttctaatatgatgtcattagasgtccatgtaaacaaaagctctttggggctctccataatttttaagattataaggagagctgagaccaaataatttgagaactactggttaggatatggttttctgagatctattaaataatatacaagttatttgacagtttyggagaaaaagtgatagcaattttattcctaaacattttaaaagaattaatgtaagcataatgaatagaacttgagtgttcacagtgttcatacagtatctgggtttacatgtgttaggaagtaatatgatttgcactaacagccaaaaatagaaaaatgcaaatatgaaatataatagtagataactagaaattacattttattaaacctgcaatacattcacctcagtctccaaaggttgtcttctatgaaactttgacaaatgctttgttacatacagccatgaaacaaagtatggtgatcaccttggtaagccagatttttccagaactgtaaaacagtgctttctgggataaaactgatctgttactaatgatggggaagaaaccaaaactactgaggaatcactcatagttatatagcacaaatgggtgtgccacacctttaacaagaagcctgtgaaaccagccaaaaagttaatgagaaattgtatttgcagaaaaagcagaataaactactagtagaatttactgtatcacatgatactgttggatatgatctgtgatatataaagtgaatgattaatgtgctgtcattgtgaaatgtgaaatagcaagtgttccagattatggtgatccgaactgartgtgtatatatgccctcagcttatatacagaacatatttgaagaaaaaagtattcttgtttctcttctggttatcattttttaaaaaacaatctatactacattttgttattttgtgatctgtgacataaagtggaaaaggaaaggacgttggggtcactgatgagagagcatctgctatctgtacagtaaaaaagggcattataatctcaataaaaagtttgtactcatcttgactctctaagtctcttgccagagaacagttagcagtcaagagtttgtctcctggttttgactgagtcttttattaggagaggagggcacgatggcttgcacctgtagtcccagctactcacgaggctgaagccagaggatagcttgagcccaggagttctaggccagcctggacaacacagtgagaccctatctcaaaaaaaaaaaaaaaaagaaagaaagaaaaagaaaaacagaaaacaaacaaaaagaacaggaatcagcaaattaaggtttttgggccggatttgccaccgtgacccgtacccccatttttggatggcaggtttttaaaatgtttttaaacagctggggaaaatatcagaatattttgtgacatatgaaaattacatgaagttcaaatttcagtgtctataaataaagttttattgggacatagccatactcattagtttatgtattggctgagtctgttttctcactacagcagcaaacttgattagttgtgacagagaccatatggcttgcagagtctgaaatatttacgatctggccttttaccgaaaaaggctgctgacccagagttagagtaacttccctttgatccatcttatttattgttcttccccatgggagttcatttgaagaaagggttctactgccttaaaaacaatgtttttttttaaagtatgtaaggtcggcccaaacaaatgaactggcattcttgttcttttgcccccactggggcaagagcagggtggggttcacagttcactttgaaaatgcagattcactaattcaaggcaatatttgaatatacattatgggtgatatcaagattaaccatttgtgctgccagaaattttaaatctggtagagggatatattacttttttwaaaaatatttttcttaaaaaaagagattaaacatagcttaaaagaaaggcatttgactcaattcctgttctctcaaattgatattccacaaattgctaccagtccagcagattcccactcttccttattcttctgaatgcaagaatatattccctaaatgtcttggtctatcttaggtatctctcctgtttccatagtatccaaatactttcctgacattgttaacttgcttggtgtgtttgtactaaactataagtaactttttggtgtcttccttaatagacatggaagggactgtttcttattttaggtaatagagtataatcctgctttttctaactgagtgaacccgtttcctcatctatggaattggaataaaaataataatgataatgatgataataataacttttattgttgtgaaccttaactgagaagatgaaagtaaaatacttagttaagattttgccacatagtactttaactgtgttgctcttttttttttctgttgttttatctctaaaacctaattatagtcttttttttttaattattattatactttaagttttagggtacatgtgcacaatgtgcaggttagttacatatgtatacatgtgccatgctggtgtgctgcacccattaactcgtcatttagcattaggtatatctcctaatgctatccctcccccctccccccacctaattgyagtctttttggagatttaaatatttcattgaatggaatcaagatttattwtttttttttttaattttttaatttttttttttttttgtgagacaaagtcttgctctgtcacccaggctggaatgtaatggcataatcccggctcactgcaacctccacttcccaggttcaagccattctcccgcctcagcctcctgagtagctgagattacaggcacctgccatcatgcccggctgatttttatatttttagtagagacagggtttcaccatgttggccaggctggtcttgaactcctgacctcagatgatctgcctgcctcagcctcccaaagtgttgggattacaggcgtgagccaccgcccccagccaagatttatttttaaacatgtcaccaactgtatgctttagagaaggttgaaagttaaaatttaagcttgctgttcagaaatagttgtccagtagattttcatccagtagtgacattgatatttctgtttgatggggttggggtgatttttttttttttttggtctgttctgaaaatctgtgctgtttccacatagcttatatatagttaaaagtataaatggagtgcttactatgtggcaaggactgtcccagatgctttatattaatttaattttcataagaactctatgaactaagtgctattactgctatttttagatgagacagctgatgcacaaaaggattataaatttcctggttacttagctagtaagaggcagagtcgggatttgaatctgtagattggtttttgtttgtttgttttgagatggagttttgctcttgtcgcccaggctggagtgcagtggcgtgatctcggctcactgcaacctttgcctcctgggttcaagcgattctcctgcctcagcctcccgagtagatgggattacaggcacaagccttcatgcctggctaatttttatatttttagtagagtcagcatttcaccatgttggccaggctggtctgaaactcctcacctcagatgatccacccaccttgtcctcccaaagtgctgggattacaggcatgagccactgtgcccagcagattgtattcttaacctctgtgttctaatgcttttgttagccatactgtgttctatttgtcatatgctcgtatgtaagatatagcttatctaaggtaacattattgaagagttttaagtttgttcacagtgctgagcatatggtagataatacgtatttgtgcttgaatgaattaaggaatatgatgagatgataaaaatattataattcatacaatataatcattgtttaattattcttggctttgagtaataacattgtcgtttgagttatctataacattggctattttgaagcartctaagactataaaatttgggacagtgaaattgcttaacaatctatttatattcctaaattcattttttcttgctggtactcactcaaaaaaaaaatctgtgtgttttatttagagtttttccttttttgggttcctctgttgaattgtttgttgatttgtttgtgttaaatggcattgtattataacagataattcagttcttatagaagaagccttaaagaatttggacatactggtcacaatagtgaagtctggtattaagtttggcccccgaaacttttgaagtagtaatgatcttgaaatttgctttrttttgtgtctttttcagaattctccactttaccaatacttacaggatctgggacacacagactttgaaatatgttcttctttgtcaccaaaaacagaaaaatgcacaacagagggacaacaaaagcctcctacaagagtcctaccaaaagtaagaacgcatgctcattctttctggccgaatcttttgcactttaccttactggctattcagatacttcttaagcacttccatatcctccctcacactggtaagactatttatttcatcaatagtacaaaactttctgttagataaacatgaatccttactgctttggaatactttgtaggtaatttatatccagtgaggaaataatttggtagagaattaaaatacattacttatttaaatattgatgctatccaaacagaatcgaaaaaaatatactaaaactttaatgagagcacaactaataggaatcctctactaactggatttttctctttaaatcttttttttaaaaaacagcatgaatgacaagaacgcaaaytgatatttcttaaacacagtttcaggtgtagataatggagtgagcataacttctggtgacttttttatctatagaattaaatacttttatacattaaatatctcatagtcgatgtccagcattgaggccgagatactagaaaaatctccattaattatgttctacaaaatgcattttctggattcatttatgtcctgctagccatgtttactaaaataagaaatttatgggccaggcgcggtggctcacgcctgtaatcccagcactttgggaggccaaggcgagtggatcacctgaggtcaggagttcgagaccagcctggccaacatggtgaaaccctgtctctactaaaaatggaaaaattagctgggcgtggtggcgggcgcctgtaatcccagctactcgggaggctgaggcaggagaatcgcttgaacctgagaggcggaggtggcagtgaaccaagattgtgccattgcactccagcctgggcaacaagagcaaaactgtgtctcaaagaaaaaaaaataaatttactctatttttagatgagacagctgaagcataggaggattataaattatcataggttacttagcttgtaagaggtagagttgggattagaacctgtactttactccgagtttatgttcttaacctctgtctacatgtctagtatattttagttttaaccaaaggaattgtaatttaatagaaaaaacataaccaaatttcctcattccttgagcattctagtttaatcagtgttttatcactattgagaggagcatttaaaactttcaattagtcatttacagggaaagtatggattggcagaaggatcctttccccaatcttcttacaaagacacctaaaatgtgaggtaaccaagctggcccatttgtaatagtctagtaaacactagagaattttttgactaacacccagaaggtgagagttaggagagttagagctcacatggatcagaaccagttttcctagtcctccrtttataccatttcttccctgtgccccttttaagagtgaatgttcctgggaagtggtttgtatataataggctatttaataagcttggatttgaggttacttggcaacacaaaacaaagaatggccaggggatagtcttagagcagcagatggtcattgacctctaattttttgttttgttttgttttgatacaaacttgggttttataggtattattgtcatttatgacaagtatttttatatatagaaatgttgttgctagtttataaataagtcaagtgagagtttaaaattgaatcccctcagaaactgaggaacaataaaaagcatagccagaggttgttttaaaaaattaccaggctgggcacaatggctcatgtctataatcccggcactytgggaggctgaggcagaaggaccacttgagcccaagtgttggagaccagctggggcaacatagcaagaccccatctcaaaaaaattatcatatgtctagaaagtttgttttgtcttcattttatttatttatttatttatttgagatagggtcttcccctgtcacccaggctggaatgcagtggtgtgattacaattcactgcagcattcacttcctgggcccaagtgatcctcccacctctgcctcccaagtacctgggaccacggacatgtgccaccatgcccagctaattttcttctttattttttgtaaagatttaaaaattaccactcactatgttgcccaggttggtctcaaactcctgacttcaagcagtcctcctaccttggccttacagatgtgagccaccacacccagccatattgcacatttctaagacaagtttttaactgtaggatctatatttttctaaaacgaagttcttttttttttttttttttttttttgagacggagtctcactctgtcgcccaggttggagggcagtgacgcaatattggttcactgcaacctccatctcccaggttcaagcaattctcctgcctcrgcttcccaagtagctgggattacaggcacaggccaccacgcccagccaagttttgtatttttagtagagatggggttttaccttgttggccaggctggtcttaaactcctgacctcaagtgatccgcctaccttggcctaaactgctgagattacaggcatgagccaccatgcccgaccaatttttttcctaatttggggagagctaaattttagaaaacttgttgtattgtttagctcattgtcagggaatgtatgtttagaattgctcccaaaattctgttcaaggaatgaagtatcaattatttcctctgaaaagctgtttttctatgagttcttaatgaaaccatccttagcattaattgctctctcttttttaactttatttttgcatatgcttgttagtagttgttaagtagtctgccctgatattcttactatgaatattcattctgtctctttttctggtttcttttcctgtgattattcttaaattcattccrtagagttttagcagcaggcttctcgttggcttgatatcttctctggggatctcatctactttcttgccacttatgtccattctccaggctttgctgagttccaggtgcttgttagacattttcttctacatgtgccccacaaagctcagattcaacttgtctaaaataggacttcctcagacacccccaaaacaaacaaacaaaaaatgttccttttaatagtcccaaatcactaccccctcagacacccccaaaacaaacaaacaaaaartgttctttttaatagtcccaaatcaccaccctctcagttaccataccatttccaatcgcgctgacatagccttggtcatcaagtgatacatcaagtcagcttctgtgtctcttaaatctaactcttattcatgatcttttttgtactcattacctaacttaaaggcctttattgttatttagctgagtgattaattttcttttctcttttttgagatggagtctcgcgctgtcgcccagccttgagtgcagtggtgygatctcagctcgctgcaacctccacctcccgggtgcaagcgattctcctgcctcagcctcctgagtagctgggattataggtgcccaccaccacgcccggctaattttttgtatttttagtagagacggggtttcactatgttggccaggctgatctcgaactcctgaccttgtgatccacccacctcggcctcccaaagtgctgggattacaggcgggagccaccgcccccggccttgaatatccttttaatcatgcttcttgtctacaatcatacsctgccagtttagcccctgcactattgccaattatttttctttattgtttcgcttccttgcataaaaatctttggtagctcctcacaccctacaggataatgttcatactattatggtgtgtaagtctaagatcctttaaaacctatctcagtgtacctttttaacttccttactaatcccttcttctcttgggtcataactgtcctggagtgcrccaccatccccatgacatgtgctttaatggctctttccttcatcctcttcccttgactgaagtgatcttctcttttttttttgagatgcagtttcgctcttgtcacccaggctggagtgcaatggcgcgatctcggctcaccacaacctctgcctcccgggttcaagtgattcgcctgcctcagcctccygagtagctgggattacaggcatgcaccactatgcctggctaattttgtatttttcgtagagacggggtttctccatgttggtcaggctggtctcaaacccctgacctcaggtgctccgccctcctcggcctcccaaagtgctggggttacaggcatgagccaccgtgcccaactcgttcttcccttctttgttaaattcctactcatccgttaggactgaactccagtgttagctcctctctgacctcctcttttccaatactttttcagactttacattgattgtaattctttatattgtctcttcttctatactaagttcttgaaaacaatagttacatgtatttatcttttttcccatgaccctttgcagtacctgggatatagtaatcactcaatgaatataaactgcacttactggcatgctcaaggaatgggctattaaggtaaattgaatttttggttgattcagtagtaaagcttttttatcaatatatgacagtttttctaaaatggtcaaagtatctttttgacttagtattgtggaatgaaatggtcttaatatttgagaacttgtaaccaccctatgatttttctttctgaaataaatactatcatcatgttgacatagtacatagtctccccaggataaatgggctgcttcagaatgacttctgcctgctctttaaaaatcggattttcaggcctcattccaaatgtattgaatcagaatctttagtttgggggcccaagaatatgtttctaactaaaatctccaggtgatcctgatatgcaacaaaatttaggaactaataaggaggctgagatgtactgacaaggtatataacctggacaatttttttcttccttttctgatataaattctcattgatkggaggtaagtactttgaagtttttctgctgtttgggtatgcttttaataatcctatacaatgtcattcatttccttcagcaaggtatcctgttaaaagtggctgaaaccatcaaaagttggatttttttttctcagtgcaataagaaagatgacttacttcacaagttggtaagtggtcacttctttttgccacttttcagggttctaggttattagtgaaataattggtgaatcagaatttgtttkgctatcaatttggccagcaattgatttttactagagattctgcagtaactcaggatcttttaatttgggcttactggtattgtttatagcttttaaagaggttattagccactcagaatggaatactctgatagttattgaaacgttatttgttagattgctaatttactattgccctcttcctccattgacaggtatccctctctataggtaaaggaatatgtcattagtgggatcaattcaatctgttaaatcacagaatttcccaaagactcgaaacagtcaacctgaaaggtctttgtgatttttgtgaggctttgtttttttctactctctgctgtaacagaactccaggggggaaatacttcaaccttctgacgtcctaacaatacaaaatccagggagtatagcctaaaaattcaagttatgtggttctcatggctcccagaaggagtaatgtagttacaagtaagcaggtttcaggatctctgctggcctgtaaccttaagaattatcattcctgtaaattaacatttgtaaggagattgtttacaaagtgctttcacattttgatttggtaatctaaacaacactataagatttagtctgcttcagtaacgagaaaaccaaggttcagacaatcagtttgttttaataacttactgagtgaattgtctaaaaatgttcagctagaaagtgatagagccagaatttgaacccaggtctcttggttccaaagccatgctctttctgctatagcatacgacctctctagctcaagtattattatttttyggctgactaaaattacttttttagcaatccaaattgtcaagttctttgttcagggtttcatctttgttgaaggtgtattgagaaggtcaatgaagtgtcttatcgtctacatataatgccatttttatccaggtggagccatctcattcttcagtgatactaggactgtggtaaggtatatggatccatatacatttttctgtgatttagtcatagtctgcctaggcctggtcttttcattcttgattctgtgtcactggccacatgtttcatgtgatgtttcactatacagtgccagcttctgtatgcatcccttttgtgcctatattatggagaactataagaatacatacctaaggattagtttactagtaatggaacaagaaattgccaaggtggcttttggcgtgagattgcttgactttttccccttgattgtgacgtatttaaaatgttgttagctatacagatattgaagcaggccctcatttcttttgtaagaatattggcaattgctctgtgatatctgaacattttactaatgttcatttttatagtacttttcttaaaaattaaaaaaatcctttatagcaaccatgatgggtagtggtaatggcactttttaagtgccttttagcttataaagtgctttcacacgtgttatcttatttgatccttgtataaaaagccccatgatatccaaagtgattaagatctttgaagaatactgacaaatgaataagttctcttcttcatccctaaggaaaaagaaatcaaaatctcttaattttttatctgtgccttctcataacctttcatttcatccatgcagaaaggaattcctaagtactttctcatgccacttccctatttagatcctggaaagatctttatcaatcaaatcaagtccaaatttgtcacgtcagcactaaagagtctgcataatttggccctaacctacctttccagctttgtccaccagtatttgtatcaatgaacccagtcttcattttcctttattcygtacttattctgtatgtctatgtttgtgctcttatactgtgatggaatactttctgttttttttttttcttgatccattagaatcttttcaataagcactcctagcttttwctcaaagctttcccgaaacttcagcctattgtgtctcttattttctgcatcaacctagtaataattactttgtgttctataagtttttgtattgtaatatatccaacgtgtgcttttctttattgtttcagttattgcatagatagtgacaacagtaatagctaacatacagtgcttactatgagccactcttcttggtattttatagatactgacttatttaatcctcataacaaccctgtgaagtagctactgttattatcccacttttgccaaagaggaaactggcacagagagcttattaacatgcttaagttgtggagcaaggatataaagctagacactaagtcctggcactcagacttgttgaaaatgtgccaaagtttacatagtacacatcccaggagcatagagcctccagccatgcaggtgatacctgctaatatttaaatcgatcagaattagcaccttttcagtttcttcatttgtttgagacctggatctgggcttcccagtccaaatagtactgtcatgacatgtttcttaatttgcaggtgtcagtttttctggtagtttgattgttaccttgtaacacagttaacatgttttctgcagttcttatttttataatcaaagagtaatatctaattttacattttatccttaagaaagaaacttaattcattaatctgattcaatttaaaccgttataataatcagwatatagttcaagtttttcctctacgtgaggcaatctaatcactaagataacattgttttagttatttggagtgtcttggtgcctttcaagtttatttgtattcatagatgattgtaggttgttggttgatcactttttttttttttttttttttttttgagacagagtctccttctatttttcaggctgcagtacagtggcaccatctcggctcactgcaacctctgcctcccaggctcaagcaattcttgtgcctcagcctcacaagtagctgggactacaggtgcacgccaccaaacctggctaatatctgtatttttagtagagatgaggtttcactctgttggccatgctggtcttgaactcttggcctcaagtgatctgcccgccttagcctcccaaagtgctgggattacaggggtgaaccacagtgcccagtsggtttgtcacattcttaaatcagatattcctaatgctattaatacttcctctaagcacgttggttttggggaggtgttatcccagttttacacataagtctgatgccagggaatggtgttaaagaaagtgagtaactgattaagtagaatatctgtgaagagagagcactgccattgaatattactggcttttccactctctgtcagctttagccttcaactcgttaggcttcttcaaacttaccttatataggtacatagaagtctcataaaaggtatggtctaaagcttttgtagcaaaagtttgatttttaatacttgcattgaatatggctgtgtctaattggggaaccaaatagtaagatcaatttcagagattactcaaaaagctaccatgcccctgcgctccttttttctcccctytgaacaatagtataaagtgagttgtgttgctctgtttttatgaaagtggggtgggatgtcaaattaagtggttcctaatgttagaatcagaattgtgggaagagagaagaggcagttgttcaaatatgaaacataaaagtgctgcagaggtacatgcagagtgtgtcagtagatggtaaaaaaaaaaaaaaaagccatatcaggctaaaagaaagatcaacattccattgagaagatgctctctttttggactgaagataaataaaatatatctaaatgcacctaatattaaaaatcttcttctctaaaagtggcatataaccctgatcaagaggtcatgggctcagtttgatatatggttcacctcattcttactgaagtcctcattatgatcagcgaggcctggaatgtgtggtgtggggatgattaaattaactaagaagagcaaacctgttgccttcacaccctagacctaacaggttttactttaattgttaatggccttgtccatcattctctttattttgatcatatagtaggatcactctagtactaaatttgtttgtttggttttggtttattttttatttttwttttttttgagacggaatcttgctctgttgtccagkttgtagtgcagtggcacaatctcggctcactgcaacctccgcctcctrggttcaagagattctcctgcctcagcttcccaagtagccaggattacaggcatgtgccaccatgcccagctaatttttgtatgttagtagagatggggtttcaccatattggccaggctggtctcgaaatcctgacctcaggtgatccgcccaccttggcctaccaaagtgctgggactacaggcgtgagccactgcacccggcctctatttgtttaaatttaatacaaaatacaactttaaattttcttttgaggcagactatatgcagggaaacacagctaccaaacgcttaggatttgaaatcaaaattctggaaagttacttaatctctttgggctttggtgttctcccctacataatggagaggaggatgataaggtacatcacagggttactgtgagaattcacctatctgccctaacagtgctacctcatctctcacctctctaccatgtgcactctgtgcacaatctattaataatatcatctaatatcgacgactcacacttccccaaattagaaaggcttttatcctgtaccatcccacttctccaactcctttgtctggtcaatttttgttcatcctttaaaacttagctcaggcttcacctcttttactttctctgacttcattacaggcttggtccctctatgccattttcatagtactctaggtgtatttcatcacactcctttgcatgttatattgcaactgtttactttttgggtcacttcattaaactacgaactctttaagaatagagacttgtatatctttttcattttgtgtcttcagtgtcaagcctgatgcctggcttatagaagatattccttgatagatgaatagaaagaagagaaggagaaataaatgagctcgtatatgtgaaggcattttgtaaactataaagtgctatgcaaatgttagtgtgattttacattgcattccttaatagtgtatttttaaatatctgaatatccatttttaggaggccttgatcctgctaataaaattcttaaatattggctatattgttacagcttcagggacagcatcttttatgttataggattatattttccatgtcgtgccctagcaatttaatcaattaggcttaactagrcaagtttgttaatctgtaattactttacatcttgttattaaaaatttatcttttacatctgatggctcaataatgtctatctcaacctttactgtttcacatttacagtgaaaataamacccagctatcatactgaaggtagattggactgttgtttcttcttgaagtatcttctgaawacaccaccaaattttattagtacattaggagcttagcgtttaatgcaatattatatatgtgttaatacctctcttctggtattttaatggcaaggatattggattccgactcgactcattacataccatcctgcaacaggaagtcctgttacaagaggatgtggagctgattgagctacttgatcccagtatcctgtctgcagggcaatctcaacaacaggaaaatggacaccttccaacactttgctccctggcaacccctaatatttggtactgtccagaaaacacctattctttgactgcttacatacagagtattagcagaggaaacccatcattgtgctctccrttgtaaaggcataaacattccatacatttagcagtacaattaaagtaacaatatggggggaaaaagtgcctttctaaagtaaatactatttaaagtgaagctagggaaaaaaatccaatttggttattatatacttccaactcattaaaattagttctgtgctcagcaacctagcaaatgggtataacaagtgccaaaaagttactctgccaggtgcagtggctcatgcctgtaatcccaacactttgggaggctgaggtggtaggattgcttaaggccaagagtttgagaccagcctgggcaacgtagcaaaatcccatctctacaaaacatgaaaaaatgagttcaggtatgttggcatatgtctgtagacctagctccttgggagactgatatgggaggattgcttgagcccagcagttgcagagtgcagtgagccgtgatcacaccactgcactccagcctgagcaacaaagcgagaccctgtctctaaggggraaaaaaaaagaatttattttacccatacacctattcacatgtgtgcatgcaaacctaaccttctttgtgtttctttataattaataggttttatcgtaactatattgtagagacaccaagaataggatgggacatggaggtaggcagttgattctggctgtgttggctgagaaaagatcacagggaatgtgatttgatgattcattcagaccatcctaaaacttttcaacctcttgaactatttgggtctagagcagaagtcccaagcaataatctgttaaaagaaaaaaaaagaatgtgtagcaaaaagcgattatatataaaaaattattgatgtcttcttcctgttaaagtactttattaaatttgacatagaagggaggaatgaatcaagaagtacactaaatcactattcaaactgttcaagttatataggcagttacattcattggcctcaaggttctgtatttatgtcttccctgtcacactgacaaatgcttcattctgcagtcactcagatatgatcatgaagaagtaaagcttcttatccttcaaaaatacaagaatttaaggagctgatagaaggaaccataggttttaagaatttactactttactaactttcctttacccacaaatataatcaagcaactatgagacctataaatgattttagagtttactattaacatacaaaagtatatgatgagattttgctttatggtattgccagtattatctgaaaagtaaaggattctaaaggaaattagggcaaatatttatttatttacttattttttgagacagggtctctgttgctcaggctggagtacagtggtgtgacctcrgctcactgcagcctcagcctcctagactcaagtgatcctcctgccctagcctcccaaatacctgggactataggagcatgccaccatacctggctaatttttgtatttttttcagagacagggttttgccatgttgcccaggctggtcttgaattcctgaactcaagtgatctgcctgcctcagcctcccaaagtgctgggattacaggcacgagcccctgcacctggccagggcaaatatttaataagaaattgcatgtgattttctttgcaatatgattattataactctttccaaatattgctgatgtttttcagctattctcagacacatcccccttatactcccctctttcttttcttttcttttttttttgagacaaggtcctgctttgccacccaggctggagtgcagtggcatgatctcggcttactgcagcctgctcaagtgatccctccgcctcagcctccgaatagcwgggactacggatgcatgcaaccacacccagctaatttttaaattttttgtagagaaggggtcctactgtgttgcccagtctggtctcgaactcctgggctcaagtggtcctcccacctgtgcctctcaaagtgctgagattacaggcgtgggccactgtgcctggccccctctttcttatatatacacattttcaccaaagcattcattgctttaaagatgtattttagtctgttagacttgyaattgatatgaattttaaaatgtgtacatatttttgtttcaattaaagtagtataaaagtacaaaccttgtccatatcatggtctgtggtaagtatgtatattccaaattgatgatgattatttaaaattagaggactttattcaaacaattactcatcaagtgtgtatcatttctaattggaaaaatgtgtacatattcttgatctagtatgtgtttctatgcaaataaagtttgattttaggaaaagggatttataatatctctgaaatagtatttttacttttaaatctataaaatcggattttaaaatctctaatttgctttttaggttaaggattccatayattttttatttttttaaaagtggtttcagaagatgcctattgttatatttattatcatttttattaatgtcataaagagaaatgtagcaatttctttggggtcacagaagaggggttggctaaaattagaagtaactatttcaagcttttggcaaaatcttcacagaagacttggtgtcagaggaaggtttgaacgcataggattttggtattaaatataagatgacaccaggcaaaaaggaaagagaaggaagagatgttctggtttacaatgcttggagttgagggctgggatgctgatctgactcaagacatgttctgggccaacttctgaaggattttgtagactgagctaatgaagtttgattttatcctgcaggcgatgggtggtatttctagctccagattctgtatatgtaggaaatgtagaggccttttgttggttctgcccagcattcagtcagcacctacagagaatttgagtttcttttgtgaaatcagctttayctgattccagaagatacctgttttcttacttaaatttatcagctcagatgttaatacctaagcactattgtctagttgcgaggtattttaaaaatctttcacatcaccttcttaaatgtcatatatttttaagttatgctttacaaagaagctagcattttatttatttagtaaacctaaatttaaattttgtttttactgattaaagtaattcatctttctttctctaatctgatgcatatcattttcttcctttcttgttcccagggatctctcaatgctatttgccttcattagcttgctcgttatgcttcccrcttggtggattgtgtcttcctggctggtatggggagtgattctatttgtgtatctggtcataagagctttgagattatggaggacagccaaactacaagtgaccctaaaaaaatacagcgttcatttggaagatatggccacaaacagccgagcttttactaacctcgtgagaaaagctttacgtctcattcaagaaaccgaagtgatttccagaggatttacactgtgagttcattttttattttatttcttaaatgattattttctattccataaaggagaatatttattacctattttcatttctatgttgcatttataggaaaaaaaagtgcttttctctttagtacttactaaagtcaattaactgctaagtgaaggaataaatacattatgtgctagatttaatatgtagtatgattctgcctatctgctttgaggaactaaagtactttggagatcatgattatttctgtatgttaccatgtgattatatgagataatatatagagagtgtctgatactgaacctaacgtgcagtagttacccagtaaatgcttgctcccattactccctttcaaatgccttctttatgatagacgtatctgctataaatgcattttgaaaactcttgacatgtactaataactgttcaggtaaatattagcagatattatagcactgatactctcagaatatcatgcaaatagtgatgttttccattcttacaggaaattaaatattcaccagtctagctgtaagtatattaagctgtaggatatattgactacttaatctattattaaagggaaagttacatttattgagcaccaactatattccatatactatgctagtcacttttgcatacaactaaaggcatagaattataaatggtaaatattcatatccattccatctgattctaaacccggcttgcagtacactggacacctgccaaacactaacagatgacagttgtgtgctagtatatttaataatttatataacctatataacttttgcaatctataggtgggggaaagtaagcatatggtgaagaacattcatagctcttaattagtcgtatctagaaaatcatgaaaagagggagtgaagaacctctggtagccatcgcatccttcactctgttctgctctagaacattacacaatcttgagataaacactgtttctaaaaaatcatggaatagagaaatggaagaatcccagtagttatcttgttctttactctcttgtgttctacacacaatcccaagacataagatggattttataatttctctttcttctcaatcaaagtataaaagtcagccaggcacaatggctcacacccgtaatcccagcactttgggaggtcgaggcatgaggatcacttgagcccaggagttcaagactagcctaggcaatctagcaaaaccccatctctacaaataataaaaaattagccagacgtggtggcacacacctgtagtcccagctactcgggaggctgaggtgtgaggattgcttaaaccccaggaggttgaggctgtagtgagccaagattgtgccactgcactccagtttgggcaacagaactggagacaacagattctgtctaggytgggcaacagacttggtctcaaaaaaaaaagtataaaagttcttagcatctgttgatttttgtcgttgcattagttgaagtctacttcttattgacttaaaggatagcacgtttttaagttgtttaagtgtcaaattttaaaagtttaaaaaaatcatgcttaaaataagtaatatttccggccgggcacggtggcccacacctgtaatcccagcactttgggaggccgaggcgggcggatcacgaggtcaggagatygtagctatcctggctaacacggtgaaaccccgtctctactaaaaatacaaaaagaaattagccgggcgtggtggcgggygcctgtagacccagctacccgggaggctgaggcaggagaatggcatgaacccgggaggcagagcttgcagtgagccgagatcgcgctactgcactccagcctggacgacagagcgagactccgtttcaaaaacaaaaaaaaagtaatagttcctttttattttattgagaggacttactggttgaacaaagtggctttgttcaactaatggttaggcgtgtatagaggattctgtgccttgtgtcattttccaactttatctgtccccatggaatttgcacgaagaggtaaagtgggccagttagacatgatttaccttccagattatgacttctacccattcagatgacagacgaagagaagtattggaagaaattgtgcttcctttgtctctatctaactggataatgggttgaaaaatgaataataagtcttgaatcataattttttagacattttcaaaattagacagtttttaaaactgatttagtaaaatggagcacaagcagtagtgccatatattgaaatcatgaatgctgttttgtttctgactcaaattgtcctctctcacaaataattgaaacyttttttgccttcattcccttgtyttaacataagcctgtcagtcatcatcctctgctttttatagattttttaaaatttggtttttatagatttttaatacctgaatacattttagtatggtttaacatttttaaagttttgagttaggtgtgttgttttatagctttgtgttatagtataagcaatttacaaatgccaatattttgttttactgttgggaaagattactggttaggtgaaaaaatttatctgataaccaggtatttactcatatatactgtaagttatgaaatgtaatacattgtatgtcattgttacaaattaggtactccccattaatcttatgggaagtgccatgaaatgtgcttcctcttgaacagctttgagagtagctatgctactatgcagtaacccttactttgcctttctacttgtattcccctgttggccactggtcctgttatctttccacgtcccctacttcattttgagtaggtaagtgccagtggcagcaggtgggtaagtaattttaccctacttttatgaatgtacagaatgtatttctatacagtattttttctgtacaagtgaccaaaatatgatcagtgaacatatgtgatgaacgtatgtaaatgtatattaagaatttaaaagtgtttataattaaggtcttcatacttcctatggatataggttttgaaaactgaatataaagtagctcttctctaatatatgttagcaagcatagtgtctatgtaaaaaagatgtggattcttaataaatatttctacatttctgttatatctcagccagaatccattgtttccccacatcagaggaagcctttgctctttgagatgttaattttttgtcttttttttagtggttgtctatatatacatatatatatatatctagtcacagaaatgactattttatgagacctgagttgacatatgtataatcattttctagtgaagatcatgaaagaggaatttgttttctacatttaatagaattgtggatttaggaaacaaaaactttaggacacctgtacagttgtatcacattttacttttcaagtttgcttgacagggtcagtgctgcttgcccatttaataaagctggacagcatccaagtcagcatctcatcggtcttcggaaagctgtctaccgaactctaagagccaacttccaagcagcaaggctagctaccctatatatgctgaaaaaatatccttttctgtttatatatgaaactaagcaatgtttctggagtcctgaatatagatattatagttgtatcctgtgaaagtttactgtaaagtgagattgcctattttgaagctaatttccatcatcaattctatgttaaaactggaaatgcattcctgggggaatgacaataacagacaggaagaaagttctgttcttctgtgactgctttttaaacaaggaaaaaacttgaagtctcttcctttactcatccaaagaatgaagtcgaaagagtctggctttgctaggtctgacattttaaacaaatttctcaacatggcagatttgcatcatggcatgttaataaactggcaactggaaatccttcccttttcaaaaaaacaggttctaggagcagaatggctaagttcaaacactggctgtatcagttacttcctaagtgactttaagcaagtttcttaacctctctataccttgctttagtcgtgtttaaaatggcaataataacatcatcttccttattggatttttgttaggatcaaatgagttaatccatgtaaagtgatcagacatcatctagcatacagtaagcacccaaagactgcatgacaataagtctgtcacttaaatttattaaaataggaaattagttctattagccagaaaataaaggcatataagagctttattttagtaaagacatatagataagttaaatcctgactaagtagaaggtaaaaagacaactttgccacttcagaatgctgggtattgtagcactgataaatataatacttaaagtttacagggtgctttatgttctatcatatccttatacaaacctttgtagctagattttcttgtctccattttatgagaaaactgaaatagaggttaagtgacttgtgcagtatcatacaactactaatggatgaagttgtgtcttgactgtaggacttatgacttgaaaccatttttctctctctttctctctctttctatatatatatggaaatttcacatatatatgaaatggagagaaagcattttaatttttattaagaacttttccattttattccccattgcctaaatgccggtctgctatatgtcagccattcttccaggtgctaggaaaactgagtaaaaatatgtactacctacttctaaagacttttgaatgtgatcaatagagaaatcagtattcataatattatataagtgccgtgggtgccttccaacatagcagggcaacatacttggtttatggagtcagagaatgctttcagggaggtgacatctaagttgagcttcagagaatgaatagaagttggccatgaggataagagtctgcattccagatagaaggaagcaaaaacatatggaaagaaatagagatatgacagtgtggcatgtgaactgttggtcattcagtraatatttatggagcacagactgccaggcaatatgctaatcactagacgtacagtggtaaacataatagacatgatccctgccttatggagcttgtagttcagtgtagggtagggagtgagagggttagcctatcaaagactacagactgtatgagttctttgtgccagtcatttttctagaaactggggacctggcagtgaacaagatagacaagatccttattctcgtggagcttaccttctagtagatgaaataatcaataaaatatgggcttggtgcagtggctcatgccagtaaccccagcactttcagaggctggcttgagcccaggagtttgagaccagcctgggcaatatagtgagaccttgtctcttaaaaaaaaaattcttttaaattagctgcatggtggcacacacccgcagtcccagctacttaggaggctgagacagcaggattccttgagcccaaaaggtcaaggcgcagtgagctgtgtttcagccactgcatyccagcctgggcaacagagtgagagcctgtctcaaataaactaaaataaaataataaatggacagatgggattcttcagataaaatagttactatgaagaaaaaaaaaaygggaataggatagagaatgatcggtggggtgctgctttttattagatggtaagagaaggcctctctgaggagctgrcatttaaactgaggtttgcatgctgagaaagatctgggggaagagtatgctggttagatagaccagtgagtagaaagatcttgtggcaggaatgaatttagcatgattggagtatagaaagaagaccatcatgagttgagcacagtaagttggaggttagagtatgaaatgaaacagaggtggccaggggccagatcatattctccatataaaaaaccttaatamatttaactaaaaaagaatccaccaatcattttgagaagaccagtaagatatgtaaacccttatttgcctgatcaaagtaaagagcagaaatatacaagattagtaatgagaacacagtgataaccattgatatagaagacattaaaataactgtaaggggatagtatatgcagctgcacagcagcaactttgaacatgtaggggaaaatggttctttttgtttcttttgagacagtgtctcatctgtcacccagactggagtgtggtggcatgatcatggctcactgtagtctcattctcatgtgatcctcctgccttagccttccragtagctggaaccaaggcacacagtaccacacctggctaatttttttgcattttgtagagacagggtttcaccattttgcccaggttggtctcgaacacctgggctcaagggatcccacattgctgggattgttataggcatgagccactgagcccagcctcatttcttatcaaaataaaaatctgcaaaactgacctaggaagaattttaaaacttgaagagattggacataggataaagaatactcaattttaaaaagaaaacacctggtttatatgtagacaatgcaaaatatgaaactatttttaaaaaacaatgatagagttcttagtgctctaatgtsgatctccaagttatattaagtgaaaaaaaaacacaaagtgcacggattggtatttattgtatccttcaatttgtgcataaaagggactgtgtgtttatacagggataaatatgtatgtatgtatttatgyacatgcatgcatatatacctacgtatctccagatacacatttatatttgaatttgctcttatgtatgtatgcataaacaatcttagaaggtactggtaaatggaattgcctttgcatttggatagtggaactacatggctaaggaatagaggtggaaagtagtttttgctgtatcccttaatacctcatgaattttgaatcctgtgaatataytacctattcaaaaacaaagtgaatttaaaattttttaactaccagatccagatggttttatagttaaaaaaaatttcagactatagaaaaggttagaaagtttccctatatcattttatttatgaaaatactgtaatctcaataccaaaacatgttgtattacaaagaataaaaaccagttgtattacaaagaatatagacccatctcataagtggagaaacaaaatgtttaaatggaatatttataaatttaatattggattgtatcaaaagattattataatatgaccaaataggaatatgctagaaatgcaaagatggttcacgatcaataattatttagaaaaataattaaaaggaaaaatcattattgattttgatgtgtctgtaaggatgagggcagaggaaacctaacagtagtctatgtcaaacaagctagatagaacaggcctggtgccacttatatcagtctgtgtatttcagataacgttcaactaataatgtcctgcagtacgcagactgagaggaaaagaatatttactatagcatagtgagggccctgaaccatgacacagtaaagtgcacaatacagctacaaatggtaggtgtcaaaaataacggagctgagcgcagtgactcacacctgtaatcccagcactttgggaggctgaggcgggcagatcacttgaggccaggagttcaagaccagcctggacaacatggcaaaacatcatctctagaaaaaaatacaaaaatcagctgggtgtggtggcgcatgcctgtaatcccagctactcgagaggctgagacatgagaattgcttgaacctgaaaggccgaggttgcagtgagccgggttggtgccactgcactccagcctgggagacaaagcaagactccatctcaaaaaaataaataaataacgtatcactttaacccttttgaagacttgaactgttaattttttagacattaaaaattgtatccacaagtatccaagatatctgaggtattatgttaatatattagatacttaaaattaatttgtgtttaaaaactgctgtaaacctcctcatccaaaagttcagaataaagattagkgaatgtgatataggacaatttcactgtatcttttatgctttcatgaaaaggctttgttgattgccttaacctaatttaacctaccccctgaactctgagagtgacaatgtaaccaactacatctgtgtggtgccttttaaagagctgggccttggacttagtgaagagcagatttcagaagaggaagcacataactttacagatggcttcagcctgcctgcattgaaggtaatccatttgtgtaagggaagggctgaagaaaaaatagatgcacttggattgtgtctatgctttctgaatgtaaatagtgcgtttgttccactcattgtttgctgcataccatcatcataaatgcacgggtgatgtttgtaactctgtctttaagagccgagagcataataaagattggaagaggagatccttagattttgacgtccaaatacttaaaatgcttaaagaaatgccttaaattagagtttggagataagtgaatttactttaattggaggccaaygtgagtgattttataactagccatttgtttcaacaaacatggataatgggttatctccaaaattcttaagtttttttttcatacatcaaaagccacatgaaaggatacatttagctacatagaaattaaacttttgggctggccgggtggctcacgcctgtaatcccagcactttgggaggccaaagcaggcagatcacctgtcacctgagctcaggagttcgagaccagcctgaccaacatggtgaaaccccacctctactaaaaatacaaaaattagctgggtgcagtgtcacatgcctatgggaggctgaggcaggagaacccggaaggcagagtttgcagtgagctgagaccatgccattgcactccagcctgggtgacaatagcaaaactccatctcaaaaaaaaaaaaagtaaacttttaacttcaaataatgcatacttcaaatgcaaacaagctcarraaaaattacaatgatttataacaaagagttttaattttttttttttatgcagagcactctaaagtgtctaagatctatagaagataagttgggtgcatgaactgacagttcacaaaaaaagaaacacaggctagtcccagtgaggttgtattttacaacgaattgatcacaaccagttatagatttctttgttccttcttcactcccgctgcttcatttgactagcctaaaaagaaaaaacaagaaaagaagaaatacaaatggccaataaatatgataaaatttttcattttagtaatgaaagaacacaaataaaaataataagccgaccattttgccaagtatattgaaagttggtaatttcattatcactgaagattcagggagacctcacacaccaatggtgaaagtataaactggttcactttagcagtgaataccaatcttcatacaggtgtatgaagcaaaattgctttattctagcaattttaatttgcccttacagatttatctcagaaagtaaccaaagatatacccaaagtatgttcatgacattagtgtagcagccaacattggaaacaaattttttttgtttttctttttcttttaatttttttcttttttttttttttttttttttttgagacagagtctcactctgttgcccaggctggagtacagtgtggctcaatcacagctcactgcagcctcaacctccccaggcctcaggtgatcctcctacctcagcctcccgagtagctgggactacagttacatgcctccacacccggctaatttttgtattttttgtagagacagggtttcaccgtgttgcccaggctggtctaaaactcctgagctcaaactatttgcccacatcagcctcccaaagtgttgggataacaggcatgagccaccatgcccagcctccagtagtatttttaagacattgatccaaatgtcttaagttcctactaagtatttagtaagctctctttagatgtttctttgtttttagtttttaaaacttcccttgataccgtgaaaattagtgcaagtattgttgttagcatttatcaagatccattttgttttgagactgtattgacttccatatcttttacattttctaaatcaacataaatgttctaataatcttgtttgttttctttctttcctattacgtaaaatttgctttggcttattcctactccccttctaacccatctcaataaatggcaccacaaaaaacctggacaccatctttcttgtccctctttttgcccactcacatccagtctgttagcagattcttatgtcacttctaccttgaaaatgtattttaaacccatccacttttttctatatccacccccgcccccgcaccatcctagtcccagccaccatgctagtcccagccaccatcatttcatacttaggctgctgcagtactttcctcagttatctaaagttatttgtttcagaatgcaacttgacatgtaaagaacctttttaatgatttatcctttgaatttgtaattccccttctacaaactgcaggaaattatttaaaacatagttaaactttatataccaagctgcttattcactttgtgtttataatagtgcacaatggaacactgcctgaaagttcaaaaatagaggaatggctgtgtgagtcatgccagagccacatggtgaaccattgtgtagcagctacagcttgcccgtgaaaattctgtaaaaacttggagaaacatctgttgccagtgaaacaatcagsatacataagtgtatatgcaatatgtccacaaccctgtttaaaaaaaaaaatgaggagaaaataccaagatatatatagctactctttggggtggtgggactatagatactttcacaccctttcraatttaatatcctaaccttgctttattctttaaggaaaataaagatttttttcaaagtacaatttaagagattcttaatgtggaaaatggagcagacctgtgtttatattttagccctgactgactagccatttgcctttgaataagttattctttgaacttatgtcacctgtgaaaaggagttaccatccctgccttataaggtattagattaaatgagaagacatattaaatacctagaacagggcttgacatataatgggtacccccaaatggtaatagctgttattctttaagaaggacttggagaaagaattatagtatttcatttccttttaaattactttttgttaactcatcaagatgccttggagatttatttctttatgctgttgatgtactgtttttaaaagcttattaaatcctgaattgtactctagcttaagtataggcagcaaagagaagttgtggaccctgtggagtcagattttccaggtttcactcyagctccgttatttgactactgtgtggtcctgagcaaatcattgtttctgtgtttattaaaatgggataattgcartgcttgcctccaaaggattagatgtttgtcagttcagtgcctggtgtagagtaagcaattaatgaatgttagctgatttttaaaattctatctgatatggcctgctctgaaatgtgagacttgttctctgttgctgtatccccatcctaccttccaacaatggtgattatagctagattccttttgctcactcacagtgttttacaaatcaaactataatagtatttttatatttcttttatttttacatataactaacctgtaaccaaactcaatgattgtgttacagttaccacatttatcaggctctgaaaggagccttatcttgaggagctctatagactttgcaaactgttgaaaacccctgtaatgttcaaagactgtgtattacccccttctgtagttaccactgtatcgttattsagataagaaatttaaaaatagattttgtaagttaaatttttaaaagtgtgttgccccctctaaagaaaatacattttggatttattttttattgttcccgtatcttccctcaggaaagtttagtgatagtaagtattgcacctttagaaagaaaagcaacctccaaattgtagcctgaggagacataaataaaatacaggttgaatatttcttatccaggcgtgagtcttatccaggcctggcaccgtggctcacgcctgtaatcccagcactctgggaggccaaggcgggyggatcaactgaggttgggagttygcaaccagcctsaccaacatggagataccccgtctctactaaaaatacaaaaaattagccaggtgtggtggtgcatgcctgtaatcccagctactcgggaggctgaggcaggagaatcgcttgaacccaggaggcggaagttgtggtgagccaagatcgtgccattgcactccagcctgggcaacaagagcraaactccgtctcaacataaataaataaattaattgattaattaatttcttatccaaaatgcttgagactagaagtgttttggattttggattttttcagattttggaatatttgcattacacattgaggttgagcatccctaatccaaaaatttgaaatttgaaatgttccagtgagcatttcctttgactgccatgttggtgctcaaaaagtttcaaattttggagcatttgggatttcatttcaargttttggattagggatactcaatcagtccctagaacacagtccttatccctctcttttcctttaagtttttaactagttttttaaatttatgaagtcatctrtttcctgctctagaaaaaataaatgcacacattgtgaaatgctttaaatcaaaattttctgtttacctatcagctatggttatctccttatccagaggagctttccttatccaaagaacaaacaggaaaaaagaaatacatatttctgagttctggtttaagtgggtaatgtgacagtgattggatgacaaattagtctttagagacaaggtcttgctcagtcacacagctggtgtgcagtggtgcaatcgtggctcactgtaaccctgaactcctgggctcaagcgatcctcccaccctagcctcccaagtagctggaacaacagttatgtgccaccatgcctgactaatttttaagaaaatattttgtagaggcaggggtctcactgtgtttcccaggctggtctcccaactactggcctcaagtaatcctcccacctgrkcctcccaaagtgctgggattacaggtgggagccactgcgcctggcctttagtcttttcaaaagccgcagtaaactgtaccaacttgattcttgcagttatcttgacccaacatgctggaatcatccttgttaactctttttctctcaataccaatcagtcaagagattgtgttagttctgctttcacaatgtatccagagtccatctgctgctcaccttccaccactaaccaccgtggtctcattaatgcttacctggaatattgcagtaacttccttactggtttctccacttctactctcattttcctataatctctcaactcagcagacagtatgggcctgttaacgcataaatcagattatgtcatgcttctgctcagaacccttcagtggctccccattgcttacctggccccagccgtactgagcttcttgctgttccatagatctaccctgtgtgctcccacaacagtactttgcatttgacttcctgctccctagaactctcttccttgatgattatctcatggctcacttccttcaggtgacacttttagagacctccccagccagccccttctcctctctccttcgcgctttctgtctctctccccccctttcatatgtgtacacacacatacacacacacacacacacacactattccccccctttcatatgtgtacacacacacacacacacacacacacactattcctcttctttgctgtgtttttcccatcaaccaagaaacactatctttctttttcttcctcgacaatcattactgcaaaagggaaatagtatcttttacttgtaaattattatctgtgcccctctacttgaatataagctccatcagagtggggactcttcatttttgctcactgctgtttatctgcacctagaacagtgcctggcacatcatgggtgctcaagaaatcatttctgaatgaacgaacaaaagaataaaaatcattgtaatcataaaatttaacagttgaataagaaggcttgcaagtaaacttgcaagtcaagaatccctagatatcacatctgtagcaactaggaaattaggccttggtcactttaaaaaaaaaataagttaatggtaaaatagatatacatgaaataatcttaattcattattggcataattttaaaattcatttactaaaaccatctaaatactgtctattttcatggttgtgaataattggaatctaaattacccaaagtggtttcatcctctttttattccctgctacctcttgtttcatactacattgtttcctcatgcatttgtttcggagatattgtcctcatcttgaataggactatatctggagaaatattttgctgccaggattcaggatgtatctcaggaacgggcctatgaacatattcagactgcattttaaaaaaaagaagaagaatgggatttatcctggcaacatactgagaccccatctctaaaacttaaatattagctgagtatggtggtacatgcctgtgtttcccgctactcaggaggctgaagtaggaggatcacttgagcccaggagtttgaggttgcagtaagctatgatagtgccattgcactctagcctgggcaacagagcaagactctatcacaaaaattaattaattaattaattaaaataatgggttttgcaatttctcatgtcagacattcctggagtattgatttttttttttttggatggagtcttgctgtgtcacccaggctggagtgcagtggcgccatctcagctcactgtaacgtcygcctcccaagttcaaatgattttcctgcctcggcctccgaagtagctgagactacaagcacataccaccatgtctggctaaattttgtatttttagtagagacgaggtttcaccatgttggccaggctggtctcaaactcctgacctcaagtgatccatccgccttcacctcccaaagtgagccactgcgcctagccctggactgatttttatgttaatttcttagctaattcctagggcaaggtaatagtcttattttgaaacccaagcttttgatccatgtgactcatttctttggagagaaaaaaatatatatatatatgtatatatatccactagtcctactatcttcttttctcctatgtgaaawttttttttaaataatgagtgaagattcacttttactaaattatctcattccatcaacacttcccatctagggcagaactgtagtaaattatatattgatgttacctgctgtattggaatcagaggttcccacacacataatttgaaatcatattcttggctaatcttaaggtagtttaagttcggctatatttattatttaggataaagtgcaaawtttaaaccagaagttaagataaacaaatttatagtttgttttgaacactgaccaatatttgttattgatctagttcttttttcttttttctttaaggttttgttccaactctgggtggcacagagttcagagttcttcagacggttagccctattactttctacagccaattcacctcctgggcccttacttactccagcacttctgcctcatcgtatcttatctgatgtgactcaaggtctacctcatgctcattctgcctgtttggaagagcttaagcgcagctatgagttctatcggtactttgaaactcagcaccagtcagtaccgcagtgtttatccaaaactcaacagaagtcaagagaactgaataatgttcacacagcagtgcgtagcttgcagctccatctgaaagcattactgaatgagtaagtttagaaattataccaagaaaggtctcggtaattagcaagcttcattcgtgtaccattgtggttgttggcttgtgtcctacctagaaaaaagaaacaaaactgaggcatgagcatgaagggtgatttatagctataaatatagcaaaaaaaaaataatttataagtactataacttgagggagttattatttatagtttttacttttccttagttcaacagaaaacttggaaaagtaggctaaaagcaggtgttgttcattctctttgagagctgaaatggagatggttataaagaatgagtttcttttaactgtcttaaggtagtgctcttaaactggaacctgcagtccaatagaaatatctaccagtactggaacagtatatatgttatatatagtggaagagtaacatattgctatttttctaaataaattacagcagatctgaaaatttttttgtatcacaggacaagctttgtggtcccagttgaagagcaaaatgtagagtctagagtttatatttgttcatttcctaccttgcatgaaattgttggtayactaccttaattcctaaatttttatgtcccactttggtatacctttatcagctgaaaatactattttcacatatttgtacatggaagttttcaagtttaaaaattgaatcaaggcatttaattgaatacagtcatttccagtgaaatttttctctaacagttaaatactcatcgtgtaggactggatcaaatgaatggttgggttcaaattgtgttggtaatcaggaaggtcctaggaatttaaagagctgacaagattgtagttgatgtacttgaccctgggatacaaggcaagaagtggaatggggaaggcagtatttgattatgtaaataagaatgggtcaaaaggacttgatacatcagcaaaatcaaaaggctaaatcagcaaatcaaaatcactggaattagggaggataagagatacaaggataggaacttaaagtcagaaagatatttttagaagctaagtttttacccatcagttcaaggcctgagttgggcttgatataaggcttgatataaggctgatataaagattatggcataggaaaaatgaagacactatgaactcagggtattccagtggtctatatctgctgttctaagaaagcaggtaaatgctaacgaggctcttagccctgccttctacagggaactgggcgataaggccatctccacttgagtgggtggcaaaggttggattgtcctcaaaggaaaataagatttcagtggacaggttgtaggcaaagccagagcctccgaagaagtaagttttggcaatagaatcagaaatatacggcgcatattagaatgcatttgagtgagggaagatggctcagggaagaaagagtgctacacaaggtagacatgaacacaaaaaagaggagctttgtaccatgagcaggaattgtggattatgcataggaagtttttgtcctgttttaaagtgtaatattctatacatgctaatgtctctcacctttctaagtattttcactagaaagtacaccagtcacaaaccatcatatccaatttgctctgtagtgctgctacatacaactttttgaattgttaactaaataattgttttgtgtttcatattttagaatgctctttttgtgtctcactcctctcccccttgtgttctttgctgttcccactctcagtgcctcatgtggaaccatattgtctcttccctacactagggcattaatttctaactgttctccccacctccagggtgtgtatggccagattagtgttactgaggcatatatttgctttctcacttcactgaaaatcttgactggtttcggagtcatagcagctcaaactaaagtccttacaaaacatactatagaagggtttgtcataacctgactacagtctgtttctatctttarttctcattcctttccttcagtccagccaaactgtataaatgccttttcccatggtccttctataagttggtgcaaaagtaattgcagcttttgccattaaaagtaagggcgggccaggcgaggtagctcacgcctgtaatcccagcactttgggatatgatggtttgtgactggtgtactttctagtgaaaatacttaagaaaggtgagagacattagcatgtacacaatattccactttaaaggctgaggatcacgaggtcaggagatcgagaccatcctggctaacatggtgaaaccccatctctactaaaaatacaaaaaaattagctaggcatggtggcaggcgcctgtagtcccagttactcgggaggctgaggcaggagaatggtgtgaacccggcaggtggagctttcagtgagccaagatcgcaccactgcactccagcctgggtgacagagcaagactctgtctcaaaaaaaaaaaaaaaaaaaaaaagtaatggcaacaacctcaattacttttgtatcaacctaatagaacaagcttccggccaggcgcaatggctaacacctgtaatcctgatactttgggaggccaactagagcagattgctggagcccaggagctgagaccagcctaagcaacatgggaaacccttatctctacaaaaaaatacaaaaattagccagtcatggtggtacacgcctgtagtcccagctrcttgggaggctgaggtgggaggatcacctgacccctggaggttgaggttgcagtgagccgaaatcacaccactgcactctagcctgggtgacagagtgagaccctgtctcaaaaaataaaaataaaaaataaaaagaacaaccttcctcaccttttgtatatgggcccaaattttatccatccttcaatgctacctcaaaaatacctcttccttagttgttccccatctgtccttgcagttggtagtaattttcccttcttctgatttctcataacactgtctctctgtggtattatccttttgtgcctgtattcagcccagttttacatcttactagctttgtgactctaggcaagtttccccgactctctgggcctaattccttattatctgtaaaatggaaataaaatggtagttctaattatttatgatattgtagtctttttcttttctgataaagaaagcaactacagaaagcttgtatttatttattcaaagtaaccagtgctattgatgcaaaaaagaaaaacccaacaattcttccaacactgctttcaaaatgagcatataaaacttkattttcattagartgtagttattttgtcatactagtaaataaaaaaccaagacgctccccccgaccccttcttttttttttttttttttttttttttgagatagagtctgtcactctgttgcccaggctggagtgcagtggcatgatctcggctcactgcaacctctgcctcccacattcaagcgattctcctaccttgacctcctgagtagctgggatcacaggcacctgccaccatgcccagctaatttttatacttttgtagagacggagtttcaccatgttggccaggctggtctcgaactcctgacctcaggtgatccacccgccttggcctcccaaagtgctgggattacaggtgtgagccaccrtgcctgaccgcaaattttacatgtatgtatgtatgtaacaagaataccaagttagtctttcttcataaaaagcaatttcaatttgaggatacttcatatttgccttttgtgccagcaccaagtctgcctcatctgaatccttccatttcatgagcaacatcaattcttcactgccatctgtggcaccaattattctttcaggatcaagacctctggcaattcctcttggtttgtcaacagcatctcttctttgatttgctgtcatcagattcactgccagataaaggttttctttttgtaccatctttttcttcaccagctttttgagaattaagaaatgcttcaattaactctggacaatctaaattttcttcaggttccaaagtattgtcagcatctgtaaattccttcaggaaatattccactttcccattccctgcgtgtctatctagtacattttccaccacaaattcttcaggctctgcctcttcaacttttttacttttccattctgtttctttcccatgttttgcaatgtggttttgttggaggccattttttattgcagacctgaagagctattattcactgcctccaagctgctctgggtcatgggtctgtggtgtctccagtcttgcatgtcaccagctcgagccacatccaagtggggagggagccagggagctgttgttggcaggggaagtgggggtggggtggggtagggaggggcggtggatattatattttgcttacatatatgtgtaatatcacttgttatttcttatgaatagcagatgagtttaatttttctttttggcccataaaatgcctagtatgtatgcmagaaatatttgttgaataaatatgtaatactctttataagctttttaaaaaattgtgtcaaagaatacataacaaaaattatcatttaatcattataaaatgtacagttcagtggcattaagtgtatacacattgttgtgtagccattaccactgtccaactccagaacttttttcatcttataagccttttttcttttttttcttttaattgagatgggatttcactctgtcccccaggctgaagtgcagtggcgctattgtggctcactgcaacctctacctcccaggctcaagcagtcctcccacctcagccttaggcacatgctaccatgctcggctaattttttgtatttttggtgaaaaaggggtttcaccatgttgcccaagctggttttgaactcctgagctcaagccattcacctgccttggcctcccaaagtgctgagatttaagcttattttaaaataagcctcgtaaattataaatttttcatttcatattatagaaatctgtttctgtttttctttatgactcagggtaataattcttgaagatgaacttgaaaagcttgtttgtactaaagaaacacaagaactagtgtcagaggcttatcccatcctagaacagaarttaaagttgattcagccccaygttcaagcaagcaacaattgctgggaagaggccatttctcagrtcgacaaactgctacgaagaaatacagataaaaaaggtacctgtgagagatttctttgccatatgcttatcagacatgcttattccactctggtrggattttattaggtagacttcttgtctttatgatgaaactagcttcaaaatttcttagtttacttttttttaatgttgaatttatatgtacaaagtgacactgaatacaattcttggctctcattttgtaaattaaaaatgaatatgatttgaaagttcagtgaatcatatctcttttttaaaaagactgaaatgagagaataaattttgatagcatttttctattattagaacttccagaaactctttttcagttaggataataaaagaatgagtttgatagtctggggctaggaacttgagtttttcttttaagataaaatacttaactttagtcwttcaaaaataatatacaaatgatataattagtggcactgcatatttagtactaagatctaaagacattgtgtcattatttaataatatatcagattgctttgtgctactaggtaaaaaaatatatatatagtcttgagatttttccaccaagctgcttttatgtgactccgattttatgcttgtttttacctcactgatttcatttttcaatgtttggcatatcaatttttaaaaactgtgctgcaaatcagtaccatatttatctcttggatgtttattgtgaggttactcagacttaggcatagaatttgcattgttgctaaagataattaatgctttaccatcctgttatttttgtgtttacagctagatttgtaataatttctttaatgtcttaaacaagcttgaacaaatccttagataggaaaagtattcactttttccaaaggaaatattaacatgctaattactgatatattacccrtaggttttcttaatatctcaaatgtaaactgtgaataattttttctccaaaggataaatctaccaagaaactctgatatatgcaaatacttatgcatattaaactttctgatatgacatctagagcttttgtgtacattttctacaaatagaaacactcagaagamctttggttgttaaaagatgcatcctggccaggcacggtgatgggagtagctgttacccagcttctcaggaggctgaggcaggaggattgcttaagcccaagagtttgaggctgcagtgagctatgatcgtgccactgctgcactccagcctgggcaacagagcgagactccgtctcaaaaaaawaaawaaataawtaaataaataaataaataaataaataaataaaaaaggccaggctcagtggctcacgcctgtaatcccagcactttgggaggctgaggtgggcagatcatgaggtcaggagatcgagaccatcctggctaacacaatgaaaccctgtctctactaaaaatacaamaaattagccgggcatggtggcgggcacctgtagtcacagctactcgggaggctgaggtaggagaatggcgtgaacccaggaggcggagcttgcagtgagctgagatcgtaccactgcactccagcctgggcaacagagcaagactcttgtctcaaaaaaaaaaaaaaaaaaaaaaaaagaaagatgcatcccattcatccctcctttagcacactatgagatgttgaatcttagtctatcgcttatccactattgttaaccattactgtgaaaactttctccacctcattgggtaggtaattaagataagccattttctaattattttctgtatgtgtggcttttgcttatagataataatgatatggattaagacacaaatagttcacaaacttttttcactaaaaaattcacagtggccatgactayacaggtttaaatttaaaaaatgttcatttgaatattttaagaagcaggtactttagttagccatatctttttttaaaaaggtcttattttgaaatcatttcaaacttacagaaaagttgcaatagttgaaagtctccttcatcaatattccctagttgttgacattctgtcacaattgccttatctatgtatgtatctgtatgtgtgtgtaattcttttgatggtggtgttactctgagccatttgagagtaagttgtagacttgaagccccattacccctaaatatttctgtatgcatttttgtaaaacaggaacattctcctgtgtacccacagtataccatcaaaatcagaaaatgaacaccaaccatgatattgtcattttatccacagaacccattcaaatttccctgattgtcccaatattttttatatgtctagacctagattgtgcatggtgttcagttgtcatgctctttattctccttttccttaaagtctttcatgataaatattttgtaaagaaatactctgaggttttataaatatgctttcttcatcaaaattttaaccactatgaatgcatataccatatgacccagtagtatcattcctacgtatttaaccaagaaatataaaaacttagtgttcacacaaaagcctatacataaatattttgtttataaactaaaactagaagcagctaggctttgggakgtgactaagctgttacatccatccatacagtgaaatactactcggcaacaaaaaaagtgaactaccaatgcatacaacacgatgaatgaatctcaatacattatgccaagtgaaagacatcacattcaaaccactacatactatgttattccacttatgaggtactcttaagttggcaaaggaacagaaaacagatcagtagttgcaaggaattggagatggagggaggaatggcttgtaaaatcttttaatggcaatggcatttagaaaccaagattagggtacttggctttggcggcacatgtattgaaattagaatgatacagagaaaattaacatgtcctttgtgtaaggatgatgtacaaattcatgaatcattccatattttatatagaatttatataaatatgtatgtatacacatatacatatatatacacatatatatctacatatatattgtggtaagctcaggaaatcattgagaataggttataactttggcattactcgaggattaccatagaaaagaatctccagttaataaagtttcccattgttaaaaatatcacaggccaggtgcggtggctcatgcctataatctcagcactttgggagcccaaggagggagsatcacttgaaaccagtagtttgagaccagcttgggcaatatggcaaaaccccatctctaccaaaaaaaacaaaaagttacttgggaggctgaggtggaaagattgtttgagcccaggaggtcgaggcttcagtgagccatgattgcacaactgcactccatccttggtgacacagtgagaccctgtctcaaaaatatatgtgtgtgcgcatgtgtatgtgtgtgtgtcacattattttaaaacgcttcatatttattacctctagggccttgttattcagagtggtccccagactagcatataagcatcacatgagagcttgttacaaatgcacccctgactttaaatccacctgtattttaataagatctggtagttgcatccacgttaaagtgtgagaaatttgagaagcattgctctgggataaaggtctgcaatttttttcctctaaagattttctgccttgcaggccatatggtgtctgttacaactactttactctgctgttgtaatgtgaaagcacccatagactatacttaaatgagtgtggctgtgttctaggaaaaatgtatttacaagaacaggcagtggggcagatttggcaagcccctgctttcagacagtagaattgagggataaggtcttcagggagcttttttcactttataaccttctgtgctgtttgtaaaagctattactgcaagcatgtaattaaaaatctggtgggtttttaaaatttttttaggctttttgtgtttgtttgtttttgagacagagtctcactgtgttgtgcaggctggagtgtggagtgcattggcgcaatttcagctcactgcaagctgtgcgtcccaggttcaaatgatcctcctgcctcagcctctcgaatagctggaactacagccatgcaccaccatgcccagctagtttttgtgttttttggtagagatgggttttcgtcatgttggccaggctggtctccaactcctaacctcaagtgatcagcccatatcagcctcccaaagtgctgagattacaggcttgagccaccacatccggcctcttgctagatttttgttaaatggattgcatgctggagctagctctccaaagattgttaaatattcagaaatttgtgagtcagtttaacatcattggtagcttaaaattggtcacagtgggtgcatttacaccatgggaactggaaatcaggaagtgctgcaaattgggtgttttgttttgtttagagctggattgccagcacactgtttaatgtacctgtttattgctattaataatagtcttatggatttatttggttttttttcttttcattcaaagaactcgatatatggtgtcaccattgatgtaatgaaatctgtgttctgctaattaggcaataatggcagtttttgagcatgtaatctgtagcaggcacttttcatgtattcttttttaatcttacaagatagtactattattttcaccactgttctacagataactgtaattttttttttttttttttgagacaaagtcgcactctgtcgcccaggctggagtgcagtggcgcgatctcrcctcactgcaacctccgcctcccaagttcaagcaattctcctgcctcagcctcccaaatagctgggactacaggcgcatgccaccatacccagctaatttttgtgtttttattagagatggggtttcaccatattagccaggctggtctcaaactcttgacctcgtgatccacccaccttagcctcccaaagtgctggaattacaggtgtgagccactgtacctggccctttttttttttttttttttttgagacagagtcttgctctgttgcccaggctggagtgtaatgatgcaatcttggctcactgcaacctccatctcccgggttcaaacgattcttctgcctcagcctcctgagtagctgggattacaggtacataccaccatgcctggctaatttttctatttttagtagagatgggggtttcaccatgttggtcaggctggtctcaaactcctgacctcatgatcctcctgccttggcctcccaaagtgctaggattacaggcgtgagccactgtgcccagccagttaactataatttaaactagaaagcagcaagagctgggatgtaacccaggtgtgactaactctacagctcttagccactgtgctattctgtctctcattagtgcttcctattaatttattcatcgttctgccatcttgcctacaaactaatcagtcattttttgtaacatttcccaaatacttctttattttaaccatttaactattgttacttttgaaaattaaaaatcaacaagtttaaaccatacttcttttttttaagtagaaagataatgattaatgatagccacctggatatgagactaagtaaccctgtcattaaataccaaacataaattttaagaattaatcaaagttaaactcacttgggtgatctttaaaagatatttccttgtgaattcatttccaattccaacctctgagtgttaaaatagcctcagggtaagtttgaagtttgtattttgtgaagaagagtgatggtctgtcttaagactgttcctrtgctgtgaatgataatattttgttcaacaagtacttacagagtacctggtgtgtaccrgatactgtgawgaggtgaagagagaagggcaggtcctcttctccaagagtttaaagacttaaagttaagttgtaaatctactaatttattgtttttcactttaatatctttatgtttttataaatacaaagttattagaacaagttggactatgaaattgacaaagtattagtaccaaggatttttttggttgggggagacaggatctagctctgttgcccaggctggagtgcagtggtgtgatcactgctcactgtagtcttgatctcyccagctcaagcgatccttccacctcagcctcccaagtagctgggattacaggtgtgcaccaccatgcccagccaatttttatttcagtttttgtagcgacagagtctttgtttccaggctggtgttgaactcctgggctcaagcgatcctcctgcctcagcctcccgaagtgctgggattacaggcatgagccaccacacctggccccaagggtgtttttaattagatgttcactcatttctgtgtggtctgtttcttatctttattcccatctattcccgttttttaaaggcaagcctgaaatagcatgtgaaaacccacattgtacagtagtacctttgaagcagcctactctacacattgcagacaaagatccaatcccagaggagcaggtaagggtgaaaattactgttctttcccttgttggatttctgtttctaatgagcttcaaaattacaacataatatattgaatttatatcagatcattagttcttagtgcttaactctgaattcattgaatctgcctgcagacttttttttgattgttatttatatctaattgtctatatctgagtggctttcaaaagtgattaaacacattgaaaattagtacattggcaaagctaccttttgggatgctggaaatgtgtttatcttgatctgagtagcagttactggtatgtgtacatatgtaaaaatcctgtgcacttgactgcrtgtactatgatatacctcacttttaaaaacaattttttaatgatcgcattggatattgacaaagrttacttttgttcattgtaaggaaaacctcttttccttaggtcatattatctattcagtattttttttccgtgtatattgcataacaagttactattcagtattcttaattgcaaatggaaaccaaccctagttagtttaacagacagatactttatttaaacttttaggtagcttacagaatatttcagagagctagataagcaggcttgaatgatgctagggtaaacagccaaatcactcaaaagaactgttgcaatggaactatcattgctaagttaatgggtggagacattgccccttgcttcgtcaatgctgaatagtaaaacttaacctccagaagtgctacttcaagaaacatatctgcaacatcctgccagaatagattttccaaagtgcttggttcttttttatatgagaccgagtctcactctgtggcccaggctggagtgcaggggcgcgatctcggctcactgcaacctctgttgcccgtgttcaagcgattctcctgcctcagcctcctgagtagctgggattacaggtgcctgccaccgygcctggctaatttttgtagtttttagtagagacagggtttcaccatcttggccaggctggtcttgaactcctgacctcgtgatccgcctgcctcagcctcccaaagtgctgggattacaggcatgagccaccgcgcccggctggtgcctgcttcttttatctcagacttctaagtccgatctgatgcaggtacgtcgattagagaatcccaggtcatttacctgagcctatactgtaaggatactgcttgggtaagcaagcatcctaccctctctgtcttagagatagggagaaccatraggtggggtgttccctaatcctaggaagaatgttcaaacttcctgggaaatctgaaagaaccacaagaaaacaaacatgcctgaccacctccccaaagtgccagcccttctaattttgattggttttgatatagctaatggctgtaacactaagtgtatggtatgttaccagagtagaaaaataactactgaagttgttaaactttttttatccacaatgctttttagtatcaactgttaggttgtttttgaagatttcaatttatccataggtatatatttgcttttttcttttcctagctctgctttaatgacctgtgccaaatgcaagtcctttttttttvatctcagagataagtaagtgcaagtaaatgaatgcttactagagaattgtttgcttcaagtaaagtgctttttcttctattcattttcaggaattagaagcttatgtagatgatatagatattgatagtgatttcagaaaggatgatttttattacttgtctcaagaagacaaagagagacagaagcgtgagcatgaagaatccaagagggtgctccaagaattaaaatctgtgctgggatttaaagcttcagaggcagaaaggcagaagtggaagcaacttctatttagtgatcatggtaagcactgactttaaagtaacaggttatttcaatgtaggggattctttctttcttgaaccatgaatgttattttagctgaagaattcttggggttttataagggtccaccagtatgcatagtactttttcttctagatgctaaatcaatttgattaataaaagagtaggaatgtaaccacattggaaatatgaagtcatacttttttatgagttatttaattttttagtaaatttgttttagaatgggcagtgagttgaataatttgggatattttaaatgttattttcaaatttagtgaatttgagattctcaactctgttgtccatatgttaaaatatttaaaaatacctcagtgaagcacaaaattaataactgtgctcacattgaaaaaaatggcccaggcgcrgcggcacatgcttgtaatatcagcacgttgggaagctgaggcgggtggatcatttgaggtcaggagttcaagaccagcctggccaacatrgcgaaaccccatctctactaaaaatacaaaaattaacaaggcatggtggcgcgtgcctgtagtcccagctactcgagaggctgaggcaggagaatcacttgaacccgggaggcggaggtttcagtgagccaagatcacgccactgcactccagcctgggcaacagagggagactccatctcaaaaagaaaaaaagaaagaaaagaaaagaaaagaaaaaaaaggaattaaaacctagaccagtgagccacatcattagcattatttaagtggtttgagcactttagtagatgggaggggagcagggtgcctgtgggcgtactccccatactctgatttcagcagagtggggtagctggtaatacaaaagccttacattcctttctgtttctcacccttcttttcttaagtcaaacttcatgggagacagggaaggaatcaggggaagcttaatacttgacartatcaacctagctaattcttagttgaattaatgcctatggatttctaagtaggtagagtgtggattctcttccattttacagtatctgtgtggaccctcgaaatcaactgccctgcttttccctcctcactagaagtacatagattacctatacttctggaaagttcctccagttctctttttttttttyccctcaggagccctatgttttctcctgtccagatctgcatttcttggttttatcattcctctttcttcccattggccccctttatagcccaggtcctcagtagattatccttgtacattaaaataccttcttagctgacttccattttcagtacttttttcttctaagctatcttgcaaactctttgcagatttttctccaacactgcattgatgatggctctctatcttaaaacctatagtggtttctccctttcttattgtgttgaatctaaactctttttcctgttttcaagtctcttcatcataagaattcatctatccaattatattttctactgtttttactatagmtatcttcttatgtttatcgaattaaactacagttcacaaatgtgttatttttattcatgaaaaaaattcatgctggccaagcacagtggctcacgcctctaattccaacactttgggaggccaaggcaggtggatcacttgaggtcaggagttcaagaccagcctggccaacatggcgaaaccccctctctactaaaaatacaaaaattagccaggtgtgatggcgcacacctataatcccagctgctctggaggctgaggcaggagaatcgcttgaacctggsaggtggaggttgcagtgagccgacatcgcaccactgcactccagcctgggtgacagagtgagactctctctcaaaaaawaawaataataataataataataataattcatgcttacccctttaccaagaattctgccttctccaccaagctgtcctctctactagtctctccttctccatgaatccttctctgagtgctccagctctgccgcctctcctaacactacagaccctcacactagaggaacattgtgataaaatataaaggaagtcttgaaccccaaagcatatagcagagaagggaaatgattaacagattgatttcctgcaatctgttcattcatatactgggcctacatacatcagagattaattttaggcactgttgttttctatatgttcagggttttgttttgttttgttttgtttgtctctgtaacaaaattacagtcttcttaaataggggccttattatcccacagcattcattcagcaaattactcattcaacaagtagttattaggtacttgttatatgtcaggcactgtttactgctgtatccctagcgcaaagatcaagagacaaaatgtraagcctcctacctgcctcaaggcttaaattctaacacactcgtcaattgatcctctcattactcagattatatccaccccatttaattagtaataattgtgaactatcaaccaacttctaatatatgttgcttcctttaagagctaacagatttataaactaagaatgtacatatattgaaaatagcattgtatataaacttatatccttttttattgtttagtgtttcttcatatagctttaaaattatgctattgacattatgggaaagatttatcaatgagagaaatgtgtctctttttcaggtatgtgcttttgatatagtttacattggaaagggtcataatgctgttttagtttgtgaaaataagtaaaaagctgctgataccatagaatgcttttcccatgaaaaatttcagtacatcttccagagctgttttcatctctgcctacaggggtaaagtccgcatggaattagagggggaaagtctgcactggaacctgctgtggccattttttttctgttgttgctgcttctctagtggagttactgcagcttagggatggttcctggaagtggacacattttacaaaaacgttttttaaatacacgccagctcttcgagaagcacttttttccttccgtcatgcttcatactatattgtattgtactaacccctcatgctgggatgagcgactgcctagcaagcaacccactgcctactaacatcaagaggggctaaataaaactgcattttccttgcaaggacaacttctaccgtatgaatatatattatatttatgtattatattttgtacaatagttgatcttgaatgcagacttcatttgtatttttcgtggtactacaaaatgtgtagaagttatggcttttctttcattagggtcttgttaggtggttggcaagtaagttaaattgtatgttgcatttttttccatgctgttttaacttgtaaatatatatgtatacatrtggaagatattattattatctagattactttaagccttttatctgatgtattatcagtgaaaaccatgctgcttattccctaatacaatggttctcaaactttagtgtgtatcagaatcaagatgagggcttgtaaaatatagctggtccctactcccagagtttccatttcaggaggtctgggatcaggcccaagaatttgcatttttaacaaattcctaggtgataactgataatgttggttcagggaacacactttcagaaccactgctttaatattttaaataagataatatgtgaggtgtcataaaaaccttcatcaaatccctatctcatttcatttcttaggcattttctctcttataaagtttcctggatttataaattttcattgattttactagaaagttttatttagcttttatttatttattgttctttttaagaaaaaaactgagagtttgaattaaaagtttaaatcattgctaggtccttagttattttttttcttttttctttttttttatttgaagccrtgttgaaatccttgtctcctgtagacccagtggaacccataagtaattcagaaccatcaatgaattcagatatgggaaaagtcagtaaaaatgatactgaagaggaaagtaataaatccgccacaacagacaatgaaataagtaggactgagtatttatgtgaaaackctctagaaggtaaaaataaagataattcttcaaatgaagtcttcccccaaggagcagaagaaagaatgtgttaccaatgtgagagtgaagatgaaccacaagcagatggaagtggtctgaccactgcccctccaactcccagggactcattacagccctccattaagcagaggctggcacggctacagctstcaccagattttaccttcactgctggccttgctgcagaagtggctgctagatctctctcctttaccaccatgcaggaacagacttttggtgrtgaggaggaagaacaaataatagaagaaaataaaaatgagatagaagaaaagtaagaaccaagattcatatgaagtgatattagattgttccttttacaaaagtgtttagcttcaagactggaaagggaatatgagtgtaagtttactatatrtaaagctaagatgtggatttacaggaagaaccctggtttgaataactgatctgaaattmgtagttacctgtaaatggcagatcttttaggaaaataagagaaaggtaagggctcttttgaataaactgctgttttatttgtggcacaactgatcaatcttggaaattctttaagtatttttaataagaaatgaattatcatttcttgccagaatttgctaccttaaggtgattgggaaaattctgttgcaagaacattaacatttagtatgactcctttttactgtattcttgcagttaataactgcagctattatgttaataacaagttgtttgtattttatttttgtttataccagtcttaaagatccaggttctgaataaaaaaattaattgatacaattgatgtgtgctggggtttggaactaaaagtagtttcaacagtgcgtgggttatgacatttcttatgtttctttgttcatgtgtgtatttagtarttaattttaagatgtcctagtgatctttaaaagaaaaatattgtaccattttttagaattacactttcacctttctttttgcaattgaaagtgatgatgtcaaagtgggatttctgtactccaaggccccacccccaatttagcaagcagaaaaacgttccttgtatcactttaccttggataattgggtgccattaacacaaacaggtcacaatcytgctgttttctagccctgtccaccataatgagattcaggaaacatcctgtcagcctcctggaaagcatccttgtctccttagtatttcatttacaaactacctcttaacagagactgcttttcaaattggccaatcttacctgttttgtgttgtgattgcattttcaaagagtaattattttcagcatatacagttttgaaacctgtagctcctatgcaataacatagttctatagacattatttgggggaaatgtagtaataactcaatctatgttgctgtcctagaaaggaaattgcatgatgaatctagattgtctttagagtaaagaaacacattcaaattcctgtaacttatcactttcagtgagtaaatttactyataccaaaggggattttttttctttcaggaatctaaggaaatttactttttaacctgagaaaaaaacttggttctgctttatataaacagtagagattattgtactataagtgattttgcctttttgccaaaatcctggaactcatctataattaacctcttmggagcaataccttaggttgggccttgctttactacttagaaatagctaaatttcaattttaaaaatctttgtgtgttataactgttaaattattcaataatacttagggtttactttcttatttaaatcacttatttagtttaccgacttcatttttctttggatttagaagaagcaattatggaaaaacttggtaatctctctcaacctataaccttacacaggaagaattagagtttaataatttttaattcttttattgtatgttacttttattacaccagtttgggggaaaatcttcataaaattgtatcagttttattcagtgttctctaaggtgataccttttaattttgaaagactaaataattttaatcgagaatttccagtctttcagtctgatctatttaattcactacttgttacataatccagtgaaaactctacttgttgaaattatgacataaagatcttgcagctttatttgagtatttgttcttttgtgtagtttccatcttttaaaatatttaaaatattttcaagataaagtattatcttctctgcaaaaattcctggagtaattttctctcataatatttgaagtcagtggttctcrgttgtattagtggggtaactacatcaaaataaataaagtcttatttttaaaatgcaaattttagaccatactcccagtgattcttagttggtctttttggaatgagccataggtaatgtttatgtccaataaaatctaggaacctctgtctggaactttgctcttcttgccatgaataccttaggaagtattaaaaaacaggccartgtaatatgagtaggttttcttgtttgttacttttctaagaatattttacttcccttagcaggcttttggctagctttcaaagctgccaccctggccaggtgcggtggctcacgcctgtaatcccagcactttgggaggccgaggcaggcagattgcctaagctcaggagttcgaaaccagcctgggcaacatggtgaaaccccgtctctactaaaaatacaaaaaattagctgggcatggtggtgggtgcctatagtcccagctactcgggaggctgaggcaggagaatggcgtgaacctgggaggcagagcttgcagtgagccgagatcgtgccactgcactccagcctgggcgacagagcgagactccgtctcaaaaaaaaagctgctaccctatatacagaagaagccctctggggaaaaaaataaaacactgcagggaaaacttataattgtgctttttaagttttacaatatgatttttaacagtatgattcttgttaggagtatcatcctgacagtttttaatacagatatttctgtagtttgttttaccaggacaaacctagtacttaatggaagaatgcatgtgagagtctatttaggtcactcttgaagacagaatttgtaccctttgtctacctccaggtaggaaagtccatttaaaactcaattttcttaatagtaatattctgatttacgtaagaaaagttataaagcttttagtgttaaagcattaaaaaaatcaagtcctgatacattccacaaaattgtaagtcagtggagtgtttacagatcatttcactctggtgactaactcttcacttcctatcagtaatgtaaaatatgaaaaagttcaactgatttggtttaatcatagtatattgttcctatacccaaaacaaacaaagaaacagactaaatactataagagtgtattatagctcagctaaatcattgtttgaactaaagtagatattatgctaagaatgacaaccagacaaggcataaaggttggtttatttttccaattctacttacaagaaaatagttatgcagttcacaattagaaaataaagctacaaatattttagaagagaaaatatagaaaaaaaatgcagtaaccatttatctgtcatcatagacaggtgattaatttgcctaagttaacttctcagctaactaaaacaaatccattttaataatttaataactaaatgcactacttctctactttgtctagagtatatagaatataatttaactttttctgtcatctttaggaatatcagtttctatcatggggtgataaacagaaactcatcctcaggggctactgagatatatgtcaggtacccctttacaacatgacctcacaytggtgtgcttttttcagttatgtctgtttttcacagtttctctatcttcccttataatcagctgtcacttttgccgccgtcttgtgtgcctgcctcctgcaataggtccctaatttgctgcttctaatctgctgtggactgagaaaccagattgccaagcttgctagaattgtgtctaaaataagagtaagtagactgaaagagagctaaggggcttttctgtcagtaaagtgcatggactttgtgatacctgcttgactgcttagcattgttttgtttgcctcttagttctttactaaaaacttgctaaaacaaatacttggttgaatatgtgattgccatatatttgaagttctaattcagtttttatataatgatgtttctaggacttccattaatgaattcaactataagagaaatttgactatcatttttgaataaataattgtgtatatttcagaaaaatgttaaacgtattgttatcattaattgttcttagtacagtacacagatttaaaacttatggcactataaatgtaacttcaactctgttcatcaagacttatgttctagaaatattgttatgagactaaagatggctaatttagtaagaactgggtaacttgaatatttggggaatgagtcattctagatatcccagtttcctgcagagcttgaacctctttcagccctaaaattttttggaataatctctgaaggaaatcttcataaaattgatatgcattactgtcttaaataatatatgaatgtattttaatttgtttggtatcaaaatgatcagcattaacatcacttattataatctgatagactaatcagacattgagagctgtttgtccctgtactaaatggctccattctgctgtactcgttttagttttcatgtctttaacagtcgttctgattcttccatttctattactgcttgyttaagtgtgcctgtagcagtagcccttctccaccttcataatgtgccttctgatctgctttcattttggagaccagacaaactaagtttattagacttctgtgtaaagtaagaataaataaactcaaagtgaagacttgaggaagtggattatgcttaaatgcatggattttgtgacatcygttactttactacctgtttcattgctatcgttaaaataagtgaagctaccgaattagatacctgctctcaaaatagaaaagttgttatggtacaaaaggaacyattttgtttacatactttactttctctaaagttagttctatactagaattatttggcgctgattaaaactggtccactcaagttagcattttctatagtattttctatttgaattggagactacatgctgttaagaatttctttggctttttttttgttgttgttttgttttgtttgagacagagtctcactctgttgccgaggctggagtgcagtggtgcaatctcrgctcactgcaaggtccgcctcccaagttcacgccattcttctgcctcagcctccggagtagctgggactacaggcgcccgccaccactccggctatttttttgtatttttagtagagatgggttttcaccgtgttagccaggatggtctcgatctcctgaccttgtgatctgccgtccttggcctcccaaagtgctgggattacaggcatgagccacagcgcccagccggcttttttttttttttttttttttttttttaagagagaaatgtatcttcatttccaagacatgaaaatagattaagccctgaaaaataagaaaacattcactattaatgtcacagagacctgagaagtaataaaatttatagactataggcaattataccacaaagaatttattttttgattatgctagttttaaaaacagggtctttatttttattcagctatagtaagcgkacgttaaaagcttaccaaaagttatcagtgttagatctaatgatattggcagatatttgaatgactaaattcccactgtcattctgtactgggcatgattaaattgtaatttaatatttaataattaagcaggatcacttttctctcttgaatgaaaaataaaatttgcacactataatatttacaagtaaaagtcaaatctgtatagaaatggatatcctagcatcaaacaacttatttttagcaacatgctgattattttagtaaccatatattgactcatgttttcattacaaagtaactgtcaaatcagtctgtttattttatgaccatgcctcatagtcggcattcagttatccatgctaatggaagggatctgtggtataataatcataaaagataagtggtccaggctgggcgcggtggctcacgcctgtaatcccagcactttgggaggccgaggcaggtggatcacgaggtcaggagttcgagaccagcctgaccaacatggtgaaaccccgtctctactaaaaatacaaaaattagccgggcgtggtggtggtacctgcctataattctagctactcagtaggctgaggcaggagaatcacttgaacccgggaggcggaggttacagtgagccgagattgcgccattgcactccagcctgggtgacagagtaagacttcatctcaaaaaaaaaaaaaaaagataggtggtccaaaccagtttcttgagttgagactgccattatagaagagatagtcaagataccaaagccaggtcagtgataaaagaagaaaacttctgagtgtagttgtgagaggaaagtgattctattcagtgtaattgctgtaaaccaraaagaggattaattgattcaaggattcacacatgtaaaagtttagcatgaataaggaggaactgattttatagatattctaaaatgtgtgataagctaggacgtagtggctcacacctacaatcctagcactttgagaggctgaggcaggaggatctcttgaggccaggagttcaagmccagcttaggcaagaaacagcaagacttggtctctacagaaaaacttaaaaattagctggatgtggtggcacacacctgtagtcccagctgctcagtaggctgaggcaggaggatcacttgagcccaggaggccacagctgcagtgagccatgattgcaccactgcactccagcctgggcaacagaacgagagaccttgtctcaaaaataaataaatgaaaatgggctgggcgtggtggttcacacctgtaatcccagcagtttgggaggcccaggtgggcggatcacctgaggtcgggagttcaagaaccgcctgaccaacatggagaaaccccgtctctactaaaaatacaaaattagccggatatggtggttcatgcctgtaatcccagctactcaggaggctgaggcaggagaatcgcttgaacctgggagtcggaggttttggtgagccgagattgtgccaatgcactccagcctgggcaacaagagtgaaactctgtctcaaaaaaaaaaaaaaaaaaaagaaggaaaatgaaatgtgtgataaattaaagtgcatatagtattttttatggtatatattttaatgtattttagcttgtcagcaatgaaattagttttatctctatgtattgaacttcatttagcaacatattattgcaatagtacagtatttaagctgcatattctcttgactgcattatcctttaaaatcagtatattctrtgagatatggctatggatatatatatttcctctcctatttatatcctaagattttcttaaaggataattttactgttttaggctttatgtttttcagttttatatcatttcctaaagcttagctacctacaaatgaatattattgaagaatttttctaaaactaaagcatgtcttttataagtttactcttttataatatcctaaacaaagcatatccttttccccttccttaagtaaattcttaaggaaattaacttcatttctaaatcaaagtattttctgcacttttattgcaccaatctgttaccttctgttcataccatgacttaaataatgcttactcaggcacagtactatcagctgacaacgtacagaaggctccagaaatgtcactcccatcccttaaaggttggtatatggtcctggtacagtcgtggaggtccatatgggtgaaaagcccagaagtctacctgagctgaaagcactcccaaggagtttggttttgtttgggtttgttctaggtatggtcccagggatcccagatcaaaccaggcccctgggcctatcctagaaccaacctaagctcgcgcatcattcctggaacatcaagagtgtgaagactgaagataacctgaggcctaccagacatcctatattcaccaagattcacattttttggtatgtgtgcctacattttagcaaaaattggttggttaatccttctaaaattagagggatgacattgggtaacaaagtcttcccagcctttggcat

SEQ ID NO: 10015 - DNA, 98716 bp, Homo sapiens
gaggaagctggtaggcaggcgctagaccctaaagaaggactgctgagccagttcttaagcctgtggtcctgtcggtgaggaaagtgagagcagtccagagcaggtgaaaagagcagagctcattcctccagtggctcttttgcctaaagcagcattcctcaaacttctcactcgaagcattaagttacggtgagatgctaacacacgctttagacttaagtcaaaatttactgtgaagccacagcaaaccatggcttcacagatgaattagttgctacacaaataagttcgatacataagtacagtaattgcttttaaaccttataataagcagtaaattagaagttaaaccatgtttttcttttacgaactgaaagaagagaatgcttttgatactgagaatcgcacactgtgtccaggmagattgttcttgcataaccagacccacaataaatatctacaacttttcttacatgtttataaaataaatcttagaagaaaaatattgtagcttttttttttttttttttttcaatgaagctctatgaacatttcacagaactttgttcctgggagtagttagggaaatgctgcttcaaaaagccaattttaagtagttgtgaggcatccgagtggaatttggctgcactatccataaaactwgagagtataggcggtatttcacctaccaaggtcagtaccctgcctcaggattcttactgttcatttgagcaattccggggccctctctggatgaccaggttcgtaaatagttgagactttgtgttatctcaaattgtcaccatcacctctgggccaatataggttagtgaggtcgagaggcccacaccattgacagaagagaattctcaggccgggcttggtggctcacgcctgtaatcccagcactttgggaggccgaggcgggtggatcacctgaggtcaggagttcaagagcagcctggccaacatgttggaaccccgtctctactagaaatacaaaaattagctgggcgtggtggtgggtacctgtagtcccagctacttgggaggctgagacaggagaattacttgaacccgggaggcagaggttgcagtgaggtgagatcgcgccactgcgctccagcctgggcgacagagcgagactccgtctcaaaaaaaaaagaaaggattctcaccttcctgtcccttcctaggagttttgtggtagtgttcgatcctgtgatgtggccatcttctcctcagggcctgtgagaggcaggcagcatctttagctgaggtagaatgcctgttggggaaagtcaaataggatggtggctggggccrgggctctggggactccttctgccccacatactcaattggaaagactgagcaagtcccctcacctccctgggcctcagcttccctgtctgtcaaatggagggctcaactggggtgagctccagtttccttctagtgctaacgcgtgttcaaggatccttgctctcctttccggggagcatcaggggtgtgggctagatagcaggaaagaagtaggggtttgtaaacaagagatccaagcccctggacccttrgtcccagcacccagtgcagccctcgccctcccagccccttccttagaaaggacaagaaaatccactccttgttctctccctgtcccatcacccccgcagtcccccacagatctgaggccggaggatgccaacatggtgagcaccctcttgctgtcttattcacgtaggcttttcttggtgcctgcacatggctcttgtaaggccaccaatcttgctggattatgacctcatctaaccttaattacttcctaaaagccatatgtccaagaagagccacattgggggttagggcttcaacatatgaatttggaggacatttacagttcagtccacagcacctggtcatgtggagatcccagtctgcatttgtgggatgaaatctctgcttttttaaagtttacacaccacctagctgggcacgtggctcacacctgtagtctcagcactttgggaggccgaggcggggatcacctgatgtcaggagttcgagaccagcctggccaacatggtgaaaccccgtctctactaaaaatacaaaaattagccgggtgtggtggcgggcacctgtagtcccagctactcgggaggctgaggcaggagaatcgcttgaacccaggaggcagaggttgcagtaagctgagattgtgccactgcactccagtctggatgaaagagcaagactccatctcaaaaacaaaaataaaaaaagtctacacaccaaaagagctgaaggcaggagagtttgtggtggttcagagtcctgattctggaggaaacaggcctgtttggagtcccagctctgctccttactagctatgtggcctctcagaggcagcatcyttatctgagaaatcgggttgaccttgtaggtggctgagaggctcagatgagggctcgcatgtgaggccttggcactgagcagggcactcctactgagtgttcaaaggtcgtgagtaccactgctctgcagccctgggctctggtctcagcaatgccgtcactctttctggcttcctaagagtcagaaggcaagtgggagaatagaaccatttcctgtgtctgaaggctgtgcctcagtgcttttgactcactctgaagacagcaggcagccctttctgttttttttggagatgaagtcttgctcttgtcgcccaggctggagtgcaatggcgcagtctcggctcactgcaccctccgcctcccaggttcaagcarttctcccaccatagcctcccgaagctgggrctacaggcacacgctgccacrcctggctaattttttgtgtttttagtaaagacagggtttcaccatgttgcccaggctggtctcaaactcctgaactcaggcgatccgcctacctcggcttcccaaagtgctgggattacaggtgtcagctaccacgcccgacccacaggcagccctttcacctcacgccgagcacgtctcctccatccatgaacattttgcaacttttttttaaagagacaggttcatactatgttgtctagattggactcaaactcctgggctcaagctttcccaagtagcttgaacctcttaagtaactgtgactacaagtgcacctggccactttttctgagacggagtctcgctctgtcacccaagtggagtgcagtggcatgatctccgcccactgcgagctccgcctcctgggttcacgccattctcctgcctcaccctcctgagtagctgggactacaggcacccgccaccacgcctggctaattttttttgtatttttagtagagaccgggtttcaccgtgttagccaggatggtctcgatctcctgactttgtgatccgcccgcctcggcctcccaaagtgctgggattacaggcgtgagccaccgcgcctggcccacctgcccattttttaaaaactttattcttcctggtatcaaggggagaaagaaaaaaattttttaaaatatttaaaactttattttgaaataatttcaaaatcacagcagtttgaagggtacaacaaagaacattttgccacattttctctttcattcgttccctcctcttctccctcacccctgtttcttcctatcctctctgaaccatgaaccatttgaggattatttgtatacatcatgctcgtttatccgtaagatgttttagtgaacatttcccaagaacagggrcagcctctcacatgcccatggtacagttctcaaattcaggaaatgtgtaatattctctgatcagcccaggagttgctaatttgtagttcctgtttcaaatttgccaactgtcccaataatgattttgaaagccgttgtttttctggtccaggatccaatccaggatcaagcgctgcctttagttgtcctctctgcagcctcctttcgtttggagcaggtcctcagcctttctgtctttcatgacattgatgtttgtgaagagtacagtccagtttctgttgtagaacgtccttgaagttggtcccggaatatttgtttaaagtgagttgggaaaccacattcacatgtcttttggttatgtgtgtatttgtcaaacagccagccttgtgctgcgtgctgtgatggggagcattactcaacagagcctggccctgaccttggggatgtagtttgggtttgtggggaaagcagctaccgccaggtgggctttacggacccctgtgtgtctcatgactagaggcastgacgcttggataaatacatactggatggatgcaggatgagtccgcattctagaagtgtgcagaggtacagaagtggccctgctccctgtccagcacccagtcrtcagctttccctggcttcccgaggcaccctgacgttcacactccaaacacaaagtcttctctcaggaatctcgagtgagctgcagtctgggttctagccctgccctagcagggatctgctcagtgactgggctgctctcttcctgctttaggccaatgcgggggagaggagaccactgtgactctccccagtgcccttggagcgcagaatgaagtgaggggaggaggagggtcacgagccctggagcgctgggaagacaggctgtaggccrcaggccccgatcctgcctgggacgaggttcaacagaagtaggatggtttcatcatgacctggcaggaaaaccaccagacctggaattttgcttttacaactgtttaacttctgtttcatacaggatgraaaccggtgaattgtaatctcacataaccgagcaagatctagtagtcataagcactttgtcagagcaaagcagacaaggcaaagtgttggaaatgtcatcggatcttcacagaaccttagccaagcagcctttcaatgcgagaaacaaaataacatggatttttatctagtaatgaagtcaacaccattgtccaccctgggttaacacattcacatctcaaagcgaatggggctgcagacactcrtgttagagagccttggaatgtcctgcctttttacgtttaattaaaattaaataaaatatacaaaattcagttcatcagttgttctagtggcattttaagggtttagtaccatatgtggctcatgagtaccatcctggacagcgtcgacctagagcagttccatccccgcgcagagttctgtttgacggcgccactctgcacttccagcagcctggggagcaggggtgcaggagagttccttctgtgtcacagacttggtcacacagtacagatctcagatcagcacttaaacacgactgccagctgtcaacggcgtgttctgtggaatgctgggatgcatcacaggtatgctggaagatgtatagaattttacttctgttattctggtaactcagagtcctgttcagtcagtttccacgtcaggwtgctgtcctggttttaaagagaatgaacgcagccgaagttgaatcgaggcagtgatttcactcagtgcgttgggtctttccactcacctggccctccagaaccccagggccwtgagtgcatggrctggtacaagagcccagtttttggctggggaggcacttcctatgggagggggacgcctgtctcagtgctgaggcaaccaccacygaggaccctgggctggaagctgggctgagatgtctggtggtaggttctgaggcaggacaggggacygactcaaatggatgatacgaacggcaggctggattcacgttgctcctgcacctccagcatctgctgaggacacctagaactgtggccctrgccaaacctcagctccctattccatgaaagtgtgggtcaaagtgtgggtggtagagtggggctgacagtggcccctaagctcctagggtccagcccacaactgaggaagccacayggctggttgtgtacgagccggagtgtctctgtttggttgaaagtgccggtctgtgggtccttgctggtgtgtgtgcttctgtccccgcctcctggcctcctggctgaggggaagctgagtgggccacggcccatgtgtygcactcgcctcggctcccacacagccgcctctgctccagcaaggatgtggctcttccacactctgctctgcatagccagtaagtcctctcacccgctgcttcgaggggctsctgtgccctcagctccagccaggtgtctgcagactacagccttgactgtctgtctctgatggggctcagttagagccagaggttagagagtggcagctcctccaggaaaggagtcttgctcggtgggtcagrgccccaggcwtgttgggaagggcggctgaggcttcrtgttgccagttctgtcagccagggcctttggactccagggctctgccattctgttcctcctccagccagcctccccccgccaccgaggccctctccccatggcacccacttggggcaggtccttgactctgtagtttgttctctgagtgtggaggctccgcctggcagagctcccttctgttacagagcaggggttgggctgatgagggtgaggaccctgtgagagagtgttgaccagagactgggggcaagtgtctgtatggtagagggtgtgagtgttggcagggagcctgcttcctgtgttgtcaggcccagggtaaaaactggaatgtggggtggggggaggcacttctgctgcctggggggtcccattttagcctttaactgtcccatggaagcctctgggcaagccaagccatgartcctttcgggggccccctgtgatgagacagcacggtcaggtgagcccctggaggctgctaagattaagccggaggccagggtggtcctgcctagtgatctgagcagacttcccatgggtctcctgcccctgctcaggaggttggccggagaattggatgggcatcaagcttatgtggatgaaaggctcctggtagctgagttctccctgaaagatgggctgaggctgtgctgggaggggacttgggattagcatcccacctggggccagatcacccaggaagcaggccacaatgtgtagggtaccagcaaggaacacgtttttggacagattttaatattttatatttcattttattttattttattttttgagacagagtcttgctctgytgcccaggctggagcccaggctggatcttggctcaccataacttctgcctcccaggttcaagcagttctcctgcctcagcctcccgagtagctgggattacaggcgcctgccaccacgcctggctratttttgtatttttagtagagacagggtctcaccatattggtcaggctggtctcctgccctcaggtgatcgacctgcctcggcctcccaaagtgttgggactacaggcatgagccaccttgcccggcctaatattttatatttcaaaaacatcagaatagtcaccatggaaaggtcaacagtttgttgaacttccttttattttacaatttagacttctctgtttttagttacatgtggggtgtggagagagtctcactctttttatggcttgtggctttgatctcccattaccaagaatatctggagcagatgcttagactagactcttgtctaccctctcccagtacagaggaggtgactggggcacagagcgggcagtgactacccaggcttgcaagcaactgataatagacacgaggctcaagcccaggcctctgtcctgcctcccagctccagaatactcctgtggctcatctgtctcctttagcctctgagaccaccacccatcacctcagtgccttttccagcaggtggcatcgatcaaacctcttttgaggcctaggcccttcccaagctgatgggcagcagagagcgatgatggagcagacttgccatgagaccacttagcccacagctcagctcagccacgggaaggggaccagagcagggcccccgcagctccggtgtgggtggcggaaacgaggctgctgcagttctgctccatgctgtgaggtcctgagactaggatgggccagtccaggagagtttcctggaggaggtgaggtggcgttgagtcttgggggctgaggagagtctgagaaagaaaatgtccaggagatgctgggaggaagaactccctcagactgtggctccaggcccagcaccctgtaccctgtgccgggttgggcctccttaggctggagagaatccaggactggcctggcctggccstgaccttccactctctccaggccagccactctggtgatgcctacttcttatttgtggcagcagacggaataatagcagttgtctaagggagattttagaagcattgggtgcagacagacactgaaaccctggaactgtccacaccctgaccaccagccccatcatgccctcttaccctgtggcctgctgtccccaagtcagtcttcacccctgactcattctgcagtcacatcaactcacttctccatcctgggtctcagaggttgagtttccacccttgcgtgaagaagcctgtcctgtcagcctacaacaccttacaggggtgaagaagaaggaaccagaagtccagggcccgctctgctggtggcacgcactcgggctgaggccaggggctgtgccggggcatcaccccgggcctgtgcgtgatagaaaacctcagtccttggggagtgggagactgtagcatctgaggtgggctctgaaggacggggaggtccttggcaagtacaggctgggggtgagcagaggggccttctgtgcaggggggataggagggaccaagccctggggtgtgaagagtctggtttgtaggaagatggaggcgaagtgtgagtgggagcaggagattgtctcctctggtgttgctttcccttccagccccgccccaaatcgggacatgctgggccctggaggtgcgggcagaggcgaggccacccctatcccrgcccctgtgtgaagagaaggcaggttgtgcacacagtagcctccccggccccggcagggtgtcacagcacgggggtagggaaggggcactccaggcagaggggcagcccaagcaaaggtgaaatgcccccggaatgcagtgtgtgggggagagctggctgggggagtgtgggccgtgtgggagccccacatccctgcccttctctgggaggcctgcattcgtgtggcaggtgtggtataagtggaggaatgcgggcatccagtcccgagaggcccacggtggaggtggtgaggaacgtggggacctgagtgccggcctgggggagcttggagttcctgctgagggcagtggggagccacagaaggtcttgaccaggatggcgacagaattgtatgttgtgtgttagttggaatctgggggagaggggaggcagagaggcccgtgaggaggctgctgccttggccccatctgcggctgttgcggaaggcagacgtggggaggaggacacactcatgagaaacgtttagtttcctggccaggcacggtggctcacgcctgaaatcccagcactatgggaggccaaggcgggcagagcacttgtgatcaggagttcaagaccatcctggccaacacggtgaaaccccgtctctactaaaaatacaaaaatgagccaggcatggtggtgcgcacctgtaattccagctacttgggaggctgaggcaggagaattgcttgaacccaggaggcrgaggttgcagtgagctgagatcacaccactgcactccagcctggaagacagagagagacaccgtctcaaaaaaaaaaaaaaggccaggcgcagtggctcamgcctgtaatcccagcactttaggaggccaaggtgggcagatcatgaggtcaggagatcgagaccatcctggctaacacagtgaaactccgtctctactaaaaacacaaaaaattagctgggcatggtggcgggygcctgtagtcccagctactcgggaggctgaggcaggagaatggcgtgaacccgggaggcggagcttgcagtgagccgagattgcgccactgcactccagcctgggcgacagagcgagactccgtctcaaaaaaaaaaaaaaaawatawawatatatatatatatatttagtttccagcacacagtagtgctcaaggcctgttggcctttcttgttattagggagatgaagggtgagggagagagatgggctcagctgactgtgaggtttggggtggagttgatgaggctccgtgtagaagatcgaggtggggggactgcggctggctgcagatggctctgaggcacagtsctcccacgaggccccgctgggtgttctgggcggggtgtcgggacccctgcatctagccccacttcttcagctcctggtatcagtgtgggcaaakcatgccccatgggcctcggtttcctaaattgggaatcrtggtacttattgtactgtgagaatgtgagttgaaattgcccggwgtgctgggggagacagagggttgaggggagacagtggtggctgacaggatggagggggatctcggtctgactcagcaggcctccgtggctggggacagctcagagaggtggtcctgtgggtagtgtggtgacagacactggtgtagctatgtctgtaagtcagacaacacgggaggggggattgggagggagggccagccctcgcctgtggttataactctctccaacctcagcctccacgtgctgagcctcctgcgtcagacctggggccgcgtatcgccccatttgatctgcacagccccatgtcccagaggggagacggaagcgaggtgccaagcccagggtccttcagtgactccaaggcagtgaggatttgaactcaagaccatctaccaagacaatgctgttttctgagtcctggtgggaaatgcaacaggaggtggtttcctgatggaggcgcagctcaaaggcaaactgttgggcctggggcgagtccagtctgaggaaacaagctgagccaggcctggcagacctgggcaccagctggctctcagggaaagcccagcaaatacagcgaactaccccaccacacacacacacacacacacacacacacacacacacacggatgcacacacacacacacggatgcacacacatggatgcacacacacacggatgcacacacacagggatgcacacacacggatgcatacacagggatgcacaaacacggatgcacacacagatgcacacacggatgcacacgcacacacgcgcacatggatgcacacacggatgcacacacacagatgcacacacggatgcacacacgcacacacagggatgcacacacggatgcacacacacggatgcacacacacggatgcgcatacacagatgcacacacacggatgcacacgcacacggatgcacatggatgcacacacacggatgcacacatgcacacacagggatgcacacggatgcacacaagcacacacggatgcacacacatgcacacacacacgtacacagtctcatgccaccgtgcctctgcggcaggctcttgctgacctagttaccagccctgtaagcagagccctgctccagctcagtgagccgccgcacggcaggagcagtgcccagcttcttgaggccatttgtgaccctggcctctctctgtttaccaacccctcggtgcctccagctattactaaaggctttgaaatcgggcataaacacagaatctgagccccagacacaaatattcaatcttccgacgggccatgcacaaaccacacccctctctgagcctcagcacctagcgtggtgcctggaaggcaacaggtgctctgggggagcggaaccctcagttgaacaagatctctgttgaacaaagtgaacacaggggtggggtggcgtgaggaaagggaatatctggcccactctgacctttttagagcaccttttttgggtgggcctggccctgcgctgagctgggctctgtggctgggggtgttgtgtgtgactcagatcacatcacagttcagggcagacaaactgaatcacagatcaccctgatccagacagaatttggtcacagccagacagaccacaggatgctgagggggctcagggtttggtcagagccagacagaccacagggtgctgagggggctcagggacccgggagttactctgactgagtctggattggctcctggctcctggctggctgagcagggccacaaaagacgggctttgcagacagaggtggagagtgctgagcaggcctgctgggtggagggagccgctgtgtcgaggcctggaggcaggagtgtgcagagggtgcgccgggcagagcgggggggtgccacggacgcccaggagaggagactggactttgctctgcggcctccactcgtgccttttcagttataccgacagtgaaacggggggaagaaggccccccacccacccctcgtaacatgttggcagctcgcactttttaattctcctctaggcagtttgctgacgtcctgttttttccccagagtgactgaccaggaggcacagggctcaacrtgacgtgggccccggggccggagcccagactccctrctgggcrtcctttatctcagttctggattcgtgggggagcagcgggaacagtacggccttcttccctgcctaggggtcttgatctggaacctttgagagtctatgtaggctgtaagtggccactctcccagcacctaccgagggtgggccaccatgccaggccctgagataatgtggcgatcgaggcagatgcagtgtgtgcccccttggactcactggtggcagggggcagtyactggcaatagggaaacaaggaaggccaagcacagtggctcactcctgtaatcccagcacttagggaggccaagactggaggatcacttgagcccaggaatttgagtccagcctggacaacatagcaagacccccatctctacaaaaaatttaaaaaaaaattagaggccaggcacggtggctcacgcctgtaattccagcactttaggaggccgaggcgggcggatcacaaggtcaggagttcaagaycagcctgaccaacatggcaaaaccccgtctctactaaaaatacaaaaattagtccggtgtggtggcaggtgcctgtaatcccagctacttgggaggcttaggcaggagaatcgcttgaacccaggaggcggaggttgcaatgagccgagatcgtgccattgcactccagcctgggcgacaatagcaagactccatctcaaaaaaaaaaaaaaaaaaaaaggatgaagaggaagccaggagacaggctgaggacagagcacttcaatcaggcaaggggaggattttgtacacatgtgcactcaggggatcaggaagggctccaatgcttccatcagattctcaaagggggccaggtgcagtggctcacacctgtaatcccagcactttgggaggccaaggtggtggatcacgaggccaggagttcgagaccatcccggctaacacggtgaaaccacatctctactaaaaatacaaaaattagccaggagtgctggcatgtgcctgtagtcccagctactccagagacccagtattttgagtcctggcctacactcggtaggtgctgggagagtggccacttacagcctacatagactctcaaaggttccagatcaagacccctaggcagggaagaaggctgtactgttcctgctgctcccccacgaatccagagctgagataagggatgcccagtagggagtctgggctccggcccyagggcccacgtgagacaggagaatcacttgaactgaggaggtgggggttgcggtgagccaagatcacaccattgcagtccagcctgggtgacagagtgagactccaactcaaaatgaagaaaaaaaggccgggcatgatggctcacacctgtaatcccagcactttggaggctgaggcaggtggatcaggacgtcaggagatggagaccagcctggccaatatggcgaaaccccatctctactaaaaatacaaaaaattagctgggcatggtgatgggcacctgttttcccagctactcaggaggctgaggcaggagaatcgcttgaacccgggaggcggaggttgcagtgagacgaaagttgtgccactgcattccagcctgggcgacagagtgagactctgtctaaaaaaaaaagaaaaaagaaaaagattctcaaagggatccattacccccaaacaagaacgtctggtctggttatgtttcctgtgttttctactttggggcattggcagggaggacacaaatcacaggtctgcaaaagctggggtgcagggtttcttcattgtgttctcacaaaggacccttagggacagttttttctctgatttgaataaccagactggttgtgctttgcctggaagtgttttgttttttgaattttgtggacaccgcatggcattaactgatctttttcatgttgatatcaccttcaagaaagcttcattcattcatgtatgcgttgaatcaacaaatgattttattaagccaaaggattttaggaacacttctgtgagccagcgctgtgttcagagccaacagtggggcacgtgatagaaagtgctggcactgcgtgatctacatgttagctgttggcctccttcctggcttgttgtatccccctctttttttaaaccatcattttccttctgttcttttttgcctgccccattattttaagcgagttttatcttacctgtattatgtatttttatgaatcaccacaaatcattccaggcgaggcagagatgtgaagaaaaaggaataaaatatagatatcaggccgggcgcggtggctcacgcgtgtaatcccagcactttgggaggccaaggcgggcggatcacctgaggagttcaataccagcctgggcaatayggtgaaaccccacctctactaaaaatacaaaaattatccaggtgtggtggtgcgtgcctataatcccagctactcaggaggccgaggcaggagaatcgcttgaacccgggaggcagaggctgcagtgagccgagatcgcgccactgccctccagcctgggcaacagggccagactccatctcaaaaaataaatacataaataaaataaaattaaatatagatatctactttgtgccagactcagggaaatggccttaaatgcagggatgagagatccagagcctggcctcagagccatctccccaggttcctcctcctcctcaagtctggaaggttgatttttggataataaaattttaagcatgtacacaggtaaacgagataactataacaaagccaatatgtccatcaagcggatgacacaatgatcaagatcctgccacacaagctgaatgtattttgtgttccccttttcatttttgttgtcaaggtatttaaagcctggctgctcaaaatgtgacctgaggaccagcagtgagagcatcgtctgggagcttgttggaacagactcccagccccattctgattcattatctgctgagtcagaatctgcattttaacaagatctccgatgactcatttgcacgctaatgtttcagaaacagtattttaaaccccaaacatcgtgtcatttcactcccaaaaaacatggacattttcatttctaaagaacatgaagggccgggcgtggtggctcacacctgtaatcccagcactttgggaggcygaggctggtggatcacctgaggtcaggagtttgaaatcagcctggccaacatggcgaaaccccatctctactaaaagtacaaaaattagccaggcatgttggcacacccctgtaatcccagctactcaggaggctgaggcaggagaatcacttgaatccgggagacagaggttgtagtgagctgagatcgcaccactgcactccagcctgggcaacagagtamgactcagtctcaataataaagaacgtggacattttcttaaatagccacaatrttcttaccacctaactaaattaattctttggtatcatctaataccaaatacttagtccatatacaaatctctctgtctcaaaatgtctttttttttttttttttgagacagagtctcgctctgtcgcccaggctggagtgcagtggcgcgatctctgctcactgcaagctctgcctcctgggttcacgccattctcctgcctcagcctcccaagtagctgggactagaggcgcccaccaccacgcctggctaatttttttgtagttttagtagagaaggggtttcaccgtgttagccaggacggtctcgatctcctgacctcgtgatctgcctgcctyggcctcccaaagtgctgggattacaggcgtgagccaccatgcccggcctccaaatgtctttttaacagttggtttgttcaaagcaagatccaaacaaggtccgcacatgacatgcggttgctgtggctctccgtctggagtgcacccccatccccattttctgctttcatgcctttgatttatggcagagtttggtcacgtgtgttgcagaatatctatgttcaggatttgtgtgtttgcttcctcttggtgtgatttgtctttttattccccaaactgcctgaaaactggaagtttaacgtcaggtttcagttctgtggcgagcacactctaagcagttgtgaggattttgccccacttcctgcagttatttcacctctttttcttttktktgtgtgtgtgtgtgtgtttgtttgagacggagtcttgctctatcaccaggctggagtgcagtggtgcgatctcggctcactgcaacctccgcctcccaggttcaagcgagtctcctgcctcagcctcccaagcagctaggactacaggcatgcgccacyacgcccagctaatttttgtatttttagtagagatagggtttcactgtgttggctgggctggtcttgaactcctgacctcaggtgatccacccatgtcggcctcccaaaatgctgggattacaggcctgagccactgtgcctggcccttctttttcttttctttgctgaagtgttttaaagccttggtactcagaatgtggtctgaagacctgcagtgtgggtgtcccttagaatcttgttggaaatgtagtcttgggcccttasatccttcctagagtgtcacaccaagaaggacatgcctgagaggcccactcctagggatgctaagattgactagtgggctcaggtggtgtcagcctaattgtaaagttagtctatcagactctcatttagaagctttacctgttgatgatcctggcctgaattaattattgtatttcattagggctcacaaaatagtttggttctattattcttcctacatttattagtaataatttatccataaaaaagacgtttttcatgccatttttataagggccagatgaacaaatgaaaaataaatttaaggctgggtgaggtggctcacgcctgaaatcccagcatttgagaggccaagtgggggcagattacttgagatcaggagttcaagaccagcctggccaacagagtgaaactccatctctacmaaaaatacaaaattgatctgggtgtggtggcacatgcctgcaatcccagctacaggggaggttgaggcaggagaatcgcttgaacctgggaggcagaggttgcagtgagccgagattgcaccactgcactccagcctgggtgacagagcgagactccatctcaaaaaacaaaaaacaaaaaaaaagaaggaaagagagagagggaagggagggagggagggaggggggaggaaggaaggaaggaaggaaaacttaaaagacaagaagtactttttctcattaaccaggatgatttgatggccctgaaatgcacttcatgtaggaaaggcaagaaaaatgcttaatacttttcctaacagtcagttttcagagtaaagagatggtgccctttttacttccattggtagcaaattttctttttcgtttcttttttttggagacagtcttgctttgtcactcaggctggagtgctgtggtgtgatcaaggctcactgcagcctcaacttcctgggctcaagtgattctcccacctcagcctcccaagtagctaggaccacaggcaggctcccactgtgtgcagctaattttttaatttttttgtagaaacggagtctcactgtattgcccaggttggtcttgagctcccgagtgtaagtgatcctcccacctcagcctcccaaagtgctgggattacaggcgtgagtcaccttgatttcttttgtttttatttttctctctcttgtaaatatcatgaacttatgaaagttttatatattcagtgtgtttcacatacttgtaattcttattctaaaaaatattttaattataattattatttttaaataattattttaataattattatttttaaataattattttaataattattatttttaaataattattttaataattattatttttaaataattattttaataattattatttttaaataattattttaataattattatttttaaataattattttaataattattatttttaaataattattttaataattattatttttaaataattattttaataattatttttaatgtagactttttaaaagtacaacatacagaaaaatggacaaatttagatcagtaaatgttcatattaagtcacacccgtatcaagaaacagaacaggctgggcacagtggctcacacctgtaatctcagcactttgggagcccaaggtgggaggatcacctgaacctaggagttcaagaccagcttgaacaacacagtgaaacctcgcctctaccaaaaaaaaaaaaaaaaaaaaaaaaattagtcaggtctggtggcacaggcctatagtcccagctactcgaaaggctgaggcaggaaaaccacttgagcccaggaagttgaggctgcagtgaactgtgatcacaccactgcactccaggctgggcaaaagagtgacagccagtctcaaaaagcaaaaaagaaagaaaacatactgtgtacaaccttgggggctaaaaaaattttttttgaacttcattaaacttaagaacatctgtttatcaaaaaaaaaaaaaagtaagtgagtgaaaaggcaaaccacagaataagaaaataattgcaacacaaattgataaaagattaacttcagaatatgtaaagaatttctacaaatcaataagaaaaaggcatgtccacaaacagaaaaaggacatttcacaaaagagattatcaaaatagtcaggaatcttgtaaggagacttcagacgtcagagaaaggcaaattaaaaccaggtgtggtggctcacacctgtaatcccagcactttgggaggccaagacgggtggatcacctgaggtcaggagttcgagagcagcctggccaacatggcgaaaagcccatctctactaaaaatacaaaaattacccgggcgtggtggcgggcatctgtaattccaggtactcaggaggctgaggcaggagaatcacttgaactcgagaggtggagattgcagtgagctgagattgtgccatggcactccagcctgggcgacggagcaaaactccctctcaaaaaaaaaaaaaaagagaaaaccatttgtcagtatccactaaagctgaacatatgcttaacaggatccagaagttccacggttagacatatgcccaacaggaatgtgttcatatggtcatgaagacgtctgcaagacactcatagcaggccagacacagtggctcacacctggaaacccagggctttggtatgccagggcgggaggattgcttaaggccggtgtatgaaatcagcctgggcaacatagctagaccccaccgctttaattcttcatcagattaaagaaattcacagccgggcatggtggctcatgcctgtaatcccagcactttgggaggctgaggtgggcggatcacctgaggtcaggagttcaagaccagcctggccaacatggggaaaccctgtctctaataaaaatacaaaacttagscgggtgtggtggcacatgcctgtaatcccagctacttgggaggctgaggcaggagaatcgcttgaaccagggaggcggaggttgtagtgagccgagatcacaccactgcactccagcctgggcgacagagtgagactccatctcaaaaaaaaaaggaaaaaaaaaattccctctgattcctggtttgctaggactttttatcagaaattagtcttggattttatcagatgccattttctgcatctatcataatcatatgatttttaatcctttatttcctgttgtaaggagtaaactgattattttaaatgtcaaaccactcttccatttccgaaatgaactctgcttgttttgatgtatcatgctttttttttttttttttttttgagaggagtctcgctctgtcaccaggctggagtgcagtggcgcaatcttggctgactgcaacctccgcctcccgggttcaagtgatcctcctgcctcagcctcccgagtagctgggactacaggtgtgcgccaccacgcccagctaatttttgcatttttagtagagatggagtttcaccatgttggccaggatagtctcaatctcttgacctcgtgatccgctggccttggcctcccaaagtgctgggattacaggcatgagccactgcacccggccgtattatgctttttataattccctggatttgatttactggaattttgtgcagcatttttgtatttatgttcgagagaracggttgtttcaattttcctttcatttattgtgcttgctggattttaatatcaatgttatactggcttcataaaatgactgaaaaatgttttctcattttctattctctaaaacagtttatataaacttggcattatttctctttaaatgtttggaaaaattcgtcagtgaagctatctgggcgtagagatctccctaagatttttagtcatgagtaaaatatcttactcaggtgatacatttctttttttgttagttttggtgcatttctatttcaaggaatttgttcatttcacccagattgtcaagtttactggcataaggttggatataacatcctcttacttttttttttttttttttttgagatggagtctctctctgtcacccaggctggagtgcagtggcgcgatctcggctcactgcaagctccgcctcccgggttcacgccattctcctgcctcagcctcccgagtagctgggactacaggcgcccgccaccacgccyrgmtaattttttgtattttcagtagagacggggtttcaccgtgttagccaggacggtctcgatctcctggcctcgtgatccgcccgcctcggcctcccaaagttctgggattacaggagtcagccacctcgcctggcccctytattttttaaatgtcttaggatctattatgatgtcccccctttytattttttattcatgttggtaatttgtgtgttctctttttttttttcttgttcagtattgctagtgatttatcattttaaaaatctttaaaaaaaacttcagcatcattagttttctctactgtaagttggtttgctgtttcattgatrcrtgttcatatctttattccttcccgtacttcctttaggtctgatttgctattccactgtaattttatctttcaccctgggttatttagaaatgcattgcttaattttcacgaggttcagatttttctagttttccttccktccttccttccttccttccttccttccttccttccttccttccttccttccttcctccttccttccttccttcctttctttcttctttcccaagtctcactctgtgcctaggctggagtgcaatggcacgatctcggctcactgcaacctccacctccctggttcaagtgattctcctgtctcagcctcccaagtggttgggattacaggtggctgtcagcaygcctgcctgatttttgtgtttttagtagagatggggcttcaccatgttggccagggtggttttgaactcctgacctcaagtgatccgcctgcctcggcctcccaaagtgctggggttgcaggcatgagccaccatgtccggccatcttttcttccctttctttcttttttcttttttttacatggggtcttgttctgtcacccaggctggagtgcagtgatacaatcttggctcactgcaacctccacctcctgggctcaagcagtcctcccacctcagcctcctgagtagctgggaccataggtgcatgccaccattcctggctaattttttgtatttttggtagagatggagtttggtatttttgttagataccagccatgttgcccaggctggtcttgaactcctgagcttaagcaatctgcctgcctcagtcttccacagggctaggatgacaggcacgagccactgtgctggacctctagttttctttttgttattggtttagattctagtatagtcagagaacatattctgagttatttcaattcattgatatttattgaggctttagctttgtgatctagcatatggtcaattttggtaaatgtttcacgtgtacttgaaaataatgtttctgagggtgcggtggctcacgcctgtaatcccagcactttaggaggctgaggtgggtggatcacgaggtcaagagattgagaccatcctggccaacatggtgaaaccccgtctctactaaaaatacaaaaattaggcgggcatggtggcgcgtgcctgtagttccagctactcgggaggctgaggcagaagaatcgcttgaacctgggaagcggaggttgcagtcagccaagattgcaccactgcactccagcctggtgacagagccagactccgtctcaaaaaaaaaagaaaaatgtttctttttccattgttgggtacagagttttgtctgtcaggtcaactttgctaattatgttgttcatatcttctatatccttgctcaatttttggtctgcttttatttttatttttttattttattttttttttttgagatggagtcttgctctgttgcccaggcgggagtgcagtggcgcaatctcggctcactgcaagctccgcctcccgggttcacgccattctcctgcctcaacctcccgagtagctgggactacaggcgcccgccaccacgcccggctaattttttgtatttttagtagagacggggtttcaccgtgttagccaggatggtcttgatctcctgacctcgtgatccgcccgcctcggcctcccaaagtgctgggattacaggcgtgagccgccgcgccccgctggtctgcttttatagttgacgtaaaaggcttaattaaagtgttaaagtctcccactttcattgtagtgttttgtatttttccttttaattcagtcaatttttgcttttatattttgaaatgatgttattggataaatacagatttaaaattgtcacrtcttcytagtgaatcaaaaacaacatatttgtgtgcatatatctccttcccttccttatacagaagctagtgtcgtttatacacttgtccttcatgtagtgattttaatttcttcctgaaatctactgctgagtaaacagccattaattggaaaaaatatttgcatcaatttcattaaaaaaattgtgatgcattccagccaaccaaagatactcaaatgacttttactgttaggaaaatgtattaattgaccaataaaacaagtttagataaataaaaacaatactttgaatataaaaatacagtttccgtataaaatgtattgtcatgaaggtttattggcctcattaaaaggagaagacaagatttgacagtgggggctaggcgcgrtggctcacgcctgtaatcccagcactttgggaggctgaggcgggcggatctcttgaggtcaggacgagtatgagaccagcctggccaacatggtgaaacctcgtctctactaataatacaaaacttagctgggcrtggtggcgggygcctgtaatcccagctactccggagactgaggcaggagaattgcttgaacccaagagccagaggttgmggtgagccaagatcgcgccaccgcactccagcttgggcgacagagtgagactccatctcaaaaaaataaaaataaaaaataaagtcatagcaaaagttacagagaaacaccttgagggcaaaataaatactgaacccaaaagcacttccaaacacatggaaataggctgtgcgctcatcgacttcagaatcatagaatcttcagccatctcaatcgacatacatcagcaaaagcaggcatatgggatttatccaaacatgacatgcaacgcagatttgttccatatgatattgttggactagaaactgttacatagtaagtaaatgggtgagtgtgtcttcccgtgagagtgcgatgtcaaatgtcattccttatatcgtgtttactcagtgtatttagagaygaaaaagtcactaaaccaaaaaaaggagtgttgccaagaagttgtatagcttttcaagagtgtttatggcaaaagtcgttaattgaacagtaattgaacaggtaartctgtaaactggamttcaccttgcttttttcccatgyaaatgtagattagagatgggagcagtggctcacacctgtaatcccagcacgttgaacggctgaatcacctgagrtcaggagttygagaccagcctggccaacacggtgaaaacctatctctactaaaaatacaaaaattagctgggggtggtggtgtgtacctgtaatcccggctacttgggaggctgaggcaggagaatcgcttgatcctgggaggcgaaggtgtcagtgagctgagattgcaccattgtactctagctcgggcgacaagagcgaaactccatctcaaaaaaaaaaaagtacacacacacacacacagagatttaagcaatggagtggcatggtcagaccatgctttgttttttttttttttttttttttttgaggccgagtctcactctctcacccgggctggagtgcaatggcgcgatgtcagttcaccgcaacctgtgcctcccaggttcaagcgattctcccttgtcagcctcccgagtagctgggattataggcacccgccaccatgcccggctaatttttgtatttttagtagagacagkgtttcaccacattggtcaggctggtctcaaactcctgacctcaggtgatccaccgcctcagcctcccaaaatgttgggattataggcatgagccaccgcacccggcccagaccatgcttttaaaaaatctttctagcatctgatgtggagaggatgtatccagaagtacaagtcttgaaagaggccaggagactaacgtgtccaagcaaaagacgatgaggtcagtggggcagagctgagtcctgacagaggcccaaatgtgcatgtgaattctgaggatgataaaggtagcatttccaaactatgggttaagaggagctactcaacaaataatgatgagacatttcaactgtgggaaaaaagtaaagttgtatccctatttcactccaaatgtaaaaataaaatccagatggacaaaaggttcgaacataagaaattaaagaagagaccggrccttggctcacgcctgtaatcccagcactttgggaggctgaggcgggcggatcacctgaggtcaggagttcaagaccatcctggccaacgtggtgaaaccccgtctctactaaaatacaatattagccgggcatgatggcgggtgcctgtaatcccagctatttgggaggcttaagaggctcagatgggagaatcccttgaacccggsagatggtggttgcagtgagccgagatagcgccactgcactccagcctgggcggctcagcgagactttatctcaaaaaaaaaagaaagaaagaaaaaagaaatgaaagaagaaaaaaaatatagaaggaaacatgagtggatgaaaagaaatagcctgagtggaggagcatgacccgaagctgaagtcataaaggaaaaacaatatgacaacatcaaaaaacgtagttgtgggggaaaacagcatatgcaagacaaacagctgcgtgagaagcggcatctataacacattgcctgtttctcttggatagagaaaagctcttacaaataaataagaaagtaatatcgtttcatgaaaatgaataatgtacatgagtaggcagtaaacaaacttacaaaaagagacttgacctcactcataatttaaaaatagttttggggctgagcttgttggctgacgcctataatcccagcacttggggaggctgagatggcaggattacttgagcccaggagttggagaccagcctgggcaacatagtgagacaccatctytacaaaaaattttttaaaaattagccaggcctgctggtgcgcatctgtggtcccagctacttgagaggctgaggcgggaggatggattgagccctggaggtaaagactgtagggaaccatgatcatgccactgcactccagccagggcaacagagtgagatcttgtctcaataaaataaaaagtaaaaaatatttgggaggctgaggcgggcggatcatctgaagtcgggagttcgagaccagcttaaccaaaatggagaaactccgtctctactgaaaatacaaaaattggccgggtgcagtggctcacgcctgtaatcccagcactttgggaggccgaggtgggcggatcagctgaggtcaggagttcgaaactagcctgaccaacatggagaaaccccatctctactaaaaatacaaaattaggccaggcgcggtggctcacgcctgtaatcccagcactttgggaggccgaggtgggcggatcacgaggtcaggagatcgagaccaacctggcttaacacggtgaaaccccctctctactaaaaatacaaaaaattagccgggcaggcgcctgtagtcacagctactcaggaggctgaggcaggagaatggtgtgaacctgggaggcaaagcttgcagtgagctgagatctcgcctctgcgctccagcctgggtgacagagtgtgactccatttccaaaaaaaaaaaaaaaacaaataaacaaacaaacaaaaaaaccaaaaattagccgggcatggtggcacatgcctgtaatcccagctactcgggaggctgaggcaggagaatcgcttgaacctgggaggcagaggttgcggtgagccgagatcgtgccactgcactccagcctgggcaacaagagcgaaactccatcttaaaaaaataataataattttggaacaagatgatgatatactcttaaaacaaggatgaaaatgtcttcacagtcagtccaggcaacactgggggagataaaccttctcccatgctgtcgttggagtatgaattggcaaaacctctttgggaggtaatctatcgatatctatttttccccaaaaaattttaaatgaaaaatttcaaatatatagaaaagttgaaaaattatatggtggacaaccacatcactacacttaaatttgacaattgtcaacacttttgagtgtttcttttatcacgtatatctatctacccatccagcaagccatcttatattttgatgcattttaaagtaaattgcacgctggatgtggtggctcacacctgtaatcccagcactttgggaggccaaggcaggtggatcacttgaggtcaggagttcgaaaccagctcggtcaacattgtgaaaccctgtctctactaaaaatacaaaaaattagccgggcatggtggcaggcgcctgtaatcccagctatgtgggaggctgagacaggagaatcgcttgaacccgggacacagaagttgtagtgagccaagattgcaccactgcactccagcctgggcgacagagcaagaccccatctcaaaaaaaaaaaagaaattaataaaaataaattgctgacttaagtataattcaactctaaacatttcagcatacatatcaacaaaatgtgtttgtgcttcttctttaaggtaatatttacatacagtgacatgcacaaattctaagtggaccattcattgcgtgtgttctgacacatgcacaccttggtaattcaaacacctatcaagatatagaatattttcatcattccagaaagttccttctagtcccttcccagttagtcccatcctctcaagcatttttttttttttactataggttagttttgctggttctagaacctcatataaatggagttatacaatatgatttttattgccttagcttaacaaatctgctgtgctctgtttgaattccctttccctacatcagggtcataaaattcctccagaaagaaagctgagggtaacgacagggctcgtgttatttgtccatgttttctagagatcactgtcctgctctgcccattgtcaaatgtctgaaaacattttataggttttgtccagtattctagttgtttatggtgaaagaattagtccagtaccaatgatttcttcatggaaaggccaaataagggacactttgagaaccaatatagtgataacagattataaccattgaataaaatagaattcatgagcctattctgctgtaaataaaaaaaatcacacataaatgagaagaaagaaggaagacctaaggcttctgtcactcagcataatgatatttgttgttgttgttttgagacggagtcttgctctgttgctcaggctggagtgcagcggtgcaatctcggctcactgcaacctctgcctcccaggtttaagcaattctcctgcctcagccttctgagtagctgggattacaggaacgtgccaccgcgcccagctaatttttgcgtttttcgtagagacagggtttcatcatgttggccaggctggtctcgaactcctgacctcaagtgatccagccgcctcggcctcccaaagtgctgggattacaggcatgagccactggcgcgcggccagcataatgatttttgggattcatcacgctgctgtatctgttgttgactcctctttactcctgagtaggattctactgtaggaatataccacagtgggcttttccagtctcctgttgatggacatttgggttgtttgcagtttggggctcttccgaataaagctggtataaaacattcttgtgcaggcagttttggggatacgttttctcgtgggtcgcttgaagggggtacatagaacatacacaggccctcttcctggggctcacagtctactgtaacttcagtacaagacgcagtgacgtgagtacacgctgtgtgtcaggtgcagaaatgacagtaagaggcgtgaggaggtgggaagtgcttctttggggagagctaggggcggcttcttggaggaggggggctcgggtactggtacagcttggtttagtaggaggatcagaggctstgggtcagatacacctgcgtctagtctttctctctcacacacacataaagatccctgggcagtctcacttttctcagctgtaaaacggggttcatgacaccacaggatttgctggaataacgggagtaaaaggcctctttcattaaacgctcctcttttccctacaggcctggccctgctggccgctttcaatgtggatgtggcccggccctggctcacgcccaagggaggtgcccctttcgtgctcagctcccttctgcaccaagaccccagcaccaaccagacctggtgagtagggccggtgggcaagaggccttcagactgaggggcttccaggcaatctgagatgggccccagagacggccatggcagcccaccccaccccaccgtcaggagaggaactcctttctctttcagaagggcatgcaggagaaagagagaaggtgtgagagaggctgtgggcatcgggctggtctgtggggtccacggaaccccagcctcacgcctcactgggcctctccctgctccattgcccagggggagggtggacttaaagacaattttagtggcygggcacggtggctcacgcctgtaatcccagcactttgggaggccgaggcgggcggatcacgaggtcaggagattgagaccatcctggctaacacggtgaaaccctgtctctactaaaaaatagaaaaaattagccaggcgaggaggcgggcgcctgtagtcccagctactcaggaggctgaggcaggagaatggcgtgaacccgggaggcggagcttgcagtgaaccgagatggcgccactgcactccagcctgggcgacagagcgagactccrtctcaaaaaaaaaaaaaaaagacaattttaaaataaagcatattaaggctcttttgttccttatggaagtaacacatgttcaatatagaacatttggaaacaaaaaataacaaagaaaaaactgggcctggcaccgtggctcacgcctgtaatctcaacacttagggaggctgaagctggaggatttcttgaggccaggagttcaagaccaccctgggcaacatagtgagacccccccaactcaaaaaaaaccaaaaactgtctgggcatggtggtgcctgcctgtagtctcagctacttgggaggctgaggcaggaggaccacttgggcccggaggccgaggctgtagggagccgtgattgcaccactgcactccggcctgtctccagaacaaaaaccctgaaactatgaggaacaagcgtgtactggtaagaggcaggctgtggctctggcagccagggttcagtggcagcttcaccgtggatttgccgcatagcctgagcaaggtgctcgggcctgagcttcagtttcccttctctgcagtcagcgtggggawctacctacttcacaggattgtcgcaaagactatttgagataatgcaygtaaagggcttagcacaggttctgccgggcgcggtggctcacgcctgtaatcccagcactttgggaggccgaggcgggcggatcatttgaggtcaggagttggagaccagcctggccaacatggtgaaaccccgtctctactaaaaatacaaaaattatctgggcgtggtggtacacgcgcgtagtcccagctactcgggaggctgaggcaggagaattgcttgaacctgggaggtggaggttgcagtgagccaagatcgtgccattgcactacagcctgggcgacagagcaagactccgtctcaaaaaaaaaaaaaaaaaaaaagggcttagcacaatttctggccacattaatgctcaataaacattactttacattttttaaatatcatctatacccacctattagataagcaaaatgtaaaatctgccaacattgctggtaaggttgcggtgaaacagggacgtgtgggagtgtgaattgcgatcaccaccttggagagcaattttgccgtatctggtaaagctgaggatgcacgtggcctctgacacttccactccccgatcccagctctagagaaattctcagacacatataaaaatgtttgtgtgccgggcgcagtggctcacacctgtaatcccagcactttgggaggccgaggccggtggatcacctgaggtcaggaattcgagacctaggctggccaacctggcgaaaccccgtctccactaaagatacaaaaaaaaaaaaaattagctgggtgtggtggcgggcgcctgtaatcccaggttcttgggaggctgaggcaggagaattgcttgaacccaggaggtggaggctgcagtgagccgagatcgtgccattgcactccagcctgggtgacggagcgagactctgtctcagaaaaagaaaagcaagcaaaaaatgtttgtggtagcattgtttggaatcatgaaagactggcaatattcctcttaggaaaatgggaaaaatactgatatgactcatgcaatgcaatactaaaagcagatcccctgaatgaagccagtgcaatggttgtttacctggatccatctggaaacataccgtgagttgaaaaaggcaagttgtagaatttaatatacaaaggttggcaggtgcagtggctcacctgtaatcctagcactttgggaggtcaaggcgggtggatcacatgagcccaggagttcgagaccagcctgggtaacacrgtgagaccctgtctacaaaaaatataaaaaaatcagccggatatggtggtttaagcctgtagtccgtcccagctattgggaggctgaagtgagagacctgcctgagcccgggggcgggtgrgtcgaggctgcagtgagccgcgattgtgccactgcacttcagcctgggtgacagaacgagaccctgtctcaaaaaaaaaagaagcaagtaagtaaaatatgcattccctcagatggcgatggtggccgcgtgctgatgtaggagtgtgtctgcagttaggagaagctctggtggaaagggtcatgagatccgaggctcatttgaatttcccatgtgtcaccaaaatgacttttatttatttctttacctattatttatttattggagacagagtcttgctctgtcacccaggctggagtgcagtggtgtaatctcagctcactgcaacctccgcctccygggttcaagtgattctcctgcctcagcctcctgagtagctgggattacaggcgcccgccaccacgcccagctaattttttgtatttttagtagaaacagggtttcgccacgttggccaggatggtcttgaactcctgacctcaaatgayctgcccacttcggcctcccaaagtgctgggattacaggcatgagccaccgcacctggccccaaaatgacttctagtgctgtgttgttttaaagccagatctggtcaaggtttatgtattacgtattgctgttatgtctctgtcattgatttcaatccaaagcagtgatttctcccccatttttttctgggtggtcatagggcttttcttgtgcatactctcccactgagcgggcccagcctaggatggttacctcctcatcccaccccagcccaccagattgctttgctcctggtcagtggtcaagggtttccttcacacccagcacacaggagcaagtgagcccagggttcaaacaggcactggggcagagccaggtgaggagccagggttcctggstgggcagggcgggagctttgcttgaataggatgggtgggcagtggtggctcccgaagcagcctcataggccctgggacttgggccttgaccctgacagccaggcagacttggatcctgtgatactgtgaaatgtatatttgacattccaagactgaatatatattttacaatataacaaataaaaatatatttggtctcaaaataaacatttggtcccattatctggcatacaygcctaaaatctctggaatctccaaagtaataaatgtctttttctttgttaatgagttgacgggggaccggcagcccccagatagcttcaaaatgggggctggtcactggagagaaccaggcacgatcagagggttgggactttcagccccacacccctcttctgggagagaagggctgaaggtttagttgatcaccagcggccartgattcaatsagtcatgcctatgtaatgaggcctccataaaactcaaaaggacagggtttggggagcttctgggtagcagaacatgtggaagtttctggagggtggccccygagagggcatggaagctttgcccctcacccccactttgcccctcacccccactttgccttatgcatctcctcatctgtatcctttgtaatatcttttttttttctttttgaggcagagtcttgctctgccacccaggctggagtgtggtggcatgctctcggctcactgcaaccactgggttcaagcgattctcctgcctcagcctccctagtagctgagattacaggcgccygccaccacgcccatctgagttttgtatttttagtagagacggggtttcaccaatgttggccargctggtctcgaactcctgacctcgtgatccgcccgcctcggcctctcaaagtgctgggattacaggcgtgagccaaggcacctggcctgtaatatcctttataataaaccagtaaatgtcggtaagtgcttctctgagttctctgagccactctagcaaattaagcccaaggaaagggtcccagaaaccctgatatgkttgtttggtcgaaagcacaggtgaaataaccggcggctggtgatgggcctcggaagttaggagcagtcttgtgggactgagacctcgacctgtgagggctgatgctacctccaggtggagcatgtcggaattgagttgaacgtgaggaccttcagctggagctggttgccgaaggactgcttgccccgtgtggagggaaaaccccacccacctggggtcactggactgttctgtgttgtgagagctgcaggggagacagagctcgacgtttcctacatcattagagagtcctttctggatcctggtttcatcggtgcagtcaaaagtctggtcactgccaggcgcggtggctcacgcctgtaatcccagcactttgggaggctgaggcgggcagatcatttgaggtcaggagtttgagatcagcctggccaatatgctgaagccttgtccctactaaaaatacaaaaattatctgggcgtggtggcgcgcacctgtagtcccagctgcttgggaggctgaggcaggagaatggcatgaacgcgggaggcggagcttgcagtgagccgagatcgygccactgcactccagcctgggcgacagtgagactccgtctcaaaaaaaaaaaaaaaagtctgctcaccattagatttaagtggtaaggatggggccaattcattcattcattcattcattcattcagcaagtatggatggagcacttactcagtgccaggcaatatttggggaataagagggagacatggtcactgccttcatggagctcccgggctcatgagggaaacacaagctagacgatgacaagagtgacaatgaccccaccgaataacagctctgttgggggacgtccgaggtacgggggggcgcatcgaggcaggtgtgttcatcagcgtctactaggatttgcagggtgactgggaattagcatgagaaggaacggkaargggatggcaggcacagagaacagcttgatcagaagcctggaggccggctgwgtaaggtcaggaaactgagaaaatcacgtgtggctaaagctgasagtgatgaaaagtaagctgggagagtgtggtggtgcctcgtcacccaggcactgagggtttggaggaactagagggtctgaagccgggaggggtggtgaggttttcagggagttttgtgttgcacgaagatgaattaaaggtcaagattgtgtttggtttgggtaaaattttatcaacatgtgccatacagaagaatgcacacccggctgggcgcgggggctcacgcctgtcatcccagcactttgggaggccaaggcgggcgggtcacctgaggtcaggagttccagaccagcctggccaacatggtgaaaccccgtctccactaaaaatataaaaattagccgggtgtggtggtgggcgcttgtaatcccagctacttaggagaggcaggagaatygcttgaacccgggaggyggaggttacagtgagccaagaccgcagcattgcactccagcctgggcaayaagaatgaaactctgtctctccaaaaaaaaaaaaaaaaagaagagaaaaatgcacacctcataagcatgcagcgcagtraacatccgcagagtgaagcactgtgtaagcagcatgcagatcaagggcacgtgagctgcggcgcctaggccccctctaagccccgcactcccttccagacacatctgctgccaagagtaacccccagctgactttcatctccgtggattagcctcgcctggttttgcatttagtatcaacgaggcatacggtgtgtgccccgctacgtcgggctcctctctctccacataaggcctgtgaatttcatccatcstgttgccccaggcggtacttcttctggttgccagggttacattgtgtcgacagtactgatgattggcatttgggctgttttcttgggctgtgatgaatagcactgatgtgcacctccttttgatggatgaatgttcttttttttttttaatccctcagagttgatcccaaagaatgtactcatttttggggagggcatatgtgctcaggagtgggattgctgggtcagaagttatgcaattggttctgcattcagttttccatactgtttgtagggtgtgagcaggtttcagtcagcgttttctgtaactgtctcctgcctagttccctcccaccaatacccagcgaccccacgcctcagctccaggtcccaccgacattcacagyccctctctcagaagcctaaaggccagggtgcaggagagagtttggagcccgtgtcgcagagggctctgagtccaccaggggctgggggagggcccagcggggctccctgaacacctgctgaagcagagaggggctcccaggcttgaacacgctggggaggaggatgtggtgggaggcacttctgggttcctgctgcagagagtggggcctgagaccacgggcctgctgcatggggcaggaagtgcgctggctggccaactcgggcctagaaaaaggcaggggctgtgctcctgcttgagaatgacgtgtgcctctcactcacattgtctctcttaaaatgtaagagaccagggctggcagcatcatgggttttggttgccacagaaggtatgggtgggacagacagcagacatggaaatagaccctgagggctgggcatgggggctcacacccgtaatcccagcactttgggaggctgaggccggcagatcacttgaggtcaggagttcgagaccagcctggccaacatggtgaaaacccatctctactaaagataccaaaaaaaaaaaaatttagctgggcatggtggcaggtgcctgtaattccagctactcaggaggctgaggcaggagaatcacttgaacccaggaggcagaggttgcagtgagccaagatcatgccattgcactccagcctgggcgacagagtgagactccatctcaaaaaaaagaaaaaaaaaaaaaagaaagaaagaaakaaaccctgagaacaggacaggttagagctgggtgaaggcaagatgtgagcttcaagtcagtgaccagttaaaaagattgttaaacatttaaatacaaaatactaaataaggtcaggcatggtggctcgtgcctgtagtctcagcactttggaaggccaaggcaggcagatcacctgagctcaggagttcaagagcagcctggccaacatggtgaaaccccatctctaataaaaatacaaaaattaaccgggtgtggtggtggcacatgcctgtaatcccagctactcaggaggcagaggctaaggcaggagaatcacttgaaccagggaggcggaggttgcagtgagccgagatcacgccactgcactccagcctgggagacagagtgagactccatctcaaaaagcaaacaaacaacgaaaaacatactaaagcaataaataaaggcaggagayggacaagggttgctgggctgtacccagctcagggtgtaacagggcccctgtggctgcgagctgatggccagtcctctgtcagagctggtgggtcaatggtttgtcagccacgtggtcaacaaacctgcaaactcccggcagtgggggataaaaggtgtgggaagcagaggcagctcagagggccccaggccatgtcattgcatgatggcggcatgaatggcagtcttgggatctgcagtgcgcaccctgcacagctgttcatgatggcctcctgggaacgcgcagtccaggtgggaagaaagggtgggggtggggtgctatagtcagggctgctgcagggcctggaggggatcaggctgcacttcctttgggaaggcttcctgaggagctggggtttgggatgattgctctgcagcaggagggatckcaggcagaggaaacagtccgggcagaggactgaggaggagagagactggaggcgggtccaggcctgcacctaccccaccaaaacggggtctgcggtggagcccagttttgaccccacccttcctgggggagcagggaaggagatgctgggtctagggctgaggtcggggctggggagagaggcagggttgctaaggaagcaacctaatttgggggctcagctgcagagccggaacagaggagcagctctctgctgcacccagccctccgcccctcagccctgccccagatgagccccctcagctgttgcctgggctgttgttcaatagtcactcaacacttactgagcccttgttctgtgccaggcattgctccagaccctgggaataacacagtgaagaagatagacaagatccttcgggagcctactgtctcgtggggagacagataataggcactatcagatgatggcaggttctgagaaggaaatcaaacagggtgatgtgaagcagagtaactgggttgtgaggcacggctgggtagagaaagcatttatgaggaggtgacaggcgaggctggggaaggagaataagccaaccttggggagagtggaaggtgagggctctgggaataggaaacagcgcggtggagggaacagtgccgtggagggaacagcgccgtggagggcctgaggcaggaaatgctggcgctggtcacccaggaactggggctgccactgacagaagggacattggtgtaaactacatgagtgggccaggtgctgtggctcatgcctgaaactcactgtaactcactaggctcactcccagcagtttgggaggccaaggcaggaagattacctgagcccaggagttcgagactagcctgggcaacatggcaaaaccccatctctacaaaacataagaaaatttgccaggtgtgatggcacgcatctgtggtcccagttacttgggagactgaggtgggaggatcgcttgagcctgggaggtcaaggctgcagtgaaccgtgatcatgccactgtacttcaacttaggtgacagaaggagactctgtcttaaaaaaaaaattacatgagtaaattaaaaaccaaataagtgggccaggcacagtggctcacttctattaatatagaagttttcttgtagttttggaggccagaagtctgaaaaggtgtcagcagggctgggtcccttctagaagctctgggggagaatctgttttcttgccttatttggcttctagaagctgcctgcattccttggctcacggcctcctcctcctcaagcctgcagcatagtaagctttgcatctttctctgacactttggaagaccaaggygggagtgcttgagcccaggatcagcttgggcaacacagtgagacttcatctctatagacaaattaacaaaattagctgggcaaggtaactcgctcctgtaggcccagcaacttgtgaggctgaggtaggaggattgctgagccsgggaggtcaaggctgcagtgagctgtgatcacactactgcactccagcctggacaacagagcaagacactacctaaaaaacaaacaaaccccacaaaataacaggaggctattaccatcaacaaggcmggacgatgatggaaggagcatctggagaagagttgctttctagaaataatttggagagtcrggcacggtggctcatgcttgtaattccagcactttgggaggctgaggtgggtggatcacctgaggtcaggatatcaagaccagcctggccaacatggtgaaaccctgtctctactaaaaatacaaaaattggccgggtgtggtggctcacacctgtaatcccagcaatttgggaggccgaagtgagtggatcacctgaggtcaggagttcaagaccagcctggccaacatggtgaaaaccccatctgtactaaaaatacgaaaattagctggtcatggtggcgggcgcctgtaatcgcagcactttgggaggccaaggcaggagaatcgcctgaacccaggaggtggaggttrcagtgagccgagatcgtgccattgcactccagcctgggcgacaagagtgaaactccatctcaaaaaaagaaaaaaaaaaaaaagaatttggagagagaaccaacagggttggcaggtggattggatgtagggcatgagtgaaaacacgacgaagtgaggatgcctcctgggttttgccttgagaacttagtggttgctggtgccatttgctgtggcggggaagatgagaagaagcaggcttgacaggaaagaccacaggttctgtttgtttcctatcgacgctgtaacaagttaccacaaatgtagtggcttacaacaacacaggtttattattattattattattattattattattattttgcactctttcacccaggctggagtgcagtggtgagatctcagctcactgcaacttccacctcccaggttcaagtgattctcctgcctcagcctcccgagtagctgggattacaggctttcaccactatgcccagctaatgtttgtatttttagtagagacggggtttcaccctgttggccaggctggtcttgaactcytgacctcaggtgatccgcctgcctcggcctcccaaagtgctgggatgacaggtgtgagacactgagcccagctgcaagtttattatcttgtagttttggaggtcagaagtctgaaaagctatcagcagggctgggtcccttctagaagctctgggggagaatctgttttcttgcctttttaggcttctagaagctgcttgcattccttggctgacgggctcctcctcctccttaggcctgcagcatagcaagcttcacawctttctccgactctgattctcctgcctccctcctagaaggacttttgtgattacactggggctttacagcccagccaggacagccctgggggcttctgggatgggagaggcctccttgggaggctcccagcattccctgcagtctcgccacttctcccctctgcctgcctcaacgtccccctgagtccctgcggctcgcccatgccaccgttttcggggcctccctcatagaaggacccttgtgatttcactgagcccacctagataatccaggataacccccccatctcatgatccttaatttattaactcacatctacgaagtcccttttgccataaaaggcaacatattcacaggttctggggattaggacgtggccttctttggggggccattattctgcctacgatagcagatggagaggtrggaatttcagccgttataggtgtattgaagccatgggcttggaagggatcactagggagagtgtgccggcaaggaagacagtgacccagcccccagatcctggtggcagatagaggtcagaccgcgaaggcaccagcgaagccttgaggaatgaggagagagtaggcagaaatctagaaaaaagtgttcgaaggagatggttactcatgtttggggcttctgagaggttgaggaagatgaggacagagagcggtccgttggatgtggcattgtgggggcccctggtgaccttcacaggaactgactcagagggtgggaagtcagcttggggtgggttcagttgtgggtgggcggatggacgcacaggtgcagactttcttattattctgtaagccatgccgatacgtgaatatatttcataatgtattaaaatgtagagtgataggagttgaggaagtggagacggtatctcatttctgccccaccttcctgtgctctttagtctgtcccaacccactgtagccacatcatgacctttttttttttttttttttttttgagacagagtctcgctctgtcacccaggctggagttcagtggcgtgatctcggctcactgcaacctctgcctcctgggttcacaccattctcctgcctcaggctcccgagtagctgggactacaggcaccygccaccacgcccggctaattttttgtatttttagtagagacgggstttcaccatgttagccaggatggtctcgatctcctgacctcgtgatctgcctgcctcggcctcccaaagtgctgggattacaggcgtgagccaccgcgcccggcctcatcatgagcttttgaaagcacagctaatcatgtgcttcccctttataaagtcctccatgacttctactgccctctgcagaaagaccttggacttggttcactgttaaccaccaagcccctcgtcccctccccaccatcccctatgacaaccccyggagctcactgtctgtctcaggacagcccagttctcctgggtaacgtggatggtgagaatgttgaggctgtccctggaatctgccgtctccctggactgggcctgggtgggggcaagaagtttgcagtcaggaggcgcagctcttgaggctgccttaatcaggctgaggcagccacccccaaacctccagttcttttatttatttatttatttatgagacgaagtcacactctgtcccccaggctggagtgcagtggcgtgatctccgctcactgcaacctctgcctcccaggttcaagcaattctcctgcctcagcctcctgagtagctgggactacaggcacacgccaccatgcccggctaatttttgtatttttagtagacacggggtttcaccatattgatcaggctggtctcaaagtcctgaccccagatgatccacctgcctcagcctcccaaagtgctgggattacaggcgtgagccgccgcgcccggcctccaaacctccagttctgactgacccacaggataggggcaccagcgtactcttctcaggaactaaggccaggcagggcaggccccctgggtggcccacgaggaagccagcactgcccccaacagaaccaaccccaacgctggtggttttctggcctccccatccctgtccccataagagagcagagtttttattaaccatcagtatcaccccttctttgtcagggtgggcagcaggcagagaggggttgcatttaaccatttcctgcctggtgctgtgtagaagcagaggttgggcaaatgtcttccccataatccagagtctgggctaggaatctgccggccagacagggagcttgtgagtgcaggcaactggaatgggaagggtgctgggcaggcagggagaagacgaggaacatcagccagctcagctttgcaacctcccctcccactcaggctcctggtcaccagccccagaaccaagaggacaccagggcccctccatcgatgttcccttgtccaggatgaaatcctttgccatcctgtaggtaagtcagccccamctccagggaatgctccccaggaccccctttctagcaaaatccccctcatctaaactcaaaccattccaaccccagccctgcctcatccagcccgttcacccctagactccagcataacccacagcaagattccatcccaatgcccagtcccaccccaacccaatcctaatccccagccacctttcctgacacagtcctagcaacagaaatgatacctacagcgtattgcgtgcccaccctgtgcccggcagtcctctgagtcattctgttttcatcctcaaaaccrcgccatttataagagaggaagctacagttcagagaatgtaggtcttttggttgccagtatgacaaagttcacacttttagtgttggtggctgattcgaaactctagcccttcctgatgcaagtcatcacacctcagtgcaattcaccccctacatattcagtctaactgtggccaccctagtaactagcatggggcctgacatatattaggtactcaataaatgccatttgaatgaatgaatgaatgaatgaatgaatgaacctgattcactcattaaactctatccatcctacccagtcaaactcaggtcacagatttactgacaacctcttggctatatatatataaataaatagaatccttgtcttgtctgaggctgggcgccgtggctcacgcctgtaatcttagcacactgggaggccaaggcgggtagatcatttgaggtccagagttcgagaccagcctggccaatatgatgaaaccccatctctaccaaaaatacaaaaatcagccaggcgtggtggtgcatgcctacaatcccagctatttgggaggctgaggcagaagaatcgcttgaacccaggaggtggaggttacagtgagctgacattgcaccactggactccagcctgggcaacagagcaagactgtttaaaaaaaaaaaatcctgccaggcacggtggctcatgcctgtaatcccaacactttgggaggctgaggtgggccgatcatgggtcaggagatcgagaccatcctagctaacacggtgaaatcccgtctctactaaaaatacaaaaagaaattagccaggtgtggtgacgggcacacgtagtcccagctactcaggaggctgaggcaggagaatggcgtgaacctgggaggcggagcttgcagtgagccgagattgcgccactgcactccagcctgggcgacagagcaagactctgtctcaaaaaaaaaaaaaaaaaaaaaaaaaatccttgtctgagaggcactgagttgaacagactcaatctcagtccagcagggttgactgagtgattccatgactgaaaaataagacagtatcctgaggctgacagtggggaggacgaggaaggagctaccatttctgcccctgaggctgggggcagtaagattccccaggatgggtctgtgaggctggsgggttccttggtccacacagccagtcccacggtatcttgcacattccttggcacttacatacccaccaggcagtgcttctccacccacctgcccraccaaacccactgaggaaaagcagcaggcatccgctgttgctggacgcccatcaccacgctcacaaggctgggcacagagcagacgtcaatgggcacgtgttgaaagggtcagcaaatgagccccggggatgggcactcggccctgaacgtgtccagtcctgaccttgaaggcccccgctctagctttctagaggcttctctgagtggccaacagttcctcatgggggcctgaccaaggtggctctgtgccctctgaccttggcttcgggtctctgcctcccagagtcccctcctcctcctcacctgggcttaactttttcagagcatgtccccatccccaaggggaggcaccggggagtgaccgttgtccggagccaccacggtgttttggtgagtgcaggagcgagaggagggagggccttagggaggctggtgctasccctcgtggttgaccctggtgttgagaccagttctgactgccaygctgttcccgaggctgagtctagcgtctccctggtgccaaccccagggctgactgtagctctgaccaccctgataccagggctgacctaggtattccctgtgacccagcacactcctgcaggtgtcggcctcggccttgaygccaacactgactcctacacccggtgaggggtgggccagctcttcctgtgccccctgcctggttgagccactgagttctggaatgggggtgagaatgtggctgtggctcgggaatcgggaggtgacctggtgtttccccaccctctcttccctcccacagatatgcattcaagtgctggtccggcggcctcacagcctcagctcagaactcacaggcacctgtagcctcctgggccctgacctccgtccccaggctcaggccaacttcttcgaccttggtaaggattggacattcactggccttggatagctctaaagagatctccttggtctccaagaaaaggcaccagctcacggcagatgcagtgggacgcaggcccacagtggagcaaggcagggttgaggcatcacgtgaaaggaatcagggcagaaccatgtgtgagcgtgctcaggygaggatggagcctttctgactctgagctcttccatgtgtgtttttaaagaaaatctcctggatccagatgcacgtgtggacactggagactgctacagcaacaaagaaggcggtggagaagacgatgtgaacacagccaggcagcgccgggctctggagaaggaggaggaggaagacaaggaggaggaggaagacgaggaggaggaggaagctggtgagaagaggcagatctgggttgctctgagtcyatcagagccaattcctaggctggtggcctccaagggtgaggggtgcctcagtctgagagatggggagcagtggctggactttacagacctgacctgtaccagctccayccactctttcttataagtggggaaactgaggctcagagagtggtagtgatgggaatggctcacacagcacacaaagcctgaccaggttctagctctctttttgaagggggagacaaaagcttctctcttggggccaggtgaggtggctcatgcctgtaatcccagcattttgggaggctgaagtgggcggatcacttgaggtcaggagttcaagaccagcctggccaacatggtgaaaccccaactctactagaaaattcaaaaattagccaggcatggtggtgtgcattatagtcccagctacttgggaggctaaggcaggaggattgcttgaacccgggaggcggaggctgcagtaagctgagatcccaccactgccctccagcytgggcaacagagtgaagctctgtctcaaaaaaaaaaaaaaaaaaaaaaaaaaagcttccctcttgggagcttctccaacttcttccctgaactgagctggttgtcagggctgcagtgggggtgcatgccctacacatgctacccttacatctgcctcacatcccatgcccactcctgacctgtttgtcttggccaggcaccgagattgccatcatcctggatggctcaggaagcattgatcccccagactttcagagagccaaagacttcatctccaacatgatgaggaacttctatgaaaagtgttttgaggtgggcttcyctaagagctggttaacacttatctattgctgagaatcaccctacctcagaacaacaatcaccacatttgctcacaattctatgggtcacatacttgggctgggctcagctggatgattcttctgtccrtcttgcctggagttaccctggagctgcaggcgtctggttgcttgactggggctggatggcctaagatgacctcacttacttgtctggaccatgtgtctttagcaggccagcccaactttttcgtggcagcaacattctaagagggccagatccaatgcatgcaagtatttttcaagtctctaattacatcacatttgctgatgtcttattggccaaagccagtcacatgaccaatcccatcgtcagtatggagggcactacacagggagctggggagaagtctgtgattcactgggggcctttactatcgcacccttctccacccctactcgcttagagattttgctctgccttagcatctctttctgcccagggataaggtagaaggagtggatttttctgctgcttccagcgggagacatttcaggggcagaggtggcaattcttccaacctcctgccctcctgcccatcccctgcagtgcaactttgccttggtgcagtatggaggagtgatccagactgagtttgaccttcgggacagccaggatgtgatggcctccctcgccagagtccagaacatcactcaagtggggagtgtcaccaagactgcctcagccatgcaacacgtcttgtgagtgtgggggctgcaggaattattctggccatgcccagagtctctgtggcatcactcatggaggaagtggctggccagaaccgcaggagaagagaattagggctccagcctttccctggccgagagagaacgtgagggatgacacctcaaggctgtcctccaaaaagtcttccaaagacttcctcttgtgagatgcaggagagcagagtgctcagtggacaggctggctgggttcaaatctcagctctggttttttttttttgtttttttttttgagatggagtcttgctctgtcacccaggctggagtgcagtggcacgatctcagctcactgcaagctccgcctcccaggttcacaccattctcctgcctcagcctcccgagtagctgggactacaggcggccaccaccacgcccagttaattttttatatttctaatagaggtggggtttcaccatgttagccaggatggtctcgatctcctgacctcgtgatccgcccgcctcggcctcccaaagtgctgggattacaggcgtgagccaccgcgcccggcctcagctctggtttgtatctgtgtgaccccgggcaaactgaaggaccttgtgacctgtgcttcagtttcctcactttaaaaatgagaaaaataggctgagcgtggtagctcatgcttgtaatcccagcactttgggaggccaacacaggtggatcacctgaggtcaggagttcaagaccagcctggccaacatggtgaaaccccgtctctactcaaaatacaaagttagctgggtgtggtggcaggtgcctgtaatcccagctactcgggaggctgaggcagggagaattgcttgaactcgggaggcagaggttgcagtgagctgagatsgtgctattgcactccagcctgggtgacagagcgagactccatctatctcaataataataataataaaaataaataaataaaatgagaataataatagtactcacagcttggagcagtggcttgtgcctatagttccagctactcaggaagctgaggcaggaggattgcttgagcccagaagttcaaggatgcagtgagccatgatcacaccactgcactccagcctgggtgacagagtgagacgccgtctctaaaaaagaaagaaaaataatagcacttgcctgatagattttgtgayggttggatggcttaaaatatacagtgtttacaacagtgcctggcacatgataagtgccatgtgagtattatctatcgttttaatatcatgagtcttcctgtacgcacacaagaggaatggactgccaggcagtaccttcctgctgggagcaggtgagaagcaagaacacctgtgttgcagccctccctctgcccagcctcgctgcgtgacttaagggggcatcacccccttctctgggtctttcgggaggattgtgaaccctcccaattctaatacaggtcagagaataaagtctctcctggagctcggtcatccttctggcaawgctctcttcttcatttactctcccctgcttagagacagcatcttcacctcaagccacggctccaggagaaaggcatccaaggtcatggtggtgctcaccgatggtggcatattcgaggaccccctcaaccttacgacagtcatcaactcccccaaaatgcagggtgttgagcgctttgccattggggtaagagccaggagccgggagacacctcctgaacctgcacagcctggggtggggagaagccagggttgtcgatgggggcttttctgtaagcagcttatccagaccctgttctatttgcaaatgctcctcttctctycatgctctgtcatcccagagagggctcatttccccatggtggtcacagcttactggccaaatagtggtgggagagccacaggaaacacaccaaggagggttcctggaggaccgyggtgccaagctgagtcctgccagacaaatgggagtagctggcctagggcacaggggaggcagagaggggccctgcaggcagagggaacagcatgtgcagaggtgaggaggagcttggtgtattcaggagaacaggtgtactttggtaaaactggaattttgcccagagtatgggtagaacagggagcagggaaaggaggagaaaggaaggaaggagacaggtaatggagggccccagaggccagatggaggggctcasctctctccctgggcctggggaatccacgcagcrctgactcgctgacccaggctgtctgtgcaggtgggagaagaatttaagagtgctaggactgcgagggaactgaacctgatcgcctcagacccggatgagacccatgctttcaaggtgaccaactacatggcgctggatgggctgctgagcaaactgcggtacaacatcatcagcatggaaggtgagggctccgggacccaggccaccgcaggaggcccgagcctatgctccagcccggcctctgtcccatcttcatgtggtttctctgagcaactcccatcatctccctgaacctcagctcttccatgtctaaaaaggcaatggccgggtgtggtggctcatgcctgttatcccaacactttgggagacagaggcaggtggattgcttgaggccaggagtttgagacccgcctgggcaacatggcaaaaccccatctctactaaaacaaaaagtagctggggccaggtgtggtggctcacgcccataatcccaacactctgggaggccaaggccggtggatcacctgaggtctggagttcaagaccagcctggccaacatggtgaaatcctgtttctactaaaaatacaaaaaaatgtagccaggcgtggtggtgcatgcctgtgatcccagctactcaggagcccgagacagaagaatcactcgaacccaggaggcagaggttgcagtgagccaagatcgcgccactgcactccaggatgggtgacagagcgaggctccatctcaaaaaaaaaaaaaaaaaaattagccaggcgtggtggcgcatgacctctattcccagctacttgggaagctaaggcaccaggtcacttgaccttgggaggcacaagttgcagtgagctgatattgagccatggcactccagcctgagcaacagagtgagacactgtctcaaaaaaaaaaaaaaaaaaaaaaaaarrscaacaatatccccaggcctccttgcgtcccagaatctccatgaagctctgatgaactgagctggtgctggagaaacaaggatggctggggcatagtcccttctcccaggagctcacagacgaggaaactgaggcctagaaagagtgaactgcccagatagtagttgctcaaggagaacctgggtctctaccctcagccgggttctcttcctgttacaccaagcatggttccttctgggagtgaggccaagctggactgtcccctgactcagtttctcccttcacctcggcccacagcagtctcactgggcttcttggcttgcaggcacggttggagacgcccttcactaccagctggcacagattggcttcagtgctcagatcctggatgaggtacgtggctgactcagcaccaggcaggcttgcccattggtgaggggcccaggacacctaggattcagggactcctgcctcccatccagggctctgccctacctgtggtgattcctgtaaaagagcgattttattttaattaattaatttatttatttattttgagacggagtcttgctctgtcgcccagtctggagtgcagcggtgcartctckgctcactgcaacaaaagggtggccatattgatgacaggaggtcgcttttttctgtgtgctcaaacatccagttgttcccctgaatacagaccaggcaacaggactcggcctgggtcagcttatcaaccaagctgcttgcttctcccggaggagggagtgcaagggcacgaggcaggagcccagtgttggccatctcaccttcccgcctgcatctctggccaggcgggcactagaccaccgaacgcccccctgctcccagccaggttagccgcgctggcccggagacccgcggccaccgtggcccggccttgggtccctcccactcatctgggccccatccccgtccccttcagcggcaggtgctgctcggcgccgtcggggcctttgactggtccggaggggcgttgctctacgacacacgcagccgccggggccgcttcctgaaccagacagcggcggcggcggcagacgcggaggctgcgcagtacagctacctgggtgagggcggggccacctgatgagggcggggccacctgatgagggcggggcctggaggctccctgatgagggcggggcctggaggctccctgggcgagggtggggcctgagggctacgtgggcgagggcggggcctacctgggcgagggtggggcctgrgggctacstgggygagggcggggcctggaggctacctgggcgagggtggggcctgggggctacctgggtgagggcggggcmtggaggcyacstgggcgagggtggggcctgggggctacctgggwgagggcggggcctggaagttacgtgaggagggtggggcctggagaccacctgggwgagggcggggcctagaggccacctgggcgagggcggggccgagatggggacaccgaggctgcgcattaggctgcacttgaggtttccggatgggggcgggacctggtcagtcacatgggccgaggggcgggtcctggttagggaccstgaggctgagtactacagcctcctgggtaggtacaaggcctgtcaggtacaccaggcacagcagccacccaggggagggcggggcctctccattaataatagtggtgcagtagctcacgcctgtaatcccaggaggccgatgcgggcggatcatctgaggtctggagaccagcccggccaacatggcaaaaccctgtctctactaaaaatacaaaaattagctaggcgtggtggcggatgcctgtagtcccacgtactcggaaggctgaggcacaagaatcgcttgaacccgggagggggaggttgcaatgagccaagactgtgccactgmactccagcgtgggcgacagactgagactctgtctcaaaaataaataaataaataaataaaaataataatagtggtgggcgtcctctcacccctcttctccgtcctcctagggtgtgtgtgggagcgtgggtagtgaatgtgtgcgaacgagtatttcgagcaaagctgcatacgtgacagacagcgtgtgcatcatatctgtgtgatggggatgtgtgtgactggcaaagtgagagtgctcgctgatgccgattttwaacatagtgagaaagacagtctctcctattttgccccccwccccaggccactttgaaggcctgactgggaaggtgccggggccaagagagaggccaggtgggagcacacggtgtgttcacagccacaccacccttgccccaggttacgctgtggccgtgctgcacaagacctgcagcctctcctacrtcgcgggggctccacrgtacaaacatcatggggccgtgtttgagctccagaaggagggcagagagkccagcttcctgccagtgctggagggagagcaggtacctgctggggaaagcctccaccccttatgaccgatggggaatctggaggcccccaagggaaaggagtgggtcccacggtgcacagtgggccagggcccgggctgggtgaaactcaggctcctgagtggagctcgagggctctgcttcagctctgcatgtctgattgctaggcagtttcctccgctgtggggcctgggctgctcctccactcttctgttactctcagtgagcaaattgatatgtaacgacccaaaytgggtggtccaggaagcacgcgggcaggggtgtagccttgctgaggggtgsaggagcggggctcctggtgagctgagttcctcccgggctgtagatggggtcctattttggctctgagctgtgccctgtggacattgacatggatggaagcacggacttcttgctggtggctgctccattttaccacgttcatggagaagaaggcagagtctacgtgtaccgtctcagcgagcaggtgggagagtctccatcttcatgagcttgctgaggctgtggcactcagcctgacacagaggtgatggaggctgggagtgccctggccctgcctggcaccagtgggcagtgatggggaggtgctcaggctggatggcggctgggcggggcagcggcatcgctctccgcacccactttcttacccaagggtgatcgttgatgataatatctctaatatcyctttttttgtggttgttgtttttgagatggagttttgctctcgttgcccaggctgcaatgcaatggcaggatcttggctcaccgcaacctctgcctccggggttcaagcaattctcctgcctcagcctaccaagtagctgggattacaggcatgggccacacacccggctaattttrtatttttggtagagacagggtttctccatgttggtcaggctggtcttgaactcccgacctcaggtgatccacccacctcggcctcccaaagtgttgggattacaggcgtaagccacctcgcccagcatttttttttttttttccgagactgagtctcactctgttgtccaggctggagtgcaatggtgcaatctcaacttactgcaacctctacctcctgggttgattctcctgcctcagcctcccaagtagctgggattacaggcatgtgccactacacccggctaatttttgtaattttagtagagatggggttccgccatgttaaccaggctggtctcgaactcctgacctcaggtgatccacctaccttggcctcccaaagtgatgagattatgggcgtgagtcaccgcgcccagctgataacatctcttacagctgcatggttggcaaagcccgtttagtccaggatctcacttgtttctcatagtaactatgggaggtagctgccactctcatcttacgggtgaggaagctggggctcggcgagcctcagtgatgccgagacttgctcaagtgtacctggcatgtgtgtggcagagccacgagtgaaacccaggcctcccatttgcagcaatgcacccctgcccatggaactagaggggggcgggctctgactcctgaacttccaggtaggaggaccccagctttcccctggtgctcactgtatggccttgggaagktccctggccagtgagcgtgcatcctgggtggcaacggagtgggcacccaccagcccagcgagcgtgcatcctgggtggcaacggagtgggcacccaccggcccagtgagcgtgcatcctgggtggcaatggagtgggaacccaccggcccagcgagcgtgcatcctgggtggcaatggagtgggcacccaccggcccagtgagcgtgcatcggggtggcaatggagtgggcacctagcaccccttcttgagggctgagctgtttgtttgctttacaggatggttctttctccttggcacgcatactgagtgggcaccccgggttcaccaatgcccgctttggctttgccatggcggctatgggggatctcagtcaggataagctcacagatgtggccatcggggcccccctggaaggttttggggcagatgatggtgccagcttcggcagtgtgtatatctacaayggacactgggacggcctctccgccagcccctcgcaggtgacccatgggrccctctccttcctctcctctggggctctgacctctctcagatatgatgacccaagccccaagtcggcttcagtcctaagtgctgggcaggtctcgggggttgggaatgcccagtgaaagaaagaagtcccccaggctagggggagcttccagaccagggcctcacctcagccccttcaggttgggrggaggttccagaccagggcttcacctcggccccttcaggttcrggggaggttgtggcggtacctgtctccttccctggcctataccccctccttccacccacctgcctcgggtccctgcttcctctctttctgtccctcgctcctgtctcccacccagcacctccgcgccttatctctcattccccagggctcccttgccagcctctcacactgcatgtattaacaggcacttccacccacctccagctcctcatgagcacctccacctggatggcccccaggcatctcactcccacacggcccatctgagagcacctgcttcccctagaactgatgctcctctgagacctcatccccctccacaccccacaccggaaacctcagacagtcctcagcacgctcacagcctgcacagcctgtcagttcccacgtcctcatgattctagctgtctcccaactccagccccttctctctatccccacccctgcggtcccagctcaggccttgccatcccactcccagcccacccagcttcctcctcctctccatcttccaccccatgtcttcagtgccatttctaaagtgttatcctgattatgtcacttcaaaacaacagaacctttgttgacaccccccatccccaagccccacatcaagcctccttgtaccccaatcccctgtggtccaccccgtccctggccctggctgcttctcagaaggccctgctctttccccaygcctcactctttcccttactctcccctgtcaagtcccacctgccctwcgaggctccatccaaatgccacttcctctgggaaagcttgctccctctttcctggttctagactcggggctccctggggctggatggtgcctgcgatgctgatcgggatagatcatgaaaggactccccgccccgtttccctcccttccctcgccccacgccttgtgtttctgcctccacagcggatcagagcctccacggtggccccaggactccagtacttcggcatgtccatggctggtggctttgatattagtggcgacggccttgccgacatcaccgtgggcactctgggccaggcggttgtgttccggtagggttctgtcctgctttctggggtcccaggcccagcctcacccatttgccctgctctaaatagctccatgcagacattaggcactgagggagggagccagcaccgtggttgtgggcacaggctctggagtctgcccgtctgggtttgaacctcagctctcagccctctcagcctttgggcaggttatttaactctaagaccttacctaggaattataagagcacctacctcccagagctatgaggatcatgcaagcgaatatatacaaagtatttagcacagtgctcagcgatggctgtgattgcagagttttttgttttttgttttttttctgaggcrgagtcttcctcttttgcccaggctggagtgcagtggtgtaatcttggttcactgcaacctccgcctcccaggttcaagcaattcttctgcctcagcctcctgaggagctgggattacaggtgtctgccaccacgcccggctaatttttgtatttttagtagagacagggtttcaccatgttggccaggctggtcttgaactcctgacctcgtgatccacccatcttggcttcccaaagtgctgggattacaggcatgagccactatgcctggccaagaattgcagagtttttgtgccccatccctcagtgaatgatcaagtcccgtggctgtaaatgagctcatggagcgcccgtctgtcccgtcctctccaagctgcagacttgctgtctacccagcacctccctgagctgctgctcacagtcatcccgaagtgaacacgtctaaaaacagagcttttgctgggcgcagtggctcacacctgtaatcccagcactttgggaggcccaggcgggtggatcacaaggtcaggagatggagaccatcctggctaacacggtgaaacctcatctctactaaaaatacaaaaaattagccgggcatggtggcgggcgcctatagtcccagcgactcgggaggctgaggcaggagaatggtgaacccgggaggcggagcttgcagtgagcggagatcgcgccactgcactccagcctgggcgacagagcgagactccgtctccaaaaaaaaaraaagaaaaacagagcttttatctccccccacccttcattcccccaaatctatcctgccctcaggctttctgtctcagcaaatggcatcatcatccacccagcaattcaggatgaaaacgtaggcgtcatctttgatgcctcttttccttcctctccaccacatcaacaagtcttagttggctctgcctccagaccagtgcaggcactgtcttcactycctggacactgctgccacagcctttcctgcttccagcccctgcgctccattctccacacagcagcagccctatcccttcactctgctgcctgaaactcctccacggctcctatttagagtaaaatcccaattcctcaccatggctttacagggctcttcgtggcctggcccttcccgcccctccattcccatctcctcctcccatcctctgtctcactaattagattccaggcatgctgacctttgtgctcctcaaacaaaccaaaagtgttcctgccacaggcccttggcactggctgtgctttcttcctggagtgctcttccccagatcctcacacagctggctctttcttgttaacaaatctcaaccgaaatgcctcctcatcagccacgccatctgtgaccacccagtctcagtagccctcggtccttattaccgtatttttgttgttgttgttgagatggagtcttgctctgtcaccsaggctggagtgccrtggcaggatgtcggctcactgcaacctccgcctcccaggtttaagcaattctcctgcctcagcctcccaagtargtgggattacaggcgcccgccaccacacccagctaatttttgagttttttagtagagacgatgtttcaccaagttggccaggctggtctcgaacccctgacctcaggtgatcckcccgcctcrgcctcccaagtgctgggattacaggcgtgagccaccgcactcggccaacagtattttaatttttctcatagccttgccaatacatagtatctccctgtttctctcgtttatttgcttgttgtctgctttcccaccaaagcagaaacttgtctctttccccactgtaccctgagactcagggatcacctggatgtgggcatgtttgatagagaaccattgaatgcatgaaccaatcagccaggccctgacccagaggctgagcagtcacttctcccatcctctttgctgtcttgtttagctcccggcctgtggttcgcctgaaggtctccatggccttcacccccagcgcactgcccatcggcttcaacggcgtcgtgaatgtccgtttatgttttgaaatcagctctgtaaccacagcctctgagtcaggtaaaaaaatggtccagctgacccctgcctggtgtgatggtctttcctttttggcttctgtaaggggcagggaaagaggactggggcggggggtgggtgggtgttggtctgaggtcctggtgcttgaaatccctcgattagagcttagctccttagtctccaggtttgttaaatgcaaactgcctcaagaaagggtggtctgaggttatgtccacactcagaaggggtttagagctgacactgttgggaagagggacactggggcccttcctcagggttgaagggttgagtttctgaaaaaaaagactcagaaggccgggcgcggtggctcacgcctgtaatcccagcactttgggaggccaaggcgggcagatcacgcggtcaggagatcgagaccatcctgcctaacatggtgaaacaccgtctctactaaaaatacaaaaaattagccgggcaggtgcctgtaatcccagctactcgggaggctgaggcaggagaatagcatgaacccaggagacggagcttgcagtgagctgagatcgcaccactgcactccacgctgggygacagagcgagactccgtctcagaaaaaaaaaaaagactcagaaaaaggcagccatttctccatgcccacgtgtgtgcgtgtgtgcgggggcttctgagacacaccctcctctttctctctgacttgtgtcttctccccttccctcctcactatgtgcctccggcccaggtgggattggatcacctgttggaggcctggtttctctttccttacctgaaactcattaggagactgttcccagaaaggaggtggtgggcatggctttcacagcccaggtatttactgctcatccaagagctcccccctggaacgattcctcagcaacagtccccgaggtttaatctctcaggagcaatctctgagatggtctctgcctcccacagtcagagagcagtctcctggggtggggtggctttcccaaagcagcaggctattatccacctggggattgaaaatgacagacctggccgggtgtggtagctcacgcctgtaatcccagcactttgggaggccgaggtgggcagatcacgaggtcaggagatcgagaccatcctggctaacacggtgaaaccccgtctctactaaaaatacaaaaattagccaggtgtggtgacagatgcctgtagtcccagcactttgggaggccgaggcgggtggatcacaaggtcaggagatcgagaccatcctggctaacatggtgaaacgccgtctccactaaacaaaatacaaaaaattagccaggtgtggtggcgggcgcctgtagtcccagctacrggggaggctgaggcaggagaatggtgtgaacccrggaggcggagcttgcagtgagccaagatcgcgccgctgcactccagcctgggtgacagcgagactctgtctcaaaggaaaaaaaaaaagaaaaaagaaaaaaaaaagaaaataacagacctgtcccttccaggacacagagctcgatgggctgtgcgatgctgggcaagtgtctctccctagctgagctggttctgttctgtacagtaagagaggcggccccgggatctccacggtgcttccagctgtgccgtcctggggtttttctcckcagagtccctctttccctctccattctctttgttgtctctcttcctccttattttcttcttcaatctcgatccccttcccragccctccttccctaaagaaggctgactcagtcctgggaatgtgctgctccgggtttggggcgggagcactcagagaccctggtcaggtgtcagaagacggtgagaaaaatatctttgaaaaaccgacgcaggagtccagccgcagggaagtacctgcatggggacactgttcaggaggggccacaaggaacctcaggcaggctgggggccttctgtctgcggctggctcatccccacctcatcgggaaggtctggtcttcattcccaggcctccgygaggcacttctcaacttcacgctggatgtggatgtggggaagcagaggagacggctgcagtgttcagacgtaagaagctgtctgggctgcctgagggagtggagcagcggatcccagctttgtgaggacctcctgctcatgcccacagagggagaggtaagtgacggagtttggatgggagtcaggaggggtctttgtcattgagaaaggatttgaggtgatgcagtgaagggcacatacccagacctacaaatgaggtgattaaaataatcataacaggccaggcacggtggctcacgcctgtcatcccagcactttgggaggccaaggcggggggatcacttgaggtcaggagttcgagaccagccgggccaacacggtgaaaccctgtctccactaaaaacacaaaaattagccgggcgtgrtggcgggtgcctgtaatcccagctactcgggaggctgaggcaggagaatcgctggaatccaggggagggaggttgcagtgagccgaaatcatgccactgtactccagcctggccaacaagagcaagactccatctcaaaataataataataataaatcaagaaccacgtaatggcacggaagatggagatgctgtcattgctgacgtttttcttggtaataactcaggaatgccagtgttcttggcatgcgttatcmgacctcacctgataataactaggaccgagggcctgaatgtcagttggcatcaaaaaagtgaacaactaaaaggaagaataaaaagatagaaacgaccatctagaaaggtttactcctggcaaaggtgcccagagacatggggtaaaaaaagtatgtcgggactcaaaccctgacaggatctcgaactttggatctatatggatcgtttattccaataaacaaatgcatgaattcttcttctgaatacacatttacccccaaagtgattgttaattggattaaagtctacagccttccttaaataaaggcttaatcacattctctaccagagaatcatgctcactttctcccatgggcttgaggctcttataggggcagaaaggcttatttaaacaaagagagtggcaaatggtatgctaagcaatctccttatcttctctcttacctctctaatatgtcctccatgttgctttgagaaagatcttggttggttgggcgcagtggctcacgcctctaatcccagcactttgggaggccgaggtgggaggatcacctgaagtcaggagttcgagaccggcctgaccaatgtggtaaaaccctgtctctactaaaaaaaaatacaaaaattagccaggcgtggtggcatgcacctgtagtcccagctacttgggagactgaggcaggagaaccttgaacctaagaggcagaggttgcagagagccaagatcgagccactgcactccagcctgggcgacagarcgagactccatctcaaaaaaaaaaaaaaaaaagagagagaaagaacttgataaacccaggtgtggctgtgactcttcccttctgtctgagccagttctttacccctttgtgactgggataagaaccatagcagctatagacacaaaaccgtagtagaatgaaggagatttttcccaaagcacttggcagcttgcttgaaggacgtgtcccttcagcctggcttatttggaagatgcttaggacttctgactcaccacttttattgtttatttcttcttatgatgacatcaaagtagaaagtattcttgcaaggtgcrgtggctcatatttggaaatcccagcactttgggaggccaaggtgggtgaattgcttgagcccaggtggttgaggctgcagtgagccatcatggtgctgctgccctccagactgggtgacagagtgagtgagaccttatcttaaaaaaaaaaaaaaagaaaagaggccgggcgcggtggcttacgcctataatcccagcattttgggaggctgaggcgggtggatcacttgaggtcaggagttcgagaccagcctgaccaacatggcgaaaccctgtctctactaaaaatacaaaaattagccaggcgtggtagcacacacctgtcatcccagctactcgggcggctgaggtaggagaatcgcttgaacccgggaggcggaggttgcagtgagccgagatcacgccactgcactccagcctgggcaacagagcaagactccatctcaaaaaaaaaaaaararaaaaaragaaaaaraaaaaaaaagcattattgttgtcatcttctcccccacatccaactctaaccctgccttccgtggtgaccccacagctctgtgaggaggactgcttctccaatgccagtgtcaaagtcagctaccagctccagacccctgagggacagacggaccatccccagcccatcctggaccgctacactgagccctttgccatcttccaggtgactctacccacagccagtacccagccctcttaagagcctatcccacagaaaccacctgctcccctaacttccaagaatggtggagttgggaggcaatgtcttcagacggcatttgggcccctcaccgtactcatggtgaaactgagtccctgagatggtgttaatgtgtccccgtgagtgaggactcatgggtaacgcaggtctccatctgcccctggggcttgttcctttatgtctttatgttcacaaaagcacttgctacatctttcatgaggcacatgcatacattgcatcctggggacctcacttggcaagcggctctgatgacgctgtgatgggggttccttgtgggagctagactggagctgtcgtgtcttgcactgcagagaggatgccctttggcacacctgcctgttcatgccctgccagggccttcaggctgaatggccccaccaaacctgtatcctagcctctcctcctggtgcccatcagtgcagcttagacaggcgggtagtgtcataagaaacttttgtcagccgggcgccctggctgatgcctgtaatcccaacactttgggaggttgaggcaggtggatcacctgaggtcaggagttcgataccagcctggccaagatggtgaaaccctgtctctactaaaaatacaaaaattggccgggtgtggtggcatgggcctgtagtcccagctactagggaggctgaggcaggagaatcatttgaatcctttgcccaggaggcagaggttccagtgagccaaggccgtgccattgcactccagcctaggcaacagagcgagactccatctcaaaaaaataaaaaataaaataaattttaaaaaatacaaagattagcccagtgtggtggtgcatgcctgtagttccagctactcaggaggctgaggcaggagaattgcttgaccccgggagacagtggttgcagtgaaccgagatcgtgccactgcactccagcctgagtgacagagaaagactccgtctcaaaaaaaaaaaaaaaaaccacaaaccttcaatatatatttcctaaaaacaaaggcattgtcttaacatagtacaataatcaaaatcaggaaattcacattgataaaatactattatctaatttacaaactttattcaaattttgccagttgtcctattaatgtcctttatagcaaaagaaaaaaaaggttctggtccaggatcattcatagcgttctacagttatttatcyttagtctcctttaatctggaagggtttctcactcagtcttyccttgtcttttaatgacattaacatttttgaagggtacaggccagtccttttgtagaatgttcctcaatttgtctgatatttcttcataattagattcaggttatacatttttgttttgtttttgagacagagtttcgcccttgttgcccaggctggagtrcaatggcgtgatctcggctcactgcaacctctgcctcccaagttcaagcaattctcctgcctcagcctcccgagtagctgggattacaggcatgtatcaccatgcycggctaatttttgtacttttagtagagacggggtttcactatgttggccaggctggtcttgaacacctgacctcaggtgatctaccctcctcggcctcccaaagtgctgggattacagacgtgagccaccatgcctggccaggttatgcatttttgtcaggaatatcacagaagtaaagtgtgtccttctcagtacaccatctcaggaggcacctaatgtggacttgtccattcctagtgctgtttgcctgtgtcattaataagcacgtctcattttatggtgagatgccttgcgattgtatcctgcttaacatctctttatgtgtctttccttaaccagtgatgactattatgctatggcaaagagatttttaaaaagttattccccgtataaaatgggtgaggaaaaaaccacgtggtattaggcacatcggtgttaccagagagtgcgttctggctgggagtttagatggcttaaccccattctctttcactggggctgggtggaagagatcaggctatgtggctatattaaaaatacaacaaaagsccgggcgcgggggctcacgcctgtaatcccagcactttgggaggccgaggctggcggatcatgaggtcaggagatcgagaccatcctggctaacacagtgaaaccccgtctctactaaaaatacaaaaaaaaaaaaaaaattagctgggcgtggtggcgggcagctgtagtcccagctactcgggagkctgaggcaggagaatggcgtgaacccgggaggcggagcttgcagtgagcggagattgcgccactgcactccagcctgggcgacagagcgagactccgtctcaaaaaaaaaaaaaaaaaaaaaaaatacaacaaaaaaccctgcatgaaactgttgacccacttagagagagcgccacgctttgacttctgcaaatggcatcccccttccgcaggaagtagaaagttccctttcaagccctgggctgtcattccccctctaggccrtgggaacagacctgcagacagctgccgaggtggccaccgggagagaagtgcgaagtgcagaggctctccagccgaggagctggctgccttccttcataatacaaaaacagacccagctactttagaacactggaatttttaaaaacacgaactggagcttttcaacctccatggggccttttgaaatgtggctttcagaattagtcgattatgtgtaggcaagggaaatagttagcttacagagacgactagccaggccgggcgcrgtggctcacacctrtaatcccaacactttggaaggccaaggtgggtggatgacctgaggtcaggagtttgagaccarcctggtcaacatggcgaaaccctttctctaataaaaatacaaagttagccaggcgtggtggcacatgcctgtaatcccagctacttgggaggctgaggcaggagaatcgcttgaatcckggaggcagagatggcagtgagccgagatcgcgccattgcactccagcctggatgacagagcgagactccatctgaaaacaaacaaacaaacaaccraaaaaacagatgactagccatgaggaaggaacctccaaggcctggaccttgacgatatttggctaggcatcccccactcctgcccgggctgttctgcctatatccgaaaggactaaggaagcttctcttygcgtaggtgtctgctccctgaatgctcaaagtcgtgagctgtgtgttgctgctgaattcgcatgatgtaaatgtcatgggcacccctaacattccgtgaaggtcaccccagtttttaccttggtcaaaggactgggtcacagtgtgcccatgttataggacagatccaggaatgtcacccaggaatgtcacagtccctgctcttcggggacaatcccagcctgcacccctcacctccctgtaactgcacttctcagggtgagcaggaggcacagcccaaaacttcctataaggagaagagccggaggcagggctgctggggaaggcggagcctgggctgatcgggactctctgtctggttacagctgccctatgagaaggcctgcaagaataagctgttttgtgtcgcagaattacagttggccaccrccgtctctcagtgagttggacatagccgtcagyttcctcgattaaccttctcccgaacgcttgcctgggcaattccttcattaggacaccctgcacatccccttcccctctccccgtggcccacaaatggcttctgcacttattatctcaatatgtcctcagctaccccagaagggaggcaagacagagatctgtcttcccactttctagattaggaagcagactcagtcgccgagggccctgcataggccatttggtggacttgaacctgggtctcttgacatcccggacaatgctatattcagaacccagcgttcttcacagccaggctgacctctacctcagttagaggtaacctctttcccggcccacctcttggccaaattaactaatcaatcaaatatttctggaccatctactttgtgccaagcactctaggtgctggggatacttctgtgaacaacacagacaaaaatccctgccctcctggtgctcttagggggagaagatggtaagtaggtaaattccatgttgatgagatgaacgttgaagacacagggaaggtgggaaggagtgttgggtggcagctgatgctgaagttttcaatggggtggtcacggagggtgacactttggcacacactggaggaggtaggggaacgagctatgtggwtgggtgtctaagggaagagcagctgcaggtaccctgggttggaagcctgcctggtgggtggggggcagggtgagragctagtggctgcagtggagtggggcggggtgtaatgagggaaggggaggaagggggaagaggccatggggcttcttaagccctcagaagggcttttgctgtgagctgggaagtcagaggagtgacacactcatgcagcttagcaggatccttcttgctgcttagctgagaagagaagcggcacttgctccctttgtaaccactcaggtgagaggcggtgtgggctgggccatgacgggagtaacagtttaaagtgacagctcatacgtagcacgtgctgacagaatggaggcggagggaggaaagagggccacagccccagcatgcggcactgcactgtccaacacaccagccacgcttagctgtttacatgtacatgagttaaaattaatcacaatgaaacattttgttcctcagtcacattagccacacttcaaagactcagtggccgcctgtggctggtggtgttgggcagcgcagataccgcctgtctccatcgctgcagacgttctattggaccacactgaattccagaatgacagtgttgccaagcacatgagtgtgggtttagacatgtagtggtcttagaatgccccccaggccgggcgcggtggctcatgcctgtaatcccagcactttgggaggcagaggtaggcggatcatgaggtcaggagtttgagasaagcctggtcaacatggtaaaacyccgtctctactaaaaatacaaaaattagctgggcatggtggtgggcgcctgtaatcacagctactgggcaggctgaggcaggagaatcgctcaaactcgggaggcggagggtgcagtgagccgagatcgctccactgcactccagcctgggtgacagagcaagactccaaaaacggggagggggggagggtaacaaaacaaaacaaacaagcgtccttggcgactagtgttgtgtatgtattgtgattctgttggccagctggctggagttgccgtatatggggaagaacgcagttccccaagtcctggtcagccctttcatagacatttgcaggaccarttgaagactttcaaatgctctggaatccaggctaacaagcaggcacagctgtttccagcagggaattaattacagccaagaaccaacctcccagccagctactgggggtagtagagatacagcacgcatggcttgccctacatcgccccctagtgtacatagcaagcaaacgcttctctttcaaaaacgctagtgagcctggtcgtcggtgtccagctgtctcagtggtttttgacctgaggacatagatccccaaaagaatctaatgaagactacagacccctctccttagaagatcacatgtgcatacataaattttggcattccgggccctctgagacggtccctaggcctcagattaggcaacgctgttaatattctgatgacactgaggtctcacgcctgagctctaagatgtgtgtccagctgacatgtyagcatctctgctttgttatcctatatgcacctcttgtcatgtccccgattgaacgcatcttcttccacccttgggtcttcctcccatgttacctccctcagtcaatggcaccactcagccaccggcaccactcagccaccggcaccactcagccacctgagctagaaactcagaacttgcccttaactcctctgtcccccctcccctgcctctttttcgtttcatttgctttactgtctctgacttctttccttctccactactgttgtcttttttcttcttcttcttcttttgagacagggtctcactctgtcacccaggcaggagtgcagtggcgcgatcttggctcactgcaacctccgcctcccggcttcaagtgcttctcctgcctcagcctcctgtgtagctgggatcacaggcgcacgtgaccacactcagctaatttttgtatttttagtagagacggggttttaccatgttggccaggctggtcttgaactcttggcctcaagtgatccacctgcctcacctcccaaagtgctgggattacaggcgtgagccaccgtgtccagscatccactactgtttccttatttcaggcatgtatcatctctcgggtggagacagcaggctctgtctctgcttcctgtctctccctccagtcaatccagcctcttctcagctgggataaaaaccaaaccaaaaccaaacaatgggaacaaaacacacctcacattacttcctaggccgggcgtggtggctcacgcctgtaatcccagcactttgggaggccatacttcctagatctgcacatctcatctttggacatttcagatggaaaacagttttctcggtattgctaatatgtttttctgtcdatctcagctactgagagtggttctgcactctgggtccctgtgatacctcagcattctggaggaccctttcacacatccccaggaccctcttttccaggacatgtggacccatgtcttaaaccacagccttttaatgggaagggtctgaatgattttgtgggtaggaagctgaggccaagaaacggggtaggacagtatgtcttatgcacactgttctccagtgcacagcagtgccccataaatattgtggcatggatgaatttgtgtcatagagtacctcacctagggtcacagtgaattggtggtagaaagaggatttgggtacaattctctcaattctttggactactagactccaggcatttaattagccttttatttatttatttatttattttgagacagagtttcactcttgttgcccaggctggagtgcaatagtgtgctcatggctcactgcaacctctgcctcccgggctcaagcaattctcctgcctcagcctcctgaatagctgggattacaagtgcctgcaccacacctggctaattttttttttctttttttgagatggagtctcatgctgtcacccaggctggagtatagtggcgtgatctcagccctctgcaaactccccctaccgggttcaagcaattctctgtctcagcctcccgagtagctgggrttacaggcacctgccaccacacccggctactttttgtatttttagtagagacggggtttcaccatcttggccaggctggtcttgaactcctgacctcaggtgatctacccgcctcggcctcccaaagtgttgggatgacaggtaattagcctgtcttggcttctgtttcctcttctataaaatggagagtagctgtactatttcacagggttactatgagggttgagcgtgtgagacgcagtccttggcacatggtaagcactaaataaagggcagctattatcgtcatctcatgcaacaactgagatgggcgtggcagtccagctgtttgcttatgttgagaggaagaatgtctaagctaaacgtattccttaggcaacttatctaagaagttacttaagaaggtgctattctgggctgtgtgcggtggcttacacctgtaatcccagcactgtgggaggccaaggcaggtggatcacttgagcccaggagttcaagacccgcctccacatggcgagaccctgtctctacaaaaaatacaaaaattagctgcacattggccaggctgggtggctcacgcctgtaatcccagcactttgggaggccgaggcaggcggatcacctgaggtcaggagttcgagaccagcctgaccaacgtggagaaaccccgtccctaataaaaatacaaaattagccaggcatggtggcgygtgcctgtaatcccagctactcaggaggctgagacgggagaattgcttgaacctgggaggtggaggttgcagtgagccgagatcgtgccattgcactccagcctgggcaacaagaacgaaactccgtctcaaaaaaataaaaataagaaaaatattagctgggcatggtggtaaacacctgtagtcccagctactcgggaggctgaggtgggaggatcacttgaacccaggaagtggaggctgcggtgagccgtgatcattgcaycacagcaccacgctctagcctcggtgaatgtcctattgtattgcgttgaggtttttacagatgaaataaactgtaacatttttatctgtaccctgtgcaggcaggagttggtggtgggtctcacaaaggagctgaccctgaacattaacctaactaactccggggaagattcctacatgacaagcatggccttgaattaccccagaaacctgcagttgaagaggatgcaaaaggtgactgtgacggtggctgtggaaacaggtccctcacgcccctccctcgctgcatgcctgcttttctgtggtgrccccctcactggcacccctgcctccagcctcctcctggtccaaccaacagatggttaataactagataaatccccgccagtccrgctccatgcctcccgaggcaccatattctgctgcagtrccaccctccctatgtgcggccctttcttcaccagggttctgagagagaagtgagtctaatgccctaagacactgagaaagtaaaaattagcttagactgggaaagtgaaaatctgccctgccattcccaaggctggatacagacacagatactaggaaacagtctgtttcccgaggacaccctgtggctgacaagtatcactgcactgagaaattttattctctaaaatcacagatsagaaaactttgggccgggaacggtggctcacacctgtaatcccagcactttgggaggccgagacgggcggatcacgaggtcaggagatcgagaccatcctggctaacacggtgaaaccccgtctctactaaaaatacaaaaaaaattagctgggcgcgatggcgggtgcctgtagtcccagctactcgggaggctgaggcaggagaatggcgtgaacccgggargcggagcttgcagtgagccgagattgcgccactrcactccagcctgggccacagagcaagagtctgtctcaaaagaaaaaacaagaaagaaaactttgctgtttgaagtagttacgtcrgtaattatgaacccctatccctcttgcctggagagtgtaagtcattttgaccaagagaagagtctgtttccacctgaggtagagagcttcagatacagtgtctgtcaactttctactccatattaatggtttcccaggaagcgggccctgggtctgattcacaggctggcctgctggtgactgactccttgacactcagccctgctttaccatcaaaacaggactttatttacatttcatctgaactccacccttccctggagtcctttaataaccgccttttccattgttcagtgatacacacaatagtgtagtttttggatgggtgcagtggcccawgcctgtaatcccagcactttgggaggccgaggcgggcggatcacctgaggtcaggagttcgagaccagcctggccaacatggcaaaaccccgtctctactaaaaatacaaaaattagccaggtgtggtgatgtacacctgtaatcccagctactcgggaggctgaggcacgagaatcacttgaacccggaggtggagattggagtgagctgagattgcgccactgcactccagcctgggcaacagagcaggactctgtctcaaaaacaaacaaacaaacaaacaaaaccaaagtgtagttttcctcattgcagtgagtcaataaatttgaatttgttggactgtagatttgtccccggtcatcttaggctatttgggctaggacagtatccattatatgaatgaagcaatctcctaggcygggcaccgtggctcacrgctgtamtcccatcactttgggaggctgaagtgggtggatcacttgaggtcaggagttcgagaccagcctggctaacatggtgaaaccctgtttctattaaaaatacaaaaaattagccgggcgtggtgktgggcacctataatcccagctacttgggagactgaggcaggagaattgcttgaacccgggaggtggaggttgcagtgagccgagatcgcgccacttcactgcagcttgggcgaaagagtgaaactccatctcaaaaaaatgaaaacaaaagcaaaaaacaatctcctaggcatctagaggggaactagggatggaccgtccctgggagaattaagaaaactcactgcagtcatcacctgcccctcgggggtccaggtggggagccctggtggctacgtggcagtgctggtgtgtgccggccttccagccaggctgtgggttatatttgcatcagtccatggcccagctcaaatgcctccttccccaggaagaccttacgaattcctccgagttggaattcatatttctccactgctgttctctgcagctccctcacagaagcaccccttcgaccttgtatttaaattcctcggggatctactgctgaccctgcctgtccggcttgtgaggaagacagggaccaagtggactttatttctttagctcctggcagggtgtctgacaggcagaaaaattagtgaatgtttgctgaattgctgtgaggaaaccacgtttttgttttgttttgtttggctctttaagagaatgtcatctgctctkttaacagcctccctctccaaacattcastgtgatgaccctcagccggttgcttctgtcctgatcatgaactgcaggattggtcaccccgtcctcaagaggtcatctgtgagtcggtttggacygattcgctcttctcaccaccctgcagttggcgtcttctgcaycttggtctcayctcaatctctcggttccagctttgcgcttcgcttgactgcagtgtgtccccagcagtgcttacagtggctaagctggctctgaaagtagggggtgatggggaygagagctttccagtacacagccctaggtgaactgcctgctcacctccrtgaagcagagtgaagttgtgggtagtatggagggcgtgtcagacaaaaagtttttttgtttgtttgtttttgagatggagtttcattctgtcacccaggctggagtgcagtggcacagtctcagctcactgcaacctccgcctcccgggttcaagtgattctccttcctcagcctcctgagtagctgggattacaggcgtgcagcactacacccggctaatttttaaaatatttttgrtagagatrgggtttcaccatgttggccaggctggtctcaaactcctgtcctcaagtgatccacctgcctcgacctcccaaagtgctgggatgacaggcatgagccaccatgcccggccaagacgaaaagttattaaccctgatctgtcccttgtcatctctgtgctgtgggaaatctctgaagtggcttcttcacctgtaaaaggggaatgaggccgcctgccttgcttactccatatttgtatttgaggcttaamtgaaataacggggccrggcgcggtggctcatgcctgtaatcccagcactttgggagaccgaggtgggtggatcatttgaggtcaggagttcgagaccagcctggccaacatggtgaaaccccgtctctactaagaatacaaaaattagctgggcgtggtggtgcgtgcctgtaatcccagctacttgggaggctgaggcaggagaattgcttgaacctgggaggcagaggttgcagtgagctgagatcacaccattgcactccatcctgggtgacagagcgagactccctctcaaaaaaaaaaaaaaaaaaraaaaaggaagggaaaggaaacatgctgtgttagaaaaatgtgaggaatgtgaaaatctgaggaatcgtctcctaggtctgttccacgagtagctagcggtctgaattgtgagtggcatagagagaatcaactgaccatttttccccctttaaaataggctcatgtttcagtcgtttggcagctagaggagaatgcctttccaaacaggacagcagacatcactgtgactgtcaccaagtaagtactgcctgggtcacagcagagtcaggctatgaccccggaagacatctccctgccacatgcacgctgtgagaggaacggcccccttacagcccagggagaaaggaaaccccagtgagcccacagaaggcatctgtttccctgcagggactcgactttctcttcttgttaccagagataatgaaaatgttcttttgttcacacacaaagtaaaactgtggtacagcctggtggaatgagccctggagttctggttctygttcactcagctttggaatagcttgggatagctatgttayctgcaagacctctgtgttggggggtaaggtggggaacrctgctgggaagagttctcaaagggaggtgattctgcccaccagaggctgtgcctgttttgattgccatgacttggggaggggggtgttcagtaggacatctggtgggtagaggccaggaatactgccaaacatcacgcagagcagtacaggacagcccccacaaccaagaactaactggcccaaaacgtcaatagtgtggaggctgagaagcccttttaaaatcagtattcttctaagtgtggtcttctagagacaattctgaactccaattgcttatctctgaaagccttttatttatttatttattttttgagacgagtctcgctctgtcgcccaggctggagtgctgtggcgtgatctcggctcactgcaacctctgcctccaggttcaagcarttctctgcctcagcctcccgagtagctgggattacaggcgcccgccaccacgcccagctaatttttgtagttttagtagagatggggtttcaccatcttggccaagctggtcttgaactcctgacctcgtgatccaccagccttggcctcccaaagcactgggattacaggcatgagccaccgcgcccagcctctgagagccttttcttatctgactcccagtgaccctggggagccaggtgcagaagcacctgttctgcagtgagagcacatggacacagggaggggaacagcacacactggggcctgtgggaggggcagggttggggagagcttcaggaagaatagctaatgcgtgttgggcttagtaactaggtgctgggttgacagctgcagcaaagcaccatggcacacgttcacctatgtaacaaacctgcacatctgcacatgtaccctggaacttaaaaaaatagccaggcgcagtggctcaygcctgtaatcccagcactttgggaggccaaggcaggcagatcacttgaggtcaggagttcgagaccagcctggccaacatggtgaaaccccatctctactaaaaatacaaaaattaactgggtatggtggctcacgcctgtaattccagctactcaggaggctgaggcatgagaattgcttgaacccggggggcggaggttgcagtgagctgagacrgcaacactgcactcctgcctgggcaacagagcgaagccctttttaagaagcacttgctatgtacaaagcaggtgtgctatgaactaacactcttattcctagttccaatgaaagayggtctttggccaacgagacccacacccttcaattcaggcatggcttcgttgcagttctgtccaagtgagtactcccaagaggccagcagcggtgtgactccatcgcccagggggcagctttgggctctctctcgtagatggagctggtggtcaggatgaatgtggacactgtccttctgagaggagcctgcttagaacccaggctctgatattgatctctagggtgctaacatttgggtcacaraaaccccactgtggtcatcaaaggaggtgtattgccaactagtcgtgctacaaaagggaattaatatgacgctgtggagggaagaaggcagctgtgggactgggaagtaaggaggggatgagtaaggccatttgagggataattagaaaatgaaccagcccaacgatacagaattcaaatattccacctcaccccaactgcgctacgaccactttatattttgacattcagcttttattccttttttttttttttttaaactgagacgaagtctcactctgtcgcccaggctggagtgcagtggtgccatctcggctcactgcaacctctgccgcccaggttcaagcgattctcctgcctcagcctcccragtagttgagactacaggtggacaccaccaggcccagctaatttttaaaaaatttttaatagagacrgggatttcaccatgttggccaggctggtcttgaactcctggcctcaggtgatccgcctgcctcggcctcccaaagtgctgggatgataggcatgaaccactgcacccggcctcattcctggtaaaggtctggtgccctctgtcctaatgtattcagttgaaagcagtcgagttcattcaaaaagagaaggccrggtgcggtggctcacgcctgtcatcccagcactttgggaggcygaggtgggtggatcacctgaggtcaggagttcaagaccagcctggctaacatggcgaaaccccgtctctactraaaatatgaaaattagccaggtgtggtggcaggcgcctgtaatctcagctacttgggggcttaggcaggagaatcacttaaacccaggaggcagaggttgcagtgagctgagatcgcaccactgcactccagcctgggcaacagagcaagactccasctcaaaaaaaaaaaaaaaaaaaaagggatgagtgtagtggctcatgcctgtcatcccaacactttcscaggctgaggtggaggatcacttgagcctgggaggttgaggctacactgagccatgattgttccactgtgctctagcctgggcaacagagtgagaccctgtctccaaaaaagggagaaagactcctcaagggctgacgcatgtcctstcaattgcagaccatccataatgtacgtgaacacaggccaggggctttctcaccacaaagaattcctcttccatgtaagtacttattwttgtaaagctgtagatggcaaagcaataccagctttgatttcctactctgattttaatttgcaggtacatggggagaacctctttggagcagaataccagttgcaaatttgcgtcccaaccaaattacgaggtctccaggttgyagcagtgaagaagctgacgaggactcaggtatttaaaggcagttmtttatcagtcacacctctttccacagtgactacagagtctcaagtataaaaaccagagttctagaaacagagtgaagrcaagttaaccatgggaaaagattaggagtaaattcccgaagtcctgttcagaaggactctcaatcactcagctcttaaagcaacctgtcagttttcctccctttgaggaaaaataagcaaaaattggccaggtgcggtggctcacacctgtaatcccagcactttgggaggccgaggcgggtggatcacaaggtcagcagatcgagaccatcctggctaacacggtgaaaccccgtctctactaaaaatacaaaaaattctccgggcgtggtggcgggcrcctgtagtcccagctacttgggaggctgaggcaggagaatggtgtgagcccgggaggcggagcttgcagtgagccgagatcctgccactgcactccagcctgggagacagagtgmgactccatctcaaaaaaaaaaaaaagcaaaaattaaaaccttgtcagtagacagagacattttccctttgaaaattgataaattctgcttctctgtgtgagygatgtaacatgtgacatttcttacactgccccctataagttgcttactagcttcccttcttctcccctgaractcttttttggtctctgctttgcctcagcctctttgctttcagttgtctcatctgtagtctggttcccaaagctagccttgatacctgaagcaacaggctctgctcagtatgaagctgaagcctgggcattttttttttgctcagactacataagtgttaaggctcaaaaaacggaaaggaatttacagaaaggactctgctgacaattagaaagagggcttataggtcaggtgccatggctcactcctgtaatcacccagcactttgggatgccgaggtgggtggatcacaaggtgaggagttcgagaccagcctggccaacatggtgaaacccccatctctactaaaaaaatacaaacaattagccgggcatggtggtgtatgcctgcaatcccagctactcgggaggctgaggtaggagaattgcttgaacccgggaggcggaggttgcagtgagctgagatcgcaccactgcactctagcctgggtgacagagcaagactctgtctcaataaaattwaaaaaaaaaaaaagagggtttataaatataaacgtttgttttcacatgtagtttatttatttaaaaaaatagagacaggggtcttgctatgttgaccaggctagatatgaactcttgggctcaagcgatcctcctgcctcagcctcccgagtagctgggaytacaggcgcacgccactgygcccggctagtttacttctttcagaacatttgttatcagcaaatttaaacatttcaacaaatatttcagtttccatttggaaacaaaattcttgtttgaaaagctgactggaaacctgtgagaatgggagttccaccctcctgtggggayggaggttgaaacagcaccagaggcttcaagaccagtctcctctcatttcggggcagtaagatacatttagcttacttaaacagactgtgctggcagagcaagtcagtggcagagctgaagttcagcattgtcctgtggaactcctggatttttctcttaatttgcttcatggcaggagtgttacatttagtcttgaaggtcatttgtttcagcatcttgtctgtcaggtaatgtaaccagagcacattactataagggtgatattcaccccagcggttgttattctccttcttcatgagcctgtagatgtcaaactggtagtcaccgtcaccggtaaacaggtcctcatccatggaaacgtcacagaaaaccacaatcccatcccgttccaagcgcgacagggtgtagtcaatgatgctcacttgcaacccacagctggggatagtgctgctcttcccattgagggtgtagtggagttttttgaggctggttttctttaagagcacgttcccccagtgtaagtctcggtgctcaaagcgcagtgatgcctctgccactgcgagggaggctgtgagctggtgtagaatgctctttgcagtagccaaggaagacaacttggttcgcatttgctctaagtcaatccctccaaactcaaattccagcacaatgaagagctggtcgtctttaaaaaaatcaggccggtcatttgcagagcctttggttgaattatagtgatcccaggctttgaggagcaagggagggtaagatccctggacacagtgcactgagttcagcccgataaagccttctgtgcggttgcacacttcaccggataagaggctcaactctttggagatgatgatctctggcaggatttcctcaaaggttttctgatgggatccattgactaaatctggtccttcaatagcaatgatttttatggctacgggtgtgtgatcagcaattgtttgaaacacttcgccaaacaccccttccccaatcttctcacagmgttgcagtttttctgtgggaaggcaatggctaaaggggacaggacccttctgactgcattccccataaaccttttcagcatcagatgcctttttgtttgaaatacttagagtgtttaaggggcttagcaaatacatagaggaggagtgccaagaggacggagcaccacttgttctgttcatgacaggccggtytgaacattctgatargagggatccagagagagaagtggcagtggtatagatgctgcagacctctgacacatcagtcacaattttcttcttgtggaaactgaaggaagccctggttttggtccaaaagcagrcattctgtaaaggagtcaggtcctgggtggggaacgaatcttttcccagcttttggccctttttaaagcggtgggaatggaggagagaggtttccgttgcctcctgatgtttgctcttccggcttgatctagttctctccagcctgtctrttccccttggcacaatgcggcccttgggaacactggcctcctgatgctctctccggacggcctcttgaagccctctctcttgacaagagtcctggcctgtggccctcctcttgcctgtgcttgacagacctggaccctctggtccatttcccaccaccagtttccttttacagcaggactctctcatattcttcccatctgcccgaaactcagaatcctcaggggttcctgagttcataaggccaaagagaactgacctgaggctggcgcgggtttggtggaccatcctggtgtccttggctcctcctgtcgcttcctcctgggagcaggggagagatgctcggtccagggagacttctgggaggtggaggycgctcgggacggctgaggctgcaaccagacaggcggaggtgccgatcgagatgacactgtcccttggcgttggggacccggggcagggcgaggccagagagctgaacagggaggcactgatgcccagctcgtcgccgtccctgggctggccgcacacgctgaggtccgggctgaggcggccggagtcgcggctggggaagggcggaagtcggagcgggccrcagggtgtgctgcacttctgcgggggccgagctcgcagccccaggcgtcttggggtcacggttaggcttgggcgagctcgcagcttccagcgctttggggtcacggtcaggctgggccggtccttgggcactcggccgccgggacrcctccgccgccgcctcwccgggctgccggggaagtcggggtcgtcgggatcgtcaggatcgtcggactgcgaggggtcgccgatgctggcgtcgctgctgccgctgctgttgaagaaacgcctccggtcctgcggcgggaaccactgcgcggcttcccggcccggccgccgctgtctcctgccgtccgcagccccatatgtgcggaaaagccggctcccaggtcccgggagcgaagccgccatggccggcacccgccaagaggttcaaacgcaaacatcgcgagacttccgtgcgacgcggacgcgcccgcctgccgcggggtcctagctcccggccctgcgcatgcgcacctcgccagggccggggccgggacgggacggaaaactggcggcttggtttgttcagcgcgtcgcggtcatggctctcgtttcaggcctccacggtgtgcacctggagtcaggagcgcgcttgtgcgtacagttcggttcaggtaagcgcggccgtcccgagaggccaggggagggcggagggcctgaagcgggtaacgagaggccaggagactgtttttcctgggttacccctgcckgccagtgccgggggctgccaggccctccctagcttcgtccctgggtctcaattgctcccgctggagcttygcttgggccgaggtgagcgctgaaattgctcacaccctctattctgggaccttacgatgctctgtgtccgaagtgttaaaaagatttcagactttccgcacggaaaggaattgtgttcactagacctcgcttttccagcatgtggaagaakggcattcagtgagctgtgtcatcgcttcagataaagaaaatgtcaccgtggctgcagagatctcctgggatcactctgaggaggtgtttgagactgaaatgctccagatttgattatccagttgctcacgggcatcgcccctagaagagataatagcatctttgcataacrtgtccatgtccawaatagrtcttttggtgcaaaaaaccaaccctctgtcccaacccgttccttagctaccctcaggagggagatatactccagttacagtacaaggaactcgagggattacctgtgactcctctttcctacatccccacgtctattccagcagcaagccctgccatttcagggccaaaatatatcctaaacccattcacttctctccatttccactgccgttgtaattcaagctaccctttcttgccagggctgttgcaataascttcggcctgcctttcttgcctctgcttttcccacattctttacaaataattcccacgtaacagctatccgtcttctaagagcagacattagattgtgccaytcccctgcttattaaaaataacaaacaaacaaaactgatgcttgagcacacttagactaaaatccatacttttttcatggccagagcaaggcagtacttgatctggtctctgcttaattcttcaacttcatctcctagtactcgcctttctctcccactgccccttttataatcgggttattctgtcctattcttctagctcgccagtacagcattattctggccacaagactttgtacttgctgttcctttgcttgacactgctcttcctctaggtcctgacgtaggtggtttcttcttaaatttagctcaggtgttcttttcttttytttttttttttttttagatggagtcttgctctgtcacccksgctggagtgcagtggcacgatctctactcactgcaacctccgcctcccgggttcaagtgattctcctgcctcagcctcccgagtagctgggattacaggcgcyggcgaccacgcccagctaatttttgtatttttagtagagagggggtttcaccatgttggccargctggtctcgaactcctgacctcaggtgatcgcccgcctcagcctcccaaagtgctgggattacaggcgtgagccaccgcacccgacctaggtgttcttttcttttcttttctttctttcaagacggagtttcrctcttgttgtgcaatggcacgatctcggctcactgcaacctccgcctcccgggttcaagcgattctcctgcctcagcctcccaagtagctgggattacaggtatgcgccaccatacccggctaattttgtatttttagtagagatggggtttctccatgttggtgaggctggtcttgaactcctgacctcaggtgatccgccctccttggcctcccaaagtgctgggattacaggcgtgagccaccacgcccggctaattttgtatttttagtagagatggggtttcatcgtgttggtcaggctggtcttgaactcctgacctcagatgatctacccacctcagccwcccgaagtgctgggattacaggcatgagccaccacacccggccacacgtgttattttcttagagaggccttccctgatcacttattctaaagtgggaactagtgatcaagtgatcaagtttaatgttttacagtgatccaggtgacatttgtgaggtctcaactgaagaagtagcaatgggggtggaaaagaaagggacagatacargaaataatttaaaaaaaaagaattgtgagtgtggtggctcacatctgtcatcccaacactttgggaggctgaggcgggaggattgcttgaggccaggagttcaagatcagcmtggrcagcatagtgaaaccccatttcttaaarataaataaatacataaattagccacgcatggtggctcatgcctgtagtcccagctacttgggaggctgaggcaggagtatcgtttgagcccaggaatttgaagcttcagtgagctatgattgagccactccattccggcccgrgtawcagagtgagaccttgtctcaaaaaaaaaaaaaaaaaaaaaaaaaaaggaaaaatctcttacgttaaataaaatgaataagctgggtgtggtggctcatgcctgtaatctcagcactgtgggaggctaaggtgggtggattrcttgagcccaggagtttgagaccagcctgggcaacatggtaaaaccccatctctacaaaaaatacaaaaattagcccagtgtggtggggtgcacctgtggtctcagctactcaggagactgaggtgggaggatcacttgagcctggaaggttgaggctatagtgacccatgatcatgccattgcactccagcatgggtgacagagcgagatcctgtctcaaaaataagtcagtcagtcaagaactgactttggatggcacaagggaaaagaagttgaagaaaaggccaggcgcggcagctcacgcctgtaatcccagcactttgggaggccgaggtgggtagatcatctgaggtcaggagttcgaracaagcctggccaacatggcaaaaccccatctctactaaaaatacaaaaattagcctggcatggtggcacatgcccataattccagctactcgggaggctaaggcaggagaatcgcttgaacctgacggggtggaggttgcagtgagccgagatcgcaccacttcactccagcctgggcgaaaragcgaaactccatctcaaaaaaaaaaaaaaggaagttgaagaataactgcagatgtcttgtttgggtaactttatgtagtgttgtgtacgttagggccattamctaagcccaggaatacctttaaagggaaaggtggtgaaggctgttcaaacacagtgagttcatgtctaaaatatgttttgtttccctcattcctttccccatcttctagttactaaaagatgtaactgaactgcagatccttggtgaaatatctttcaacaaatctctatatgagggactkaatgcagagaaccacagaactaaggtaattcctggctggcttctgagtastgcccaaggaaaattgtgcctaacctttgagcacctccacagacattctgttgccctcttcctgttttcagccttaacacttctgatcttggctctgccatcgctgcctttgtgacctttgagtgagtcagcttcttatgaaataaggcaattaagaggcctaagctgaggagttctgagttgaaataactaggctggaatctgcagtatatactttgatttgaaaatggattgattaaaaaaaaaaatttcgcagctgggcgcaggtggctcacgcctgtaatcctagcactttgggaggccgagacaggtggatcacctgaggtcagragttcaacacaagcctggccaacatggagaaaccctgtctaccaaaaatacaaaaattagccggacatgatggtgggtgcctgtaatcccacctacytgggaggctgaggcacgagaatcgcttgaatctgggaggcagaggttgcagtgagccgagatcacaccactccactccagcctcagtgatagagygagactcagtctcaaaaaataaataaataaawaaaaaatgarttacctaagtgagaaattgttttttgtatccagtaactgtcttagtgtgctgtatcagtgtttagttatagtattaaacagtactcaggaatgcataaatcttttataagatttagactagatactggaactcttggaattctttttgcaaaagtatgactagaagtcagactgatgcctgtgatttgtggactgaatgctttgtgtgttaccstgtgttttcattcttgttgacccttgcctggacatggcttcagaggtgatctatctgtgagctctgagctctttagttaggcatgattctctactagagggaatgtcaggagagtgatgctggattgctaaatataaggtcctctgttttcctccctggaggrggagaaaggagcaattctctagacatgccaatataacatttccttttatttttaagtagtgtatttctttttcttttcttttctttcytttttttttttttttttgaggaagaatctcactstgtcvcccaggctggagtccgttggtgccatctcggctcactgcaacctccacctccccagttcaagtgattcttcttcctcagcctcccgagtagctgggattacaggtgcccaccaccatgcctggctaatttatttattttttttaaatagagacaggatttcaccatgttggccaggctggtctcgaacttctgacctcaggtgatctgcccgccttgacctcccaaagtgctgggattacaggcatgagccaccatgyccggctaagtagtgtatttctaatacagaaaatagarggaaatggaaaatacagaaaacggaagaaayagaagtgccccattattgcactgcccagattttaacaaataaaartaatagcaagaaaatccaagccatacagagaatggtaccaaatgaaaaataatkgttccttcatttctcccttcccatgcccccagcagggaggagttactattaagtttcttatgtgcacattttaaatttgtatgtttccccctcttacttactgatacttttatytctatagcatggattccccaaaattcctttctttaaatccaatatcctaagyaaagtgttaagtagttcctgacaataagcccctgacttacagtgactctatgagtataaacaaactgtatccaaatgcatttcagccacaagaaagggaaaatccagctcatgcagcataagggcatatgctgtttatccagtgagggaggccggcctggggcgatggcctggcttctttggtccttgtactctgccgtgtgggggacgcattccttcatggccagcacaaagttgccacatctccaaatgctrtaytttcacatggcaggatacaaaacaggaagcaagaagtcagtagcaaaaggatgttggatttttcttcatgtgccttcccttttcagggatgaaacagtttccaaaagctcccaggagacatcctcttacatcttattagtgagatctgaatctcatgtcagtcactggcaaaggagaatagctgtgtcatgatcacctgagaccaacgatgattcctgaataaaatccraaaggagagaggggcccctgggcaggccagcatccgtgtttgctgcaaacagtagtacccggtgccttgcttctcccttaacctctacytgggcatctttggggcacttttgggaatctgtgggtttagaagaagataaagggaggtggctttgagaaatagggacatttcttctactcamatctggcctgtttccysagtcaccttgggacttcctttcacttcccaaacccagggtcttgagtccccctccttctcctgtagaatattccagccctctttctgttcttcctccctctttgttgctatggtacctccctattctcaaagcctaggacttcactcctatttagttcagctacctatgagctaaataggactggaaggtcaactttaggtcaaccagcatttataacttaattggaagaggccttaaaggtaagtttgtccagcccttcaccccgtacagaaacctctccaaagcacccctgaccttggtgcttaaacatacacgtgaagggttgctctgggcaggcagagaagtcttgttggctctctggccccacctaagtcctgggaacttcctctggccacaacttggaagggccatacctgggtctcaggaagsacatctcctgaactttctagctgagccctgccagaagagagattagactcccgaaattgggagagcctttggaaaacaaaacctgmggatgacttctaatagctgagctctgcaagtagtacacatggatataatttgcatttattatgtcccttaggtaatacacactttttagtctggtgaggggaagaccagtacttttgtcatattttatgtggggaaagtgtattaccaaagcctttagggatctgtgcaagatcaaaaagagccgtcagaacggagttggaaaggacttggagatcatttaaaggaagtcatcattttaaagagcataggcacggggctcagggacatagagcagtgtagcggcgtgacagcctcacagtcctgtgttgagaccggattccgtgggaccctctttcaagctgtcagarcatctttaacagaaggtcataatctcctgacagacctagcccttctagataaggggccagaatagtttcttacgaagtatttgggtgattggatagttttagatgatctaaaatgctgcatcagggaatatctagctttttgctttactgtcatcagctttgatcaatacacgggttgttgccaagtcctcgtattttgctccttaaaataacatgtaggattttttcctygtttgcttcacctgatttattgggcgatctctttgtcttgtctagatcactgtcgtcttcctgaaagatgagaagtaccattctttgcctatcatcattaaaggcagcgttggtggacttctggtgttgatcgtgattctggtcatcctgttcaaggtcagttctactcatggcatcacagtgagggaagactgggctctagttttgggcacagaactccttaggacagccaacctctgacttagagcagctgccctggcctcgtggccacttttttctcctccttcaactgcacacccccatttagacaaatgagtaaaacagtatctgtctgaaaagagaaaactctgagtwataaagagtgattttatatatatttctttggtacctccctrttctcaaggcccagaacttaatactgttatgttcggttacctgtgagttcaatagggcctggaaggtcaaccctaggccagcatttataacttacttggaagaggccttaacrgtaaggcsttaaaacagatgtgactgttgttcccctgttgaaatcttttccttgccttcccgtcttaatgtgcaaactcttctactgctatttaagatcctctcctctgtccgctacccgtctctgcccttaagtgttgcttttttttctttttttttttgagacggagttccgctctttcgcccaggcttgagtgcggtggtgcgatctcggctcactgcaacctycccktcccccbrccctgaccccgggttcaagagattctcctgcctcagcctcctgagtagctgggattacaggaatgtgccaccatgcctggctaattgttttgtatttttagtagagacggggtttcaccatattggccaggctggtctcaaactcctgaccttgtgatcctcccgcctcrgcctcccaaagttctgggattacagkcatgaaccaccactcccagcctcttttttwaaaataaacaccagggtctttgtcccccaagctggagytcagtggcacagttaagggctcactgcagcctcstactcctaggctcaggtgatcctcccatcttagtctcctgagtractgggactgttactcaggtgcatgccaccacacccagctaattttttaattttaattttgtggagatgaggtctccctatattgcccaggctggtctcaaactccggggctcgagcsatcttctcatcttggcctcccgaagtggtggggttacaggcataagcacctgaccttgcttttttctcccaacaagtcaaactattccctaaataggttcgtgcctctgcmtacgcgtaggctgcttttcttgtcaggaatgccctccatgactgctcacttcactcactgtcttccctgaaagcrgtctagagactcctgagtcctctgtgctggcttctgtgtgtttgctgtgagctcccttctagaaacccttccaaatggcagtcatcacactgtrttgtaattatctctttttcctactagatgatgagcttgatgtaggaagctgtacttgatctccttctgtcttcagcatcataggctatactgagtatttttgcataaataagatkagatccagtacagccgaaattatcatgctttgcaaaataagttaawaaggttcarctgctcgggagagcagggttcagaggaaggtggagtcagttctgattgagggatgagcaccagaggtcttgaaggattggactctccaggagagattcagagtaagttaggagaagggagtagtaagtatgagaagcagaggaatataggggctatttaggcaacagccagaatgccrgttttctgaaacagatggctatctttggcctgtaactggacttttccttcctttgtttcagtgtggcttttttaaaagaaaatatcaacaactgaacttggagagcatcaggaaggcccagctgaaatcagagaatctgctcgaagaagagaattaggacctgctatccactgggagaggctatcagccagtcctgggacttggagacccagcatcctttgcattactttttccttcwggatgatctagagcagcatggagctgttggtagaatattagtttttaaccatacattgtcccaaaagtgtctgtgcattgtgcaaaaagtaaacttaggaaacatttggtattaaataaatttacactttwctttgcartagtgcctttaatctggaaatacagtattacttaggatttgcagtacattttgcctgatrgggcaagttttcattcttatttttaaaaaatgatagattgtggcygggcatgatggctcacrcctgtaatcccagcactttgrgaggctgaggcaggcagatcacgaggtcaagagatcgagacyatcctrgccaacatggtgaaaccccatctctactaaaaatacaaaaattagctgggcatggtggcgggcgcctgtagtcccagctactcaggaggctgaggcaggagaatcatttgaacctgggaggcggaggttgcagtgagccgagatcgtgccactgcactccagcctagcaacagagtgagactccatctcaaaaagaaaaaaacaaaataggcggggtgcggtggctcacgcctgtaatcccagcactctgagaggctgaggcaggtggatcacraggtcaggagatggagaccatcctggctaacacggtgaaaccccgtctctactaaaaatamaaaaaattagccgggtgcggtggcaggtgcctgtagtcccagctactcgggaggctgaggcaggagaatggcgtgaaccygggaggcagagcttgcagtgagccaagatcacgccattgcactccagcctgggcaaaagagcaagactgtctcaaaaaaaaaattatcgattgtatcctttcagrtaattcttaagtatcaatttttcagatttccagaagaaactctttggggttttaatttaaacatacaggttaagtttgggagcattgatatctttatagatttcctttctactccgcttgctgygatttattttttawtttttattttactttatttttttttttttgagacagagttttgctcttactkcccagactggtgtgcaatggtgtgatcttggctcaccgcaacctccgcctcccrggttcaagcgattctcctgcctcagcctcctgagtaactgggattacaggcatgcrccaccacgcccagmtaattttgtatttttagtagagatggggtttctccatgttggtcaggctggtctcaaactcytgacttcaggtgatccacctgcctcagcctcccaaagtgctgggattacaggcrtgagccaccrcgcctggcaatgctgagatttttaaaaacactctgyagcaaggttttataattttcttcaaaggggtcttaatttataaagacttacttccagctgcatttttatttgtttatttattttgggggggtctcactgtgtyrcccaggctggagggcagtgatgcrgtcataggttgctgcagccttgaacttttgggttcaagccgtcctctgcctcagcctcctgygtagctgggactacaggtgcaagccactatgcccggctcattttttaatttttcttttgtagagatgggatctagctatgttgaccaagctgatttcaaactcctggcttcaagtgatcctcctgccttagcctctgaaagtgttggggcgtgagccactgcgcctgacctgttattatgcttttgttgctactgtgtgaaaataccgttttttccccctgactgtttagagtttgcacttagaacagttggtggttttgaatgtttatcttmtctggccattttactgaactgtggttttgtttttttggagacggagtctcactctgtcgcccacgctggagtgcagtggtgtgatctctgctcactgcaacctccgcctcccgggttcmagcaattctcctgcctcaccctcccgagtagctgggactacagggacccaccaccatgcccrgctaatttttgcacttttagtagagayggggtttcaccatgttaggctggtctcgaactcctgacctcaggtgatccacccrcctcaggctcmcaaagtgctgggattacaggcrtgagccaaatccgggcccggccaaactgtttttaaatcactctttagttgattctttgggatttttctaaggagacaattytatttgcaaataatggcaatttggagtctttctgatatttctacttttggctacccttacttctttgactaggacgtggagagctctgagaagtaaaccgtgtacctggttgtaatgggagggcttttctggccctcctctgcctgcctcacacctgcctgttaycccagccccggctgctctgcctttgggtagtttctagggcttggttggagcagcccattcacctctcatggagccccgtaccttgccagtgttacatcactaggctgttgggcacsatctgcttccctgttgatctgattccatcatcttcatttcgttcagaaatccgtctgtgctatcggtcacttgatgatattgttctctgttttccaatgctgccacaggcttttcccctyccttgtaactcttgggttgtttcagtggaatttgcctttgagggaaaacacacaggtaagtttgcttacttattttcctgttgtgctcaggagttgtgtccaagttttcatattatataaaagcccctgctttttatactttttaaaattgcaaataagaccccacttccatcgtcactgggaagcctgttattgacttactgagtcgtgctgatccaattggcgttagagcaaggcagctgtaatcgggggactacatcaggaactacttaatgaggaggaagacacttttaagtgcgacatggttagattttacaaattcatatgctayggcttgggccaaggtctgtggcatacacctgtagtcccagctactcaggaggctgaggcatgagaatcgcttgaacccagaaggcagagtttgcagtgagacgagatcgtgccactgcactccagcctgggcaacagagcgagaccctgtctcaaaaaaataaataaataaataaataatgaggccgggcgcagtggctcacgcctgtaatcccagcacttcgggaggcgccgacgtgggcasatcacctgaggtcgggagcttgagagcagcctgaccaacatggagaaaccccatcttcattaaaaatacaaaattagctgggcgtggtggtgggtgcctgtaatcccagctactctggaggctgaggcaggagaatcgcttgaacccgggaggcagagcttgcagtgagccaagatcgygccactgcactccagcctgggtgacagagcgagactccgtctcaaaaaaaaaaaaaaaaaaaaaaaaaaaagaatgagtgctgggctcagccctgtggagtaaccttttctcgtaattgaatgaggtctaaataacgtggccaatttaggttttcacacctgcttggtttcattggtttcatccctccaaagttcagatggtatcatgagagaaacaggttattcgaatctgcactcactatcctgtaccagggcaaaggagaacagaaagcacatggggtactttcccagccgrtctttcttctacaagctgccttttaggtgctaggcctttctcatttccttttcaccctctgcctgggacaggaaatggtagagcttgcatagatccaagaacagtgagtcatgccatagggccactctgctacccagaaaaggactgagctgggacccgctgaactttggatgcagttattggagggaacagcagttttttttgttttgttttgtttttttgagacagggtctcgctctcgttcatgctggagtgcagtggtgcgatctcggctcattgcaacctccgccttctgggttcaatcgattctcatgcctcagcttcctaattagctgggactgcaggtgcatgccgccacgcccaactaacttttgtatttttagtagagatggggtttcaccatgtcggccaggctggtcttgaactcccgacttcaagtgatccgctcacctcggcttcccaaagtgctgggattccaggcgtgagttgccacrcccggcctcctgctgtcttaaataatctgcactactgcattattctgtgcacatctctaatacatttacaaggaggggtttttggttaagattttctgggtcttctagtcataattatattataatggcaccagaattttaccattacttgaactaggaacagattcagtatatggaatcaagggaaactttcattttattaattwattwattwatttatttatttgagatagagtcttgctctttctcccaggctggagtgcagtagcatgatctcggctcaytgcaacctccgcctcccaggttcaatcgattctcatgcctcagcttcctraktagctgggactgcaggtgcatgccaccacaccaaactaatttttgtatttttagtagagactgggtttcaccatgttgaccaggctggtcttgaactcccgacttcaagtgatccgctcacctcggcttcccaaagtgctgggattccaggcgtgagccgccacgcccggcctcctgcagtcttaaataatctgcactactgcattattctgtgcacatctctaatacatttacaaggaggggtatttggttaagattttctgggtcttctagtcataattatattataatggcaccagaattttaccattacttgaactaggaacagattcagtatatggaatcaagggaaactttcattttattaatttttgtttgttttgttttgtttttctttgtttgttttttgagacagagtctcgctctttcgcccaggctggggtgcagtagcatgatctcggcttactgcaaactccgcctcctgggttcaagcgattctcctgcctcagccccccgagtagctggaactacaggcacccgccaccatgcccagctaatttttgcatttttagtagagacggggtttcaccatgttaggctggtctcgaactcctgacctcgtgatccacccacctcagcctcccaaagtgctgggattacaggcttgagcctccactgcacctggctattaaaattttttaacttttacttttggagactggggtctcaccttgttacccaggctggacttgaactcctgagctcaagtgatctgcagtagctgggactaagggcatgtgcyactgtgcctggcttagggaaacttaatcacttcaggaagcatcgtcrtcctaatagcagagttcaggaggatgcacctaaattgacaattcccaacttcggttgacttgctttgtttttttattagtgggagcaaattttgtaaagtacatgagtaataggtacatttctcatagtgaaatcagtaaaaagtgaaaatttgcctttgtcgcaaccttgcttcattcaatgctcttcctcagaggctgagatgacctggtttaacgtgtatctttccaaacccatattctgagccgggcactttgggaggccgaggtgggtggatcacctgaggtcaggagttcgagaccagcttgcccaacatggtgamaccctgtctctactaaaaatgcaaaaattagcctggcgttgtggcaggmgcctgtaatcccacctccttgggaggctgaggcaggagaatcgcttgaacacgggagggggatgttgcagtgagccaagattgtgccattgcactacagcctgggtgacagagcaagactctgtctcaaaaaaaagaaaagaaagaaaaccaaaccatattctgtgcatctctaagtatttatatatatttatatctaagtacaaaggttttttttttgaggggggttgcataaataagatggtatcttctgccatttgtgaccgttttcaaggaatgcatgtcagaagctaaatgctgctgctaaatgctgggggtcaggtgggggaatagagggaagggtatcatcttgggctaacataatctttggggaattmatcacaatttgtaaagaagcccttttagctttttccaagagtggaattaaaaactttttgtaattgctctgcagtgccgaagtgctttccagaaagaccg

SEQ ID NO: 10016 - DNA, 25555 bp, Homo sapiens
tgaggctacaaagcaaatgccatctaaggggcagatggaccaaggtcagggcatagaagcaatgtcaagctttaggtccaagagtgatgaccagagtcgtgtaagagatgggacagcaggccaatcaggatttgaggagatagggataagttgggaagttgtgtagggacagaaggaggaagaaagtttcaaatcttgggctccaattagataaggctgggcccaattcttttgggtgtgaaaaatgtgggagagggagtggcagctgtttaaaggcacggagctacacaggtttaacagcaatacacttgacccttgaacaacatgggtttgaactgcatgggtccacttctatgtagattttcttctgcctccacccccgccccccaccccccagacagcaagatcaacctctcttcctcagcctactcaccataaagatgaggaggatgaagacctttatgatgatccacttctgcttaatgaatagtaaatataatttctcttccttgattttcttatttttttcttttctctagcttactttaagaacacaatattcataaaaaatatgtgctaatcaactttgttattgtcttctctgtgatgtacaaactttatgttattgccggtcaacagcaggctattagtggttaagtttttggggagtcaaaagttacagtcagatttcttttcttgtttttttttttttctaaatgttttattggattttttttttttyttgagacaaggtctcactctgttacccaggcaggagtgcagtggcgcgatctcagctcactgcaacctttgcctcccaggctcaagcgattctcctgcctcagtctcctgagtaactgggactgcaggtgcttgccaccatgcctggctaattttttgtttgttttgagatggagtctygctctgttccccagactggagtgcaragtgcagtggcaggatctcagctcactgcagtctccacctcctgggttcaagtgttttttttgttttgtttttkgtttgtttgtttgtttgtttgtttttgacactgagtcccactctgtcgcccaggctggagtgcagtggcgagatctcagctcactgcagcykccgcctcccgggttcaagcgattcttctgcctcagcctcccaagtagctgggactacaggtgcgtgccaccacgcctagctaatttttgtatttttagtaaagacagagtttcaccatattggccaggctggtctccaattcctgacctcatgatccacctgcctcagcctcccaaagtcctgggattataggcgtgagccactgggccctgccaatttttgtatttttagtagagatggggtttcaccatgttggccaggctgatctcgatttccygacctcagatgatccgcccacctcggcctcccaaagtgttgggattacaggcgtgagccatggtgctgggcatataygcagatttctgactgtgaagggaccagcacccctgacactgcatcattcaggggtcaactgtacattcatatcccccttactacctactagctctatgtgtgaccttggtcaagtcactgtctttgcttacagcaggaataaagcatttgacttagtagctagcaacatggaggatctgctcaatgatgccgactccctttgccctttatggacgtaatcaactcatgattacctgcgacacatgcccactttatccctttgtttaacagaacacttttgttctgaaccaagctcctcctttcctttccagtagttaatgtgttctttgaggatgcaatctaatcgtaattttgcccgaagtggggaaaaaaattaagctcacattgaaaccttaatatagctctataatcattttctcttttagcctagatcacttcattttggcaatttaagtactacttttggtcctattaacaataccactcttgcaaaggacaggttacaaccaattctcagattcctgcctggataagatttgtgaccccaaattttaaaaaagcagaaaaaaaccccacaaaccacaggcaggaagaaagaaaaacaagagaatgtagctaaggtaattccattaatgatcagtttatgtcaaagcatgtggaaataatgccttataggaggatatttagcaacaacratttttttaaactcattttctcctgtaggtacagaattgcaagttttttctgacttcaaatgtgtatagctgactgcgtgtgtgtgtgtgtgtgtgtgtgtgtgtgtgtgtgtgtgtgtgtgtgtcagggtctccytctcttgcccagactggagtaaggtgacataatcatagctcattgcagccatgaactcttgggctcaagtgatcctcctgccttcagcctcctggcgtagctaggactgcaggcacatgctaccacacccagctactgttttttggtagagacagagtcttgctatgttgcctaagctggtctcaaactcctggcctcaagcaatcttcccacctcagcctctcaaagagctgggattacaagcatgaaccactgcacctggccccatacctgactacatttctcagcttcctttgtggctaggctgtgctaggtagccttgtacctaaattttgaccagtgagcagcragtggaatttgttggatgaatctaccacaaaggatccttacaatggagatagtggggccaggcatggtggctcatgcctgtaatcccagcactttgggaggctgaggcaggcagatcacttcagtctaggagttcgagaccagcctggccaacatggtgaaaccccatctccactaaaaatacaaaaattagccaggcatggtggcacgcacctgtaatcccagctactcaggaggctaaggcaggagaatcacttgaactcaggaggtggaggttgcagtgagccgagatcgcaccactgcactccagcccagcaacaaagcaagactcttgattcggaaagaaaaaataaaaaaaggttgggggagacrgtgggagcccagacttttgtccttccccttgcctagaagggagatgaggttgctggtgctgtggaagctattatggaccatgaggcagctttgaagacagaaagcctgcatccttgatgactcaatggaatttcatcccaacccaggactgactgccccagatctttgttacatgagggaatacactcttctgtgtttaagaaactgtggttggatctgttactggaatatgaatgcagttaataactggctcaaaatgacttcatctcaacccacattggttgcttcttccaaacaatatataggtctgtactgtggtgggtctcaggatggctgtgatgtagccttaggaagtttatctatgggaaatccatattcatggtgtcctgatgttgcagaggacatcctgagctggctggagtaacttgggacacaggtcaatcgactgtaatctaacttctgaggccattcagtaccctctacagtggccacctaaaaaaaaggcagccaggtgtggtggctcaagcctatatagatcccagaactttggaaggctgaggtgggaggatcacttgagccaaggagtttgaggccagcctgggcaacatgaagaaactctgtttctacaaaaaataaaaaaaattagccaggcatggtggtatgcacctgtagttccagcttcttgggaggctgagrtggaagaatgacatgagcccagcaagtcgctgcaatcagccgtgatcacgccgctgcactccagcctgggcgacaaaaagaaaaagaaaacggagcctgttcactgggtgtggtagacaaggtaaacttttctttacctcccatatcccacaaccttggatgtgctcacagtcatggtagtgttttgtaatgatgtagctgatgacaggtgtgatgttggagattcttctacctgactgctgctatcagtcctaccagcccccaacgtttggtgcttgttctaaagggcatgtcctaggagtcgctttaaactctcaaagtatcactctctatacaaacaagaagtgcaagtaagtagcctgagctcagcctcccaataggaatatttcattatcactagatcaagtctttccattacaatgactgatctgtctctgaatcctgtggattcatccttcaaaatgcccttttcttccagttctcatagctagtgccctaaaagtgacctgcagtacctcctgctgagacgaatgtaccagcttcctaactagcctgcactcccttcatccccccaagtcagtgccagaccaccttgcctgaaaaaccactttcagtgtgtctcacctcagcagaaatgtttctcagcttccaattaacaatcacatcaaacccctgctcttgtctgcgttttaagggtatctataggccgggcgccgtggctcctacctgtaatcccagcactttggaaggccgaggcgggcagatcacttgaggtcaggcgttcgagaccatcctgaccaacatagtgaaaccccgtctctaccaaaaatacaaaaaaaaaaaaaaatagtggggcgtggaggtgcacgcctgtaattccagctactcgggaggctgaggcaggagaatcgcttgaacccgggaggcagaggttscagtgagccgacatcgcgacacagtactcsagcctgagcgacagagcgaggctgtgtctcaaaaataaataaataataaattaaaaaaataagagtatctataacctggtcccagcctgaatttcctttttcaccccaacacgtagccctagttacattcttctgacgtctgtaaacaagcccagcccttcctgttgtgaagccaagttcaggtggttcctcttcgcctgactgttttcccattccacttaycggaagcctagtcatccttcggagggctgtacrggggttgcaagaagcaacggaaacggttcagcacctgctaccttccatcatattcttttcaataaaggggcaactcccgccaatggcagtgtagatttcctaacctctacacatggaagattcacaccattcaggattgttgtttaactgttgagagagcacttgatacttaacagcttactaggctacaagacagcgcaggaaagaatcctctgttgtccttttatgttatcctgaacagttggttcacagagttactgtaaacacacaaaacatgactgccagggcttagtagtgaggaaggtgggaactagtcctgactcagttaactgtgcccaggagaagctgcttaacctcaaaggatttcactattactagaatcaataataccaaccctaggggtaaaaataaagataaatgtgtgcaaatcctgcctgcagtctcgggcacgtcgtgggtgtccaagaactgttcttaggcagccggtggggacaaagtctgtgtgcctcctgtcctggaataggtcccaaggtcggcttacttgcaaagcaagggtacggcgcaagagtactgaatacgggttggaagggcgctggctctaccctcagctcataggccggctgggcgssgctgaccagcagctaggccccgtcttccctaggaacggccacgggggccctgggagggtatgaatgtctttttgcagtgaggcctctggaccccgcggccccccggcagcgcaaccaaaactcaggggcaggcgccgcagccgcctagtgcagccagatccccgccggcaccctcaggggcggagccggaggcagggccttcgggccgtaccaactccamgggggcaggggccgcctcccttcggccgcgcgccactcaagtacggcagacaggcagcgaggttgccgaggccgaggctagcctgcagcctcctttctcccgtgccctgggcgcggggtgtacggcaagcgcgggcgggcgggacaggcacgcagggcacccccggggttgggcgcggcgggcgcggggcggggcycgcggggggrgggggcggggcggcggtgcccttgcggcgcagctggggtcgcggccctgctcccsgcgctttcttaaggcccgcgggcggcgcaggagcggcactcgtggctgtggtggcttcggcagcggcttcagcagatcggcggcatcagcggtagcaccagcactagcagcatgttgagccgggcagtgtgcgggtgagaagraaggggacccggtcacgsscccaagggcgaaggggctcgcggcgggcagggcctccgcggcaatggcgacagtggccgcaccgggcctggcgggaccggggcacctgcaggcggttctcccgggagtgcccggcgcggcggctggagcggggatccgcagggaggggacgcggggactcgggggacgccgcgcgctgccgttcctcggcagcccagcctgcgtagacggtcccgcggcgctgactgaccgggctgtgctttctcgtcttcagcaccagcaggcagctggctccggytttggggtatctgggctccaggcagaagcacagcctccccgacctgccctacgactacggcgccctggaacctcacatcaacgckcagatcatgcagctgcaccacagcaagcaccacgcggcctacgtgaacaacctgaacgtcaccgaggagaagtaccaggaggcgttggccaagrgtaggttccaggctgagcggcgggaggcagtccccggcagaggcgaccccagggagccaggccccatacggacgggcctctccgtggaggagaactcgcttcgtatttgtaccggttccgagttttccaggcacgatagtctctcttttaaacacatggtctacctcattgtagaaggagtgcctcgatgggtttgaacacacttctgtcatctcagggaacttggggtcctgcgaaggagcttgccttactgttgtgagccacattccgttacacatattgccagcactggtgaattgtagggcctgaaaagaaagctctactgtgtcactcgttttttttgcaaattgaaattgttcttgttgtataatrygctttggggaaatgtttggtctctcaggtaggtgtgccagccgtttgcaggagggctgagagcgcctgtccactggtggccagacatcatcgggtccgcaggtgtctctgagtgtcagggtcacctcctgatagaagtgggagtggtgtcttactgccaggtcacactgaaggtgggagacaggaggacactactccgtgctaggaaccatggtccttgtcatcttcctgagagcaaacggggtcgggactccagcctaggacttggagactccctgcatccccagctaccctgcaggtgaaacttcactgagcccacttgacttcaggtgggagaggaggaggcacaccrttgtggtgtgcgttaccaaaaaagcagtaacctaactgtggaacagttcaggatctttagacttgatacttttcttgatttcccttaggggtcaaagttcacaaggaaaatagccctttagtgggaaactgaaacaggcttgtttttatttactatttactcatatttgtaatgcaattaaaatatatgttgttaactttttttttttttctcaagagctcggttgataaaaccaggggtatgtggactttttgagtctkkgccttttgggggtgtgtatgggaatgttatgttttaacrttttttacaaaatagtattgtctttttaatytattcgttagtggtttgcacaaggaagataatcgatagtcatgttttttagackctctgtattgcttggtaagctacgtagtaaaaaatgtttacttttccttaaatgttttgaatttcggggttatgaaatttgttgagtaatttttagacagtcacatcttgttgactggaggcatctagtggaaaaatgcagtatttcagcctgattgtgtttgaagtaaatgattaaaagaggaggaagttaccacattctggaagatttacttgagacagacgaaccttgaattacgggaaaaggccccgtgatttaggaaataacaaatttgggaaacatgtaatggggagagactggggaataccccagttgtgaaagtacttcctgtaaggcaacatctgacaccaggaacctttctcttcagtattttaaaaacaacttaatttcagtcctttacttgtggaatcagagccttacttatgtaatacaacccactggaaaaaagctttttattgtattgtactatattgtttataagtgattgagtacctgcagagctttcttttacttaaacatattttaaaaattattaaaaagattttcatgtttgaaaacttggggaaaaaarataaaacaatgtcataatctcatcacatttaactgactaatatgaatatttttcaacaaaaagcatttgacttttattattatttgaggcaaaaaytaaactgaaaccaaataaaatgttgaatttcagaaaagtgttcttaaaagcagatattaagccctcaatttttattaattttaaaatgagtaagcaaactgtaagatgttaagattattaaattatctctcattaagcatgtatctttcccattttaaaaattcagttactattgatttattaaaaaacaatagaaaagttacatctatttttagagtgactctcaagaaaatttaataagggaaacacagatctataaaaaaactgtttgtaaacctaacaaaggaaaaaaaaagttggtgtctttaaaaaaccctttgagattagctgtgtattcagatatcagttggttctctcctttctgaatcgctaaacaactggagcttgtttcagaaagcagcattgtctacgtatgttccttttaaaaattttttttttaattctrtctaaaaaaaacagacggggtcacactatgttgcccaggctgctcttgaattcctgggctcccctatccacgcacctcggccttccagagtgctgggattacaggtgtgagccaccgtgcctagtcagacatacttttttttttttttttttttttgacggaatctcagtctgtcccgcaggttggagtgcagtgatgtgatctcggctcactacaacctccgtctcctgggttcaagyaattctcctgcctcagcctcctgagtagctgggattacaggcgtacgccaccacgcctggctactttttgtgggttttttagtagagacagggtttttccatgtcgtccaggctggtctggaactcctgacctcaagtgatccgcccatctcrgcctccyaaagtgctgggattacaggcgtgagccacctcacctggccttgtatgtatgtttttttctttytctttctttttttttttctgtgacggagtattgccctgtcgcccaggctggastgcagtggcgtgttcttggttcactgcaacctctgcctcctgggttcaagccattctcctgcctcatgctcctgagtagctgggattataggcacgcgccaccatacctggctaatttctgtatttttagtgaagacagggtttcaccatgttggccaggccggtcttgaaatcctgacctgaagagagctgcccgcctcggcttcccaaagtgctgagattacaggcgtgagccaccgcacccggcccagacatatgttcttaacgtacactttcagaacagcagttgagaactttttccaaaatgtaagctccttgagagcaaagctctcagtgggtctctgtgtcctttactttgcttctcttggtatcttgtggataatatgcacaaaatatttattaaacaagaggatttccatttttttctaatattaatagttcatttagtctgtagcttcttgaaggcatagaaaagactattttattttgcctacttatttggcraggtacccatgcagtatgccaggagttacagggcctattgagaaggagtaaagggtctgggaggggtggcagggagttgctaattcatgtatggtggctagagaaggcttcactgatggggttgatgtttcagtggagacttgaaggaggaacaggaacgcagcatgagactgtcttggggaagagtgttcagcagaggcagcagtgctcagctagccttgaggggaacatccaagttggtcatgtgagtgcaaaaaggccagtgaggctgcagctgcgtgagcacgtgctcartgacggggtcaagtgcagcrcctcttggtagtaagagtagctgagtgtaaacacctagggttcgctccagtgagaaggggagcctttggagggggcaaggcccacccccaccccccaaaactgaggggatastggcaccagtgcagtgagaaatactggtcctctgtcccaatgaggtggcagtagagttagggagaagggattaggttctgcttgtgttttatttttttcttttatttttctctgtgtgcttttatatagattggatgtattttaaaggtagagctggctttgctaatggatatgctggtggattggatgtggggtgaagggagaggagtcaaaaatgacatcaggttcccaaggatgtcctgagggacagagctggcatttactgagacgtggaggacaataggaggagtaagtttggggtagaacatcaggagttcaattttgagtatgttgagtttcttgttaatgtgacttggagatatttcccaatgaatcgtcgtctgtcttgaaagtgagagttgaaggttttctgtacagtctgtatgttgagccatacattttagcattctattattttgattgtcctctttggtgtttcatttcctaaaatctcttctatctaasagatccctgagcctagcagccaggagtgaattttctagcttttccacctctgctaggtccttcatcagttgttcagcatgtctgggacaaataattttggggcgggggggtgctgaattttaggacaaacggatgttatagataagctggtcccattatctaatagcttacaaagaaaaaaatataatgtatacagtggttgaaaaagtaggagtyacaaaaaaatgtgtttgcattttaacttttcaggagatgttacagcccagayagctyttcagcctgcactgaagttcaatggtggtggtcatatcaatcatagcattttctggacaaacctcagccctaacggtggtggagaacccaaaggttggtatatattggtgcacccttatctacattttgtgcacagtaggaatcgattgttgatttactgaagttaccttatacttgttttttgttttttttgttgttgwttttttgagacaagagttttgctcttgttgcccaggctggagtacagtggcgcagtcttggctcactgcaacctccgcttcctgggttcaagtgattctcctgcctcagcctcccaagtagctgggattacaggcgcccgccaccacgcctggctaatttttgcatttttagtagagatgaggtttcattcmccatgttggccaggctggtcttgaactcctgacctcatgatctgcccaccttggcctcccaaagtgctgggattacaggcatgagccaccgtgcctggcctaagttaccttattcttaccagaggtatcatagtggcatatttttcataacaacgagtatgataaaagttgtaactttcaaaaggacacaagtaggaatggagaatgctttcatggggttatgtcataagattttatgttcacgccaacatagaatatcacatcaactccaccttctggtttctggatggtacttcatattagggaaagrctgagagacttcattttatgaactttttttttttgagacggagtcttacagtcgcccaggctggagcgcagtggtgcaatgtcggctcattgcaacctccgcctttcaggttcatgcaattctygtgtctcagccacccaagtagctgggattacaggcatgtggcatcactcccggctaatttttatatttttggtagagacagggtttcaccatgttggcggggctggtctcgaactcctggcctcaagtgatccacccaycttggcctcccaaagtgctgtggtatggatgtgagccaccgcgccagtctagaaaagatgaactttctgtctactagtttctagggcctggattagatagttaaccgtctgtaccttttttcatctatgtgatacagggataacaatggtgttgttttgagaattaaattatagtgtcatttgctatttttcactctttcctaactgataaaaagtcagttgttccaggaaattaggttttctgggtatttttaaaaagtgttcagggaatgaggagagtacagggctagatggtcttgttcgctatcactgtttccttgacttcctgtgtagcttgtggaggcccagatgactttaattatcttcttcacccagggagggcatgaggcgtaaatgtagttcttgtctcttgtttctgggctccggatatgcaccctaagtttctgtggttttattgttcatttttaatcagtgttatggaaggcagcctatcttatgcacttgaaataagcaatttcattttaaggtaatgatgaatgaggagagtaagcttgggaaactgggcaactttttctttatttttgtttttatttattattattttggagatggagtttagctctttcgcccaggctacagtgaagtggcttgatcttggctcactgcagcctctgcccatcccgggttcaagtgattctctgcctcagcctcccgagtagctgggattataggtgcctgccaccatgcccggctaatttttttgtatttttagtagagaggagtttctccatgttggtcaggctggttttgaactcctgacctcaggtgatccacctgtctyggsctcccaaagtactaagattacaggtgtgagccaccgtgcctggccaacttattttttttctgagttcagtcttctagactatcggttaatacttttgaagttttgtcagttaccagaatatcagatatattcatatgcaaccagtggttttggtatgctgccatttttgtytaatctgtaccacattccatcatttgtgcttataaagatgattacttttaaacccgtagaataagagaagtgagattttgacccagttgatttagttgatgtgactaatctagaattatattctgtattactacagaataaaaggattacagctcttaaagtatacccttagttcagtcrtagagaaaactgcccatcaagacaggaagagctgggctgccttggagaagaacaatgactttattcccaaatggaggcgtagaagaaggagggtagaagtcaaaggaaaattttctattcagggaaaagaaaaagctaacagaaagtagtatttctttcctaacaaagatagtacagtgagtggggaaatccctctaacacgattcattaaaaaatgtgaactacgcagctggaggccattatcctaagcgaattaacccaggaacagaaaaccaaataccacatgtctcacttgcaagtggaagctaaacatggagtacttatggatataaaaatggcagcaacagacactgaggacagagcagggagggagaaagaagggggggggtgaaaactgttgtatactaagctcgctacctgggtgatggcatcaattgcaccccagacctcagcatcatatgatacccgtgtaacaaacctgtgcgtgtaccctctgaatttaaaataaaatttgaaccgggcacggtggctcacgcctgtattcccagcactttgggaggccaaggcgggtggatcacctgaggttgggagtttgagaccagcctgaccaacatggagaaacccgtctctactaaaaacacaaaattagccgggcgtgatggcacrtgcctgtaatcgcagctgctcgggaggctaaggcaggagaattgcttgaacctgggaggcagaggttgcagtgacccgagatcatggcattgcactccagcctgggcaacaagagtgaaactccgtctcaaaaggtaaaaaatgraaaaaaaaaaaaaaaaaaaaaaaagttgaagttataaaaawcaaaaacgtgaattaaaattgtgaaacttagatccaggtgtcgcattctgatgttgtctaatttcttgggccctatgacaaaaatattttaatacatgtaatataacatkttactgtaattattgaaatctgttcatttgtgggtgkttttggattttttttttaataggggagttgctggaagccatcaaacgtgactttggttcctttgacaagtttaaggagaagctgacggctgcatctgttggtgtccaaggctcaggttggggttggcttggtttcaataaggaacggggacacttacaaattgctgcttgtccaaatcaggatccactgcaaggaacaacaggttagatttaaaaattgtgatttcatttgggagagatgctctactgtaaagcattcaactagaaataaggaaaactaacagtgttttaagaacatgtaataatttgcaaatcttaacagataacacccagagtcttgtgtaagtaaaaatgttttagaagtcctgatatttcataaaattaagtacacgtaattttataggtacattaacaaacatgttttatttttatttattttttttgagacagatctcactgttgcccaggctggagtgcagtggtgcgatctcggttcactgcaacctccgcctcctgggttcaagtgattctcctgcctcagcctcccaaatagctgggattacaggcacataccaccatgcccagctaatttttgtgtttttagtacagacagggtttcaccatgttggccaggctggtcttraactcctgacctcaggtatctgcctgcctcggcctcctgaagtgctgggattacaggcatgagccaccatgcccagccaaatgttttacttattaaccctgcttcattctacagagaattaatatcagcttagataattatatgtactaaaataaaaaaaaaattagctatagaacaagagtgaggaaaagaaatacaagcagagactgatttcagagcttgtactgttacctcctctgctgagcatttgaggttaaactgggactagatctcaggtttccagaccttctgcctttctggggctctttggtagagtatatgaaaatattcggcttggaagtgccaggctgggctcaccaaatactttgctgttgakcctaattggatttaaaaaatgtcactgaagagtatgggaaatagagccatgagttgtctggcagagggttgggactttgaacttaaagtgataccttcacatcaacaacagtcattctctgccccttcttctacccctgacattggaatactcttgatctgtggctcacttcacaggatagacccagattttggcagaatctgaacagctcttttgggacagtgamatggcrtaacaatttgtaaaagccacaaaaaatttgtaagcaccgatctgtagagtcaggttatttgtagagctgcatgaccagaaaggctgatatttgtaagtgagtcccagctacactccttcctctccctgtggaaagcacattagaaggaaaatgagggaatgtcatggccttttgtttataaaaatcattaataaattttgctacttgaaattattaataataaattactagtgacctccctcacaactgatcaagacatactggttaagaattgtttttgtagagagagctataatttattttgagtgtttttgtgtgtgcgtgatggagtctcactctgttgcccaggctggagtgcagtggcgcaatcttggctcactacaacttccgcctcccaggttcaagcaattctcctgcgtcagcttcctgagtagctgggattacaggcgcctgccacctcgccaggctaattttttgtatttttagtagaggcggggtttcaccatgttggccaggctggtctcgaacgcctgacctcaagagatctgcctgcctcggcctcccaaagtgctgggattacaggcctgagccactgcgcccagaccaaaagtttttttaaatggatgttttacagatagaactaaattcttcatttacctcacttaatttctgaaaacactgtgtcctccaactgctctgtattcccaaagattaaaattagccttggggagcagagctggttcctcgtaaacccctgtgagtgcccagaccctttggaggaggttctcagtgggcttttgcctgctcccacagatgtaacccacccttcctgctgctcctaagaccaccatgaggaaggctgggaattggctcttgaattaatttgttggtatttttaagaatagctattaaagtactgttgttaattttcccaagtctattttattgttagtatttgtcacattttctttgtaaacagtgaattaaaaatattttataggaatattcattcttatctagatttcctacttatataaaaaaacaagtgaatgagattgttacaaagggtaattttgtgtgagtagaataataaaagttgaaattgagaagatgcaatgttttagactgaaactgatggttggtttgttttccccttctttctaacaggccttattccactgctggggattgatgtgtgggagcacgcttactaccttcagtataaaaatgtcaggcctgattatctaaaagctatttggaatgtaatcaactgggagaatgtaactgaaagatacatggcttgcaaaaagtaaaccacgatcgttatgctgagtatgttaagctctttatgactgtttttgtagtggtatagagtactgcagaatacagtaagctgctctattgtagcatttcttgatgytgcttagtcacttatttcataaacaacttaatgttctgaataatttcttactaaacattttgttattgggcaagtgattgaaaatagtaaatgctttgtgtgattgaatctgaytggacattttcttcagagagctaaattacaattgtcatttataaaaccatcaaaaatattccatccatatactttsgggacttgtagggatgcctttctagtcctattctattgcagttatagaaaatctagtcttttgccccagttacttaaaaataaaatattaacactttcccaagggaaacactcggctttctatagaaaattgcactttttgtcragtaatcctctgcagtgatacttctggtagatgtcacccagtggtttttgttaggtcaaatgttcctgtatagtttttgcaaatagagctgtatactgtttaaatgtagcaggtgaactgaactggggtttgctcacctgcacagtaaaggcaaacttcaacagcaaaactgcaaaaaggtggtttttgcagtaggagaaaggaggatgtttatttgcagggcgccaagcaaggagaattgggcagctcatgcttgagacccaatctccatgatgacctacaagctagagtatttaaaggcagtggtaaatttcaggaaagcagaagttaaaggcaaaattgtaaatcagtcgagatcgggtgccttcagggtggtatggctgtataccaaaattgtaaatcactacatgaagcttatatattggtttggcctgaaaggtgaagtggggtaggcagggggcgggcttacaggttatggtggattcaaagactccytgatttgtgattggttaaggaagcaaagctttgtctaaaaacttggggtccgcagaaaggaacattaaggtctggccaggcccctcaggaagaaactgagagcaaagaatggaggtcagagtttagtccctggtgttcccccttatctgacgtctgtgtgaatccatttggtgggggtctgggtttctgaaaagtagctcaggggcacgtgttaaggatgtctctaggtgactctaacttccctggctattgtttgaaactgttatgaccttcttgcttatcagcttgctggtttccttctcggggcgagctgggtgcctggagttttcggtgaaggaaactcaagattctcctttatttctgtgcttgtgggaatccccctggcacaccccaaagaggggtccctgctccgtctcacagggatctttttgtatatttggcttagcatcatacatttgccatgttgtttcatcatctgcctaatttactgtttttgaatatttcatttgtttctaattgttactacagataatgctggggtgagcaacwctgtgtacataggtttatctcctattggaatattttctttatataggcgttttttttttttctttttttttggagacagagtcttgctctgttgcccaggctggagtgcagtggcgygacyggagctcactgcaacctccacttcccgggttcaagtgattgtcccacctcagcctcctgaatagctgggattayaggtgcatgctaccaygcctggctactttttgtatttttagcagagacagggtttcaccatgttggycagggtggtctcgaactcctgacctcaagtgatccgtctggctcagcctcccaaagtgctgggattacaggtgtgagccactgcacctggcctatataggcttttttcttaaacctatttagtaatgttttcccaagtttattttttatttttaattttttccccaagtttatttttctatttttttttcatggaaaaatggggtaacttagcagtttcaatattgaagactgaagtttaaaaaamatttaaattcaaggtacttttaaaattcagttagaaaagtaggctttaaaaattattagagacaagagtaccaaagcggtgtgtgtatgtgtgtgtgtgtatgcatgcttgtggattrgaaaaactttggagactgattacttttcattatatatgtgtcacagtgaaacagcttttatgtgtcatgtaagattaytgcttgcctctctaaggaaggtcgtgactgtttaaatagacgggcaaggtggaaccttttgaaagatgagcttttgaatataagttgtctgctagatcatggtttgtattgaactaacaaggtttgcagatctgctgacttatataaagctttttgattcctactaagctttaagatttaaaaaatgttcaatgttgaaatttctgtggggctctatttttgctttggctttctggtgagagagtgaggaagcattctttccttcactaagtttgtctttcttgtcttctggatagattgattttaagagactaagggaatttacaaactaaagattttagtcatctggtggaaaaggagactttaagattgtttagggctgggcggggtgactcacatctgtaatcccagcactttgggaggccaaggcaggcagaacacttgaaggagttcaagaccagcgtggccaacgtggtgaaaccctgtctctactaaaaatacaaaaattgtttagctctgtttttcataatagaaatagaaaaggtaaaattgcttttcttctgaaaagaacaagtattgttcatccaagaagggtttttgtgactgaatcagcagtgcctgccctagtcatagctgtgcttcaaaaacctcagcatgattagtgttggagcaaaacaaggaagcaaagcaaatacwgtttttgaaattctatctgttgcttgaactattttgtaataattaaactttgatgttgagaaatcacaactttattgtacacttcattgcaacttgaaattcatggtcttaaagtgagatttgaatttctattgagcgcctttaaaaaagtaataccaaaccataaagttaaaatctatgtatattgagtcatatctaaaaccacgtataaacataaattgtatttcctgttttaattccaggggaagtactgtttgggaaagctattattaggtaaatgttttacaaattactgtttctcactttcagtcataccctaatgatcccagcaagataaygtcctgtcttctaagatgtgcatcaagcctggtacatactgaaaaccctataaggtcctggataatttttktttgattattcattgaagaaacatttattttccaattgtgtgaagtttttgactgttaataaaagaatctgtcaaccatcaaagaggtctgcattatgcttgcatgtcaaaaacwttaaaaatcctataatcttctgtcattttcactgagtttccatgggaaaggaatagtaaataatgggtagttgaaatattactcttaagaccaagacctgtatctccagtcatatctgtaataacatcatctgataacctaaaagcatagtattagggatatacgacaaaaccaaagtgtttttgctgttgtcacataccactcaatacttttacaccaggttgtccagtggacaccagctggatgtcctataattcaattctgacactgtctacctggaattggagtcagatcccacaggtggagggctcagcccacaagactgcccccactccagataccaatcgcaagtccctatacttctgactggctataaagtggggttcccgtgaccctttccttggttttgatttatttgctagagcagctcccagaacacagagaaacactctacttatgtttacccatttttaattttattactttattaaaactacatattggttacaatactaatttattgtaaaggatatttcatttatttatttttttatttagagatggagtctcactgtgtcacccaggctggagtgcggtggcacagtctcaactcactgcaacctccacctcctgagttcaagcgattctcatgcctcagcctcccaagtagctkggattacaagtgtgcaccaccatgcccagctaatttttgtatttttagtagagatggggtttcactctgttggccaggctggtctcaaactcctgacctcaagtcatccacccacctcagcctcccaaagtgctgagattacaggtgtgagccattgcctctggcttgtaaaggatatttcaragaatacagatgaacagccagatggaagagatgcacagggcaaggcatgtgggaaggggtatggagctttcatgctctctccacgtcatcagctacccagaagctcatctggaccccgaccctttggggttttacggaggcttcattatgtcagcattaccattggcaattggcgattaactcaaccttcagcctctctcccctttctggaggttgggggttgaggctgggagtccaaaccctccaatcttgccttggtctttctggtaagcagccccccgtcctgaagctacctagaggctcccagccaccaatcatttcattggcaaaccaaagatacttcaaggggtttaggagccaagagaccaagcaaggattgagacaatatatatatttcttataaataacatgatcacaaatagtattttatatatttctcataatagctggttgtggttactcacacctatcatcccagctactaagaagctaaggcaggaggatcacaggcccaggagtttgcagctgtagtgagctatgattgtgctactgcactccagcctgggtgacagtgtgagaccctgtctcttaaagttcttgtaacatcttagaacattaaccaaccacagattattgccttaactctgaaaaataaagtaatcatacttttacaagatgtattttacataaagttctggtgatattttactctggtcattggaatataggagcttaccacctggtaccactcttcctaaagtggtatactatttggtatagtactggcatactatttggaaagggatgtgaagttggcatgacctgtctagggtgaagtcatgctgtctgctattcattgtgggctttacagtaatgagagtgcttctgttgtcaagatgcttctgggacacgttaaaaaaaatttaagatttctcagtttgtgaaaaggaaggagcacgaatgctttcaagttcctrtgacatgctagtcatctttcagtgtgtcccattgttgcacccagtagtctcgatgcccagygtcacggtgattccaagtttgcctctctgcccactataatttgtgctccatgaagtcccaggacatgaggttcttgttcatttgtgcgtctgggcccatatccaaatattaaacaatgtgacttaatgtatttatcatattgtaaatatgggtatccccaaggctcagaagttaacacagcatatccacagagaggtttgacagcatggctgtggtgactgggaaggccttatgcttgctcctccttctgctgcttgcctttgtgtgggcatggaaagaacattgaattaggtactggaagacctgggtcctggtcttggagattttaccagagcacctgtgggatattggtcaagatgcctggttttagtcctgctcctttgctgtgaaagaggatcttaaggtgccaactctggcattttattttttayttatttatttttaaattatactttaagttctagggtacatgtgtacaacatgcaggtttgttacatgtatacatgtgccatgttggtgtgctgcacctattaactcgtcatttacattaggtatatctcctaatgctatccctcccccttctccccacccctcgacaggccccggtgtgtgatgttccccttcctgtgtccaagtgttctcattgttcaattcccatctatgagtgagaacatgcggtgtttgtttttttgtccttggaatagtttgctgagaaggatggtttccagcttcatccatgtccytataaaggacatgaactcttccttttttatggctgcatagtattccatggtgtatatgtgccacatcttcttaaaccaatctatcattgatggacatttgggttggttccaagtctttgctattgtgaacagtgccacaataaatatacgtgtgcatgtgtctttatagcagcatgatttataatcctttgggtatatacccagtaatgggatggctgggtcaaatggtatttctagttctagatccctgaggaatcgccacactgtcttccacaatggttgaactagtttacagtcccaccaccagtgtaaaagtgttcctatttctccacatcctctccagcacctgttgtttcctgactttttaatgattgacattctaactggtgtgagatggtatctcattgtggttttgatttgcatttctctgatggcccatgatgatgagcatttttttcatgtgtctgttggatgcatggatgtcttcttttgagaagtgtctcttcatatccttcacctactttttgatggggtttgtttttttcttgtaagtttgtttgagttccttgtagattctggatattagccctttgtcagatgagtagattgcaaaaattttctcccattttgtaggttgcctgttcactctgatggtagtttcttttgctgtgcagaagctcttgagtttaatgagatcccatttgtcaattttggcttctgttgccattgcttttggtgttttagacatgaagtccttgcccatgcctgtgtcctgaatggtactgcmtaggttttcttctagggtttttatggttttaggtctaacatttaagtctttaatccatcttgaattaatttttgtataaggtgtaaggaagggatccagtttcagctttctacatgtggctagccagttttcccagcaccatttattaaatagggaatcctttccccatttcttgtttttgtcaggtttctcaaagatcagatagttgtagatgtgtggtattatttctgagggctctgttctgttccattggtctatatctctgttttggtactagtaccatgctgttttggttactgcagccttgtagtatagtttgaaatcaggtagcgtgatgcctccagctttgttcttttggcttaggatcgttttggcartgcaggctcttttttggttccacatgaactttaaagtagttttttccaattctatgaagaaagtcatgggtagcttgatggggatggcattgaatctataaattaccttgggcagtatagccattttcacgatattgattcttcctatccatgagcatggaatgttcttccatttgtttgtgtcctcttttatttcmttgagcagtggtttgtagttctccttgaagaggtccttcacatcccttgtaagttggattcctaggtattttattctctttgaggcarttgtgaatgggagttcactcatgatttggctctctgtttgtctgttgttggtgtataagaatgcttgtgatttttgcacattgattttgtatcctgagattttgctgaagttgcttatcaaattaaggagattttgggctgagatgatggggttttctaaatataaaatcatgtcatctgcaaacagggacaatttgacttcctcttttccttattgaataccctttatttctttctcctgcctgatggccctggccagaacttccaacactatgttgaataggagtggtgagagagggcatccctgtcttgtgccagttttcaaagggaatgcttccagtttttgcccattcagtctgatattggctgtgggtttgtcatagatagctcttattattttgagatatgtcccatcaatacctaattcattgagagtttttagcatgaagggctgttgaattttgtccaaggccttttctgcatctgttgagataatcatgtggtttttgtctttggttctgtttatatgctggattacttttattgatttgtgtatgttgaaccagccttgcatcccagggatgaagcccacttgatcatggtggataagctttttgatatgctgctggattcagtttgccagtattttattgaggatttttgcattgattttcatcagggatattggtctaaagttctctttttttgttatgtctctgccaggctttggtatcaggatgatgctggcttcataaaatgagttagggaggattccctctttttctattgattggaatagtttcagaaggaatggtaccagctcttccttgtacctctggtagaattcggctgtgaatccatcttgtcctggactttttttggttggtaggctattaattattgcctcaatttcagagcctgttattggtctattcagggattaaacttcttcctggtttagttttgagagggtgtatgtgtccaggaatttatctatttcttctagattttctagtttatttgcatagaggtgtttatagtattctctgtgtactctgtatttctgtgggattggtggtgatatccactttatcattttttattgcatttatttgattcttctctcttttcttgtttattagtcttgctagcggtctatcaattgtgtttatcttttcaaaaaaccagctcctggattcattcattttttgaaggtttttttgtgtctctgtc

SEQ ID NO: 10017 - DNA, 51917 bp, Homo sapiens
  misc_feature (35650)..(35650): n is a, c, g, or t
acgtgaggagggttctgggttaatcatgatcagccattactattgctgctgttgtgtgctgttgtactattgttgagctcagcaagggaccatggaagctgtcataatacctggtaaatgtccttgcatttactgagccacctcctacgaaccgcgggcaggggctgttttactggcagggaaacttaggtgcagaggaaagccggctgcccacgtctcttagtggagtgagaggcaggaaactgggtctcaggacaccctccctccacacacatcagggcggccacgttggggacacacgactatttttactttggtgggctccaggctgcccacgtcgtgatctgggtgttcgccatagcaaccagtgacgccatcggcccctacagccaattggagggggccggaagctgctgggctgccggatgacccagctgggagggcaaggtctcccgggagaggcggggaarggtcgcgggggtgtggcgtyaccccaggcctgacttcagctgctctgcgctcagaaaaccaagctgtcacgatgggaggagaataatctacccctcgaaggtctctctgactgcttgaatatgtctgaggacagacaactcacggcgtttagttcaagcagtcatggtgatggaaccatcaccaccatcaccgtggccattagggtctccttcttccccttccaatagttgtgggaatwttttttttttttttttttttttttttttttttgagacagcgtctggctatgtcgcccagactggaatgcagtggtgcaatcttggctcactgcaacctccgcctccagagtagctgggattgkgggcatgtgccaccacacccggctaatttttgtattttttatagagatgaggtttcaccatgttgcccaggctggtcttgaactcctggtctcaagtgatccacctgccttggcctcccaaagtgctgggattacaggcatgagccactgcacccagccagttgtgggatcttataccacttcctccactaccccacgtgaaacagggagggatttgaaccctggtggggggtcccacttgcaccccatccaggcatttccttccaaaactctgacagtcctaggttcccagtctggctcccccactcctgcactgtgtgacccgacaagtgacttaacccctctgtgcctcagttttctcatttggaaaatggcccrgtgacatagggtccctggaggaatcaatgagtagcaagctcagagcctggtgctgggggaracttggatggatgggagtcaagacaatgatcaagacgtgaataataaccaccagttgaaagttgcttccaaaagacaaaaagatgtgaatattttgtttgtttgtttgttttcagatggagacttgctctgtcgcccaggctggagggcaatggtgcgatcttgtctcactgcaacctccacctcctgggttcaagcgattcttctgcctcagcctcccaagtaagctgggattacaggcgcccaccaccacgcttggctgattttgtatttttagtagagataggatttcaccatgttggtcwggctggtcttgacctcctgacctcaagcagtcctcccatctcggcctcccaaaacgctggattacaggcatgagccactgtgcctggcctgaagatgtttttttaaagtggcagagagaggtgargcaaaatcggcagctccctgcaaaggctcccggggaagctggaccacacagaactctcctggcaccactcccggacccttcggtccccgcaccatctgctttccacccacagctccctctgtgcctgctgttcccctgggagtggttcccacccagaggagtggaggttggggaggccccgaccccctgaaactgccctttaaaggtaatatttatggtatacccgtctgcgcttgcccaggctgggggatgctgcctccccaacaagctttagccccaccttgaggaaatcccattttggagaagacatagcacagcaggagcacccccatactggagggattaagagagacccgaagcagctgggtgctgtggctcatgcctgtaatcccagcactttgggaggctgaggcgggaggatcacttaagatcaagagtttgagccaggtgcggtggctcacgcctgtaatcccagcacgctgggaggccaaggtgggcggatcacaaggtcaggagttcaagatcagcctggccaacatagtgaaaccccgtctctacttaaaatacaaaaattagctggatgtggtggcaggcgcctgtagtcccagctactcggtaggccgaggcaggagaatcccttgaacccsggaggcggaggttgcagtgagccragaccacaccattgtactccagcctgggtgacagaatgagactccgtctcaaaaaaaaaaaaaaaaaaggtggccgggcgcagtggctcatgcctgtaatcccaggactttgggaggctgaggcaggcagatcacctgaggtcaggagttcgagaccagcctgaccaacatggagaaaccccgtctctactaaaaatacaaaattagcaggatgtggtggcgcatgcctgtaatcccagctacctgggaggctgaggcaggagaatcgcttgaactcgggggcagaggttgcggtgagccgagatcgtgccattgcactccagcctgggcaagaagagcgaaagagtgaaactccgtttcaaaaaaaaaaggccaggcgcagtggctaacacctgtaatctcagcactttgagaggccgaggygggaggatcacgaagtcagcagatggagaccatcctggctaacacggtgaaagcccgtctctgctaaaaatacaaaaaattagccgggtgtggtggcaggagcctgtagtcccagctactcgggaggctgaggcaggagaatggcatgaacctgggaggtggaatgagcggagatcacgccactgcactccagcctgggcgacagagcaagactccgtctcaaaaaaaaaaaaaaaaaaaaaaagagtttgaggccattctggccaacatggtgaaacaccatctctactaaaaaatataaaaattatattagtcgggtgtggtggcgctcgcctgtaatccagctactcaggaggctgaggctgtgagaatcgcttgtatccaggtgacggagcctgcagtgagccaagatggcgccactgcactccagcctgggccaccgcactccagcctgggcgacagggcaagatcctgtctaaaaaaagagagactcaaagggagaagaggggttggaggcacacagagaggagagctaaggggcttcctggagtagggggtgtcaaacaaagcctgcaggcacatggaaaacaccagtccatgcccagcaaacagcacgtgcaaagggaggtgagactcagcctgctgggcaccaagcccggttggaagttcgatgcccctggaattaaatgggagagaagtcagcatggaccacatggcaccagccccagggcttccaggaggaggaggaggaggaggagaaggagaaggaggaggaggaggaggaggaggaaaataagtggaagctgtccatgagaaagcaggatcaccttggagggctgaacctagaggagccaccccagtagcggcagagacaaaagtccagatacaggctctagcccttctctgccgggggatgctctgtttgtgggacctggtgttttgaaattcggtcatgtgtaaagcaaaggtccaagtaggagatgataaatgtaataagataatagtagtagtagtaataacagctcacgttacccggtgcctgcacacgttatgcgtgaggctgagtttaacccaaattgggaaggtctccacctcctccctggacccagggctgtcgcaaactggccgcccgcgggccaggccggatcctttttcagacctttcctgcacacagccaacagcacgcctcacattgtcaccaccggagaggacgccctgggctatgcgtctggattggccggtcagcacccgtttgtgaatggactctttggcctttggcctccaggaaatctgattggctcgcatcagcgatctaccccctgattggctggggtgctcctggaccattaacaaggtttccagtcaaaagagaccccaaactggggctgatgaagacaacaccttcacgtgccagattggytagaatttctctggcttcctggtgggtacttccctctttgggcctcagtttcttcctttgaaaagtggaactaataatagcactgaccactcgggctgttgggagaattgaatgcatgagagggcttagcctgttaatatgaacggttattcccactttactattattttattattattttaatcttcttccacttggacctttatttttatttttgagatagggtctcgtgatcatggctcactatagcctcaaactcctgggctcaagagatccttcttggctgggcgcggtggctcacgcytgtaattctagcactttgggaggccgaggtgggcggatcacctgagrtcaggagtttgataccagcctggccaacatggygaaaccccgtctctactaaaaatacaaaaattagccgggcgtggtgacatgtgcctgtaatcccagctactcgggaggctgaggcagggagaattacttgaacccgggaggtggaggttgcagtgagccgagattgcgccactggactccagcctgggtaacagagcatgattctttctcaaaaaaaaaaaaaaragagagagagagagawccttctgcctcagcctccttgagtagctgggactacagtcatgagccaccacacctggtacacttagactttcattccatgctccttcctggcttcctgccctttttgattcccccactcctgctcctagccctccagaggagtcttcccagcccctcaatatgggcatgtcctctcctgctccagcaccttccatagctccccatcaccctagggggaaagtctaacctcttcaaaatcagcactgaaggccctggaagcattaagtcctggccatcagcctctagtgctaagaaataggttcaagttcttgtttccccatataaacaggtaagaaaggctacatgcctctgggcctttgcacgtgctgtggcctctgcccggaatgccctcattcagtcggggaatccgtgctcatccctccaccttcgtggagggacgcctgtgctgggttggtttggagaggaagccggaactgcgtgggttcaaatcctgtctgactctgtcacctatactttgtgaaacccggacagtggctatgcttctctgaacctcagtttccccttttgtaacatagaacttaccatcaggaaatgtttgacccccccaccatggaacaggccccacttcttgacgtcagcagcacccccattcgcctacccggaggcggtttctctattttaagaggctgcgggcgggttggcatctaactggggctggaggcgggactgcccccccaccaacaccacgctgctcgccaatcccgccccgccccctcctttccgcccaagtcccccactcttgcctctggcctcagcgcctycagttctgccccacccccgcgcggccagagaccgggtgtctctgatctgcagctcagcccgtgccttccctgaccactcccgacctggcttcccatcacctgctgagttcgcagtcccgcagctaccggtgcggctccaggttggagacccgccggccccattcctctcaccccctcaacccgcccggagctaacctcagtccccgacccccaccccacctgctcagtcctccctaggttccagcttctgtcaacctctttcatttccctaaataccgccccccgctgcaatgcctcgccacccttggctgcctcctctaccccagggctcccagcaatgactgggtcaggcgcctccttcacttgctgtgagtcccttatcacaactgatcactccgtggggtcaccgctgctctggcgtctacctcccccaacaggttggggtttctaggagggcagctccagaggttgcagaacactccgctgcctctccagagccaggcacacagcaggcgctccataaatgttcgttgggtaagtgctgaatcccaggttccctacctgaaaacttggtggcttcttaagggtgtggtctaagtcccagaggaaaatggccaaatcttaattcctgtttttcttttcttataatggggacactgaggcccagagaagtcaaagggtggctgcccggggtcatgtagtccctgtgtggcttcaaacttaggcttctgctgtccccgacgcctgtgtccctacctcctgatgacacagcctcctaaacataaactcagtaaaaggaggaccctatggctcattggaaaactgaggcccagagaagcaagggtgccctccccccaggtcacactgctggttggcagcgccttgtgccgtaagagagctggttgagggcgcagatcgaatcccagctaggcgacctctggagagtggctttccgggactagagcctcagtttccttattctgacaaatgggcgcctgacagccccaacctccccaggtcgtcgtagggctgagctgagggtgtacagtggtgcagcgacgacccaaggaggtattaatacatatgaactcatattaatacatcgctagtaataggactaaaacaaccatgaacatatggtgagctctctggctgctgttgctagcattattattagaacagctggtggggaggggcagagccctcagcctcttcctcccacgccatcgcttggagcctcagtttccctagatgtccaagggggcaccttcccccttcccaccatgagaaaaagcactttgagaagcgggtggtcaaaaagaagcgatctgagcgttccccaccctctgcctcagtttccctacagcccgtgaaggccccgcccctcccggcacctttcaggccgcgtccacttggccgcgccctctgccttccgcccgcccgcgcaggggcctcacctggagcccgcggcgccgcaggaggctcgactcgtccatggcccgggagtccgcgccgccaggcccgcccccggccccgccccggcctgccmggccccgccgccaggtgccattggccaggccggtcagctgacacggcctggccccgcccctcccggggagcccgaccacagggccccgcccccactgggcgmgctggccccgcccctccagcagagcgcagaagtaaatattttgcatgaatcctctcagaagtaaggcagcatcgttcagccccattttgcagatgaagaaactgaggctaagataggttaatcaatatgcccagcgcattggccgggcgcagtggctcacgcctgtatcccagcactttgggaggccgaggtgggcagatcacttgaggtcaggagttcgagatcaccctggccaacatggtgaaaccctgtctctactaaacaaaaaaaaccaaaacaaaacaaaaaaaaaattacttgggggtggtgacgcgcgcctgtaatcccagctactcagaagactgaggcaggagaatcgcttgaatccaagaggcggaggttacagtgagccgggatagcgccgctgcactccagactgggcgacagagcgagactctgtctcaaaaacaaaaacaaaacaacaacaaaaaatgtgcccagtacacacagcagaacgggttctagggtgaggcgagtgaggatctcacccctgtgcaaaatttaaggtggccccacaaaactcagccatcaagagaaataatattttaaaaacataaaattaatgaaaacatttatgatgaacaaaacatcaaaacttttattttttattttatttttagagacggggatctcactatgttgcccaggctsgtcttgaactcctggcctcaaaagatccttctgcctaggcctcccaaagtgttgggattacaggtgtcagccaccgcatatggccaaaacaccaaaactttttttttttttttttaatttatgagacgagtctctctgttgcccagactagaatgcagtggcatgatctcggcaacccctgcctcctgrgttcaagctattctcrtgcctcagcctccctagtagctgggactacaggtgcccaccaccacaccaggctgattttttgtatttttggtagagatgaggtctcaccatgttggccaggcttgtctygaactcctggcctcaggtgattcacccaccttagcctcccaaagttctgggattgcaggccaaagagttttggtgttttgcctggccaaaacactaaaactcttaagacatgatcagacccttgtccttgcaccactcagccttgtttgcctccctttaatcctggccctggtgccaataaaactttacttacaaaagcaggtagccgctgcagttgtcagtttcttttttgaggatgattgcctttttgccctaagtgtctcataaacaccatctctcacagatatttgaagataattgttctactccattttgcaggaggggaaactgaggctgagaaaagcccaaagtcccaaaatagcacccacatttaaaaaaaaattttttttttgagacagggtctctctctgtcacccaggctggagtgcagtggtgcaatcttgtctcattgcagcctctacctcccgggctcaagcgatcttcctgcctcagcccccataccccagctcccagagtaggtgggaccacaggcacatgccaccatgcctggctaatttttttgggttttttttgtagagatggagtaccgccatgtttcccgcgctggtctcgaactcctggcctcaagtgatgctcctgcatcagcctcccaaagcgctgggactacaggcatgagccactgtgcctggcttagcacctgcattttttctttccctgggactcgcactttctctgcagccgcagttgtcttcggctgccccrctgtacagtgtggacactggagtatgctttcaggctcgaggggaccctaggaagggtcactgggcctgactgtccatgaggtactgtagaattgcatcaagttatggtggccagattgagcaaataaaaatacaggatgccagggaaaacttgtttttctcatacaattttaaaaattgacatataattcacataccataaaattcacgcttttaaagtgtgcaataaattcagtgttttaagcatactcacagagttgtgtaaccatcaccacgatctgattccaggacatttgtatcatccccaaaagaaaccctgtacctattagcagccagtcctcattccccctctctcagcccctggcaactaccaatctgcttcctgttctatgaattttcctgtgctggatatttcataaaaatgaaaacataacatgtggccttatgtgtctggcttcgttcagcatcatgctttcaagatgcacccatgttgtggcaaatatcagtacttcattccgtttcatgaccaaataatattccattgtatatatgtacatgtacattttgttgatccactcatttgttggtggtcacttggattttttcacrttttggtagctattctgaatasagctgctataaacattggcatacaactttttgcatagatttatttctttatttatttattttgagatgaagtgttgctctgatgcccaggctggagtgcagtcgcgggatcttggctcactgcaacctctgcctcccaggttcaattgattctcctgcctcagcctcctgagtagctgggattacagacacccgccaccactcccagctaatttttgcatttttagtagagacgggggtttcaccatgttggccaggctggtctcraactcctgacctttaagtgatccatccaccttggcctcccgaaaggctgggattgcaggtgtgagctaccgccccctgcctttgtggatatattttggttctcttgggtacttacctaggaatggacttccggggtcatatggtgtaactctatgttttgggttgttttgttttgttttgggacagggtcttgctctttcgcccaggctggagggcggagtagctgagactacaggcacatgccgccatgcccagctaattttttgtattttttgtagagacaaggtttcgccatgttacccaggctgatctcaaaatcttgggctcaagcgatcctcctgccttggcttcccaacgtgctgggattacaggcatgagccactgcgcccagcaactctatrttttaaatttgtaaaagacaaccaggctgttttccaaagcaaacacccagttaaatttaaatttccataaacaatgaatgttttttcagtgtaagtatgcccccttcagtacttgggacatagttgcattaaacaacaatgtgttggccgtgtgtgctggctcatgtctgtaatcccagcactttgggaggctgaggtgggtggatcatctgaggtcaggagtttgagaccagcctgggcaacatggtgaaaccgcgtytctactaaaactacaaaaattaagggggcgtaatggggcacgcctgtaatccccgctactcggggggctgaggcaggagaatcacttgaacctgggaggcagaggttgcagtgagctgagatagtgccagtgcactccagcctgggtgacagagcgagactccatctcaaacaaaacaaaacaagacaaaacaaaacacaaaccaatatgttggttgtctgaaattccaatttaactgggaatttaatttaaatgttatttaatgaataatgactacgagtgagtttgttaaatgaatgaatagattttctcctggcaaactcctatgcatccttcaacaccctctttagatgacccctcaggggcatcagggtctcttggccacatggagggaagctccccactcttcgggctgaaggtccctgagaaggcagaagtcaatgggggtggggaagtcgtgtgttttatctggcagtcctacactaagtgaacttcaggctgtagcttgcacaccccaagtgatgagaagctcatgtcctgcaatggccaattgttctgactctgggcagctctgcctcaaagttctcccttagtccagcctggggtggacatgtgactcagactcgtttatccacctcagccactgtgattggttcaaggtgtacatgtgacccaagctcagcctatcagagccctccctggggctttgactggaatcctggggaaagagaggttccctgaaccagggttgggttgggcatgtgggaacatgctggagagagccaccagagaggtctcaaatccgctgctccatctggagaattcctacactgaactgcctcctgaacaacccctcagtgggcaagaaggagtgcttattgagtgactgactggactgactgaatgaatgaatgcagwttttctrtggttaacacacacacacacacacacacgcacacacacaagtatatawatatatatatttgtgtttttttgttttttgtttttgagacaaaagtccagctctgttgsccaggctgaagtgcagtggagcaatctcggctcactgcaacctccgcctcctggattcaagcaattctcctgcgctcagcctcccgagtagctggaattacaggcacctgccaccacacccggctaatctttgtatttttagtggagacagggtttcaccatgtttgccaggctggtctcaaactcctgacctcaggcgatccacccacctcagcctcccaaagtgctaggattacaggcatgagccactgygcccggcctaacatctatatattcttcaaaatccacttcaaattctctttgagaagtatcagaggaccttgtattgaatgaacaaatacattttattcttgtgagcttctatgtacccatcaaaactctcctcacatgtctctataagggacatcaggaagtgtggtggttgaatgaacttttttcttggtaacctcctgagtcttccttaaaacatcctctaatctgtttgggagcggtggctcatgcctgtaatcccagcactttgggaggctgaggtgggaggatcccttgagaccaggagtttgagaccagcctaggcaacatagtgagaccacatttctttttttttttttttcagacagagttttgctcttgtctcctaggctggggtgcagtggcacaatctcagctcactgcaacctccgcctaccaggttcaagcgattctcctgcctcagcctcctgagtagctaggattacaggcgcgtgccaccatgcctggctaattttgtatttttattttattttatttttttgagacagaatttcactcttgttgcccaggctggagtgcaatggcacgatcttggctcaccgcaaaccccgcttaccaggttcaagtgattctcttgcctcagcctcccaagtagctgggattacagacaggagccaccatgcccggctaattttgtatttttagtagagacggggtttctccatgttggtcaggctagtctcgaattcctgacctcaagtgatctgcccacctcggccttcccaaagtgctgggatacaggcatgagaccacatttctaccaaaaactgaaaaaaaaaaaaaaaaagctggatggtcgaggggcggtggctyacgccggtaatcccagccctttgggaggccgaggccagcagatcacttaaggtcaggcatttgagaccagcctggmcaacatggtgaaaccccatctctactacaaatacaaaaattagctgggtgtggtggtgcatgtctgtaatcccagctactcaggaggctgaggcaggagaattgcttaaactcaggaggcggaggttatagtgagctgaaatcgcaccactgcactccagcctgggtgactgagcaagactctgtctcaaaagtaaaaaaaaaaaaaaaaaaaagaaaagccaggcatcatggtggcattggcctgtgtctcagctatatcagaggctgaggtagaaggatagcttgaaactgggaggttgaggctgcagtgagctatgattgtgtcactgcactccagcctgggtaacagagtgagaccctgtctcaaataaaaataataattaaacatcctcaaatgatccctcagaggcattagaaagtcctgattgaatgatgaaaattgttcttgttgatgagtgatgcctatgagtttgttaaattaacaaatgggttgtctcctggctaactcctatgcatccttcaacaccctctttagatgatcctcagcgacgttagggtctcttgccacatggagggaagctcggccctcctcctcgggctgaaggtctctctccctgagaaggcggaagctgaggaggtggggaagtgctgtggttcctcccgtcatgttttctggggccctcgtgactcgatccttcctgcttcacccgcccccgagtctgtggggcacctgaaagtggggcagccctgggaacttatctcagacgagcttctggggmagctgggtggggccataaggggcccacagggcctcttggcaggcctagagacggagggaaggaggtgggcttgccaagaygtggcaaggggaaggtgggatgtggggaacttcagagggagtgtcaggttgtgacttcaataaggggagaaataccacttcacctttgtctggggtacccctccagctcacacacctgccatggctccctaccgccctcggagaaagccaggccctttagcctggcgctcgaggccccagcccatcaccccacagaaacccagacccactgtgtccatcttggtggtccccaaagcacctcctctggacttttgcctctgctgtggcctctgccrgagatgccctgtaattctatacattctagctcaagtgtccctcctccaggcagtcctccctgctccacttcagggcacccggcctccatctgttcctgatcccaaggggctaggggcgtctgtgtccagcttttcacctccccagccctgtatctccctccctcgatgtttttccagcagctgccaggcagaggccactggggaacaacaacaatgactaatcacactggccagcgggtggacagcgctcactgcaagccaagccctccttcatactcacaaaagcccattttgcaggtgggaaagatgaggcctgagagggccaaccttggtgcgggtgggggaagccctgaggcacggtctccactctggaaggggcaaaactatactccacaaggggtggtttgaatccatctcttcatctccagctggggcctcaggtggtctgagtgcccctggactcagtttcccaatctgtgaaataaggcaartgagggactctccaggaattggtggagttgggagggtctcaggatggtcaggagggggccatgactttcctctgatctctacctatttcctccacctttcttgttattttttgagcagggtcttgctctgtggcccaggctggagtgcagtggcgcaattagagctcactgcagtctcgacctccctggcttaagcctcagcctcccaggtagctgggactacaggcacctgccaccatgcccagcaaattattttttgtagagatggagtctcaccatgttgcccaggctgctcttgaactcctagcctacagcaatcctcctgccttggcctcacaaagtgctggattacaggcataatccaccctgcctggcctcctccatctttatgtatctctctatctctgtccctttctctgtctctgcccctcccccaggcctcacacatccatcccccagctgaccctggcctgggccccggggccagagaaggctgtcctgtatggggtcacagggcccccgtccccactgtgccaggcccaggacactgagtctttgtccctaactcactgacctcatagcctgctgggcgcctgrccctggccagctcagctgcccctcggagccaggcttcttgaaggagggacctcctcccaggaagctgaacmgcattgcacaamcctggccacttgggcctcagtttccacagatgctcatccccaggagagaccctctccttctccctcctcagtgcccctggactctaagaatatttcttttttctgtagatgcatctcacgtaacctaaaattcatctttttttttttttttgagacatagtctcactctctcacccaggtgggagtgcagtggtgtgatctcggctcactgcaacctctgcctcccgggttcaagcgattctcctgcctcagcctcctgagtagctgggattacaggtgcatgccatcacgcccagctaatttttgtatttttagtagagactgggtttcactgtgttgtccaggctggtctcgaactcctgacctcaaatgatccacctggctcggcctcccaagtgctgggattgcaggagtgagccaccgcgcccgggccggaaattcatcattttaaagcaaacgattcagtgacatttagcacattcagtgttgtgcaaccaccacctctatctggttccagaacatttgcatcaccccaaaaggaaaccccgcatacatcagcagtcacttctcactcccgcctccccccagcccctgacaaccactcagctactgtctgcctctgtacatttgcctattttggatattttatataagtggaatcatacagtgtgtgcctttcctgtccatcttcgtccacccakcatgatgggtttttttttttgtgtatgtgtgtttttttttttttgagatggagtctcactctgtcacccaggctggagtgcagtggcacgatctcagctcactgcaacctctacctcccaggttcaagtaattctctctgcctcagcctcccgaatagctggaattacaggcacatgtcaccaggcctggcraatttttgtatttttagtagagacagggtttcgccttgttggccaggctggtctcraactcctgacctcaggtgatccgcccacctcggcctcccaaagtgttggaattacagatgtgaaccactgcacccagcccagcattatgtttttgagggttcatccacatggtagcttggatcagagcttctccactgacatttagaggctttgccgacagtggggagggaggggcaggaaacaaaatactcagaggctaagaaatggaacatgggggaaagactaagttgcatctcttaaatttttttttttttttttttaagagacaggatcttgctctgttacccagactggagtgcagtggcrcaatcacgattcactgcagcctcaacctcctgggttcaagccattctcccacctcagcctcctgagtagctgagaatacagatgtgtgccaccacgactggctaacttttaatttatatatatatatatattttgagatggagtgtcactctgttgcccaggctggagtgcagtggcgcgatctcggctcactgcaacctccacctcctgggttcaagcgattctcctgcctcagcctcctcagtagctgggattacaggtgcctgccaccacacccggttaatttttgtattttcagtagagacagggtttcaccattttggtcaggctggtctcaaactcctgacctcgtgatccacctgccttggcctcccaaagtactgggattacaggcgtgagccaccgcgcctggcctaattctttattttttatagagatggggtcttgctatgttgtttaggtagacccaaactcctggggtcaagtgatcctcccacctcgacctctcaaagtgctgggattagaggggtgagcccaggtgcacaaggctggagcttggcatgtggggaggtgggcattgtggagggccagcatgctgcaagctctttgtaacaatttgttggaaggatgaaattaggccatccaagaacactgccctccttcagctcttgagtctcagattcagaagctggcgagatggcccggtgcggtggctcacgcctgtgatcccagaattttggtaggccaaggcggacggatcatttgaacccgggagtttgagaccagcctgggcaacatggcaaaaccccctctcttaaaaaaaaaaaaatgcaaaaattagctgggcgtggtggtgcatgcctgtagtcccagttcctggggaggctgaggtaggaggatggcctgagcctggggaggttgatgttgcagtgagccgtgattgcaccactgcactacagctgggccacagatcaagaccctatctcaaaagaagaaaaaaagaatttggcagccaggcacggtagctcacgcctgtcatcccagcactttgggaggctgaggtgggtggatcacttagggttaggagttcgagaccagcctggccagcatggtgaaaccctgtctctactaaaaatacaaaaattagctcgatgttgtggcagttgcctgtaattccagctactcgggaggctgaggcaggagaattgcttgaacccgggaggcagaagttgcagtgagtggagatcatgccaccacactccagccygggcgacagagcagggctccatctcaaaaaaaaaaaaaaaaattggctagagagggccagagacctggccaagtgcatggaaccacaggtggcccatgggcccatggggctggcatctgggtgttcagttcaggtctggggccagcagggcagaaccccctagaaccctgacttgctccaaagtcagacttgctccagagtctgtggccgccaccatcaccaccaccacrgagctgacttcctgggtttctctttcactttgacttgccttagggatgggctgtgacactttactttttttcttttttcttttttttcwgtcttttctccttgctcagcttcaatgtgttccggagtggggacggggtggctgaacctcgcaggtggcagagaggctcccctggggctgtggggctctacgtggatcygatggagccgctggtgacctgggtggtccccctcctcttcctcttcctgctgtccaggcagggcggtgagtcccctgaccctggcatggcggctcctcttgctgggtggaggcacgtgtatgtgtggagagctgtgggcctgctgtgtgggttggtttcatctctctgtgcctcagtctttcctgctgtcaaatgggagatgggcagtcatggcttctgggatcgaacttagacatctttcctctggtctagattttctcttctgtgaaatgcactaaattttttccacctcccggagttcaatgagaaaaaaaactaaggaaggaataaaaagcaagtatgtatctaataggtatacatagtatagtatcttatgtatgtagtttacaatagatagacatacataatataatgtatacagtcatttccatatttacggggcaatggttccaggaccctctgcagataccaaaatccaaagatgctcaagttcctgatataaaatggtaaagtatttgcatataacctatgcacatccttcyggatactttacttatttatttatttatttatttatttatttatttatttatttatttactgaggtagggtctcactctgtgtcccaggctggagtgcagtggcctaatcataactcattgcagccttgaccacctgggctcaagtgatcctcctgccttagccccttgagtagctgggactgcaggtgcacactaccatgcctggttaatttttttggtgtatactttttacagagacagcgtctcgctgtgttgcccaggctggtctcgaactcctgggctcaaatgatccactcaccttggcctcccaaagtgctcagattacaggcatgagccaccatgcccagccttcccatatacttttaataatctcaggccctgcacggtgactcactcctgaaaatccagcactatgggaggccaagatgggtggatcacttgaggtcaggagttcgagaccagcctggctaacatggtgaaaccccatctctactaaaaatgcaaaaattagccaggcttgatgatgggcacctgtactcccagctacttaggagctgaggtgggaggatcgcttgaacccaggaggcagaggttgcagtgagccgagattgcagcactgcattccagcctgtgtggcagagcaagactctatctcaataataataataataaataractttccttctctgtacactggggatcagcggggtgctgactttttcaatggctcttgagatgcactgagtgcctgtagaatgcccacagcagtgctggccacacctcaaggtcccagcgccttcaggggccaggcatggctggagaccagcagcagggagggggcgagaggcagcccacgaggtatcctggagatagtggcagtgagtggtcagtccagggaaagggaaggaggatgggctttaggctctcaggggtgggtgggtgggtgggggttctgtgtcatcacagagagagatggaaggatggagagccttgtgtgttaagcatctttcccccctcaaggttggacacttggggctgtttcctggggtgccgccttctcccccaaggcttccaatctgcctgcagggctcaggacaggtccttcttgtgggagtgagggcgccggggtcttcctgacccatccatggtggcatccccctccttctctcacccagttccacacctagcagactgtggcaatcccaaagggcacggggatcccagtggctgagggaggtcgctgcctcctggagaaatgttattaataattgccctgactgctagtgggccaagtgtgcttgcctgggccagccctggcaggcctctccctgccatgcaccctctactgtctttccccatgctggcttcagacactggtgccaccccaggcacacctccacttctctctgccctccagactgttggtcttactgttctttcctgcaggggtacctcccgagagtgtctcccaaatatgcatctcaacctctgaggactaaagggtggtggatgaatggatagacaggtggatgggtgggtaaatgaatggatggatgaattaataaatacatgtatgtatgtatgtatggatggatggatggatggatggatggatggctggatggatatatcggtaggtagataaatggatggatgggtgggtgtatggatgaatgaatacgtggatggatagatggatagattggtgactagatggatagatggatggttgggtgaatggataatggattaatgaatgcatggatgcatggataaatacatggatggatggatggatggatggactaatgaatacatggatggatgggtgaatgggtggatggtgggatggatggatggatggatggatggattaatacatggatggatggatgaatggacgaatggayggataaatgggtggatggtggggtggatgcatggattaatacatggattgatggatggatggatggatggatggatggatggatagatggatggggggtggatggatggatggatgaatacgtggatrgatggacggatggtggggtggatggatggatgtatgaatacgtggatggatggatggtggggcagatggatggatgagtagatggatgaatgaacacatggatggatagatggatgggtagatgcgtggatggatggatgaatacatggatggataaatacatggatggatgggtaaatgggtggatggtggggtggatggatggatggatggatgsatggatggatgggtagatgggtgcatggatggatgaatacatggatggatgaatacatggatggatgggtraatgggtggatggtgrggtggatggatggatggatrgatgggtggatggatgaatgaatacatggatggttggatagatggatgggtagatgagtggatggatggatgagtacatggatggatggatgggtagatgggtggatggtggggtggatggatgatggatgaatacatggatggatggatggatggatggatggatggatgggtgaatggatraattcatgggtggatggatgggtagatggtggacggatgaataaatacatggatggatgggtagatgggcagataaatacatgggcagatggatggatgggtggtggtaggagggtgcatagatgggaaagtgggtgggtgggagggctgatgatcacttgggtgtagaccccaaggctgagcccttctccccacacagtgcaaggccaggaatgtcattatgtcttcattgcctttgcagctgcctgcagaaccagtgagtgctgttttcaggacccgccatatccggatgcagactcaggttcggggcagttcctcattgttggctgaggattatgtakggctctgcctgaccccatccacagcggcccctcccatggcctccaccaccaggccaaagacccagccctgcctgtggtcttgggagtccccaccccaccacctgctggcccattcttaccaggttcaagttgccctggagtagccagccgcctctctgaacattatcacttccctagcatggtctcagggctggtgtctgtgtccgttcagattggtcggtacatgggagaaagtacctgttaagcattttgaagccccccccccaacctgataaattattagaacatttatttcatttatttatttttgagacggagtcttgttctgctgcccaggttggagtgcagtggcctgatcacagctcactgccacctccaccttccaggttcaagctattctccagcctcagccttccaagtagctgggattacaggtgyymgccaccacacscggctaatttttgtatttttagtagagaccaggtttcaccatgtcgcccaggctggtcttgaactcctgagctcaggtgatggtgagccacctgcctcagcctcccaaagtgctgggattccaggaatgagccaccgygcccggccatattgtcggaacatttatgctcctaatgcaccctgaaaagggtctgaacactaagcagacacgctgtccattcttttgtttgataacgatttactgagcatcttctatgtgcggacacagttctagacataggcaactggctatgagctcaactaacttcccaagaccacagcctagtggaagagatagacaacaggcaaacaaatgtctatcacaaatgtgatgatgtgttttgaagaaccagaggaggaaagytggggccctggggaccccccaaaaaaaaacaccagaggagggtgagggatagagagagaggtggcaggacatctggcctctgtgaggacaagttaggaggctgaggattcggaataggttgaggtgagagacggcaggggatgaggtaggaaggacgyggggagggtttaggctgaggtgacrctgaaagatgtaagcatcacaaagatttgtcttaggcacgaagacccctccagactctggtctgttcccaagcctacaggatctcttccaggctcggcctcgggccctagggacctgagatgctatcggatatccagtgatcgttacgagtgctcctggcagtatgagggtcccacagctggggtcagccacttcctgcggtgttggtgaggacccctctaccattcccaaaccctcacccaccatcccactcttgcttcaaccccctctggtgcccctactctcggatgcgtgatcttggctgggtcaacactccttcctgggcttcagtttctcatctaagaagagagagttggaggattgtggtggggggttggtcagtgaaggtaggcatcccagggtgggtggccatgagggtctctctagtccttttttcttcttcaccctttcacttatccacccatccaaccatccatccatccatccatccatccatccatccattttttcttttttctttttttctttttttgagatggagtcttgctctgttgcccaggctggagtgcagtggcatgatgtcagctcactgcaacctctgcctcctgagttagagtgattttcctgcctcagcctcctgagtagctgggactataggcacacgccaccacacctgctaatttttgtatttttagtagagacagagtctcaccatgttggccaggctggtcttgaactcctggcctcaggtgatccacccccccttggcctcccaaagtgctgggattacaagcgtgaggcactgcgcccagccctttcattcgtttcttcgctgtgtggtgcagtccttgctgggagatactggggtccctcaaacccctccagtcccagactgatctccaaggaacccccaggctgggggaggaggtgtacaagggacagaaaaggatgctgggggctgggcacggtggctcacgcttgtaatcccagcactttgggaggctgaggtgggcggatcacttgaggccagaagttggagaccagcctggccaacatggtgaaactccatctctactaaaaatacaaaacttagacgcatgtggtggcatgtgcctgtaatcccagctactagggaggctgaggtgggagaattgcttgaaccagggaggtggaggttgcagtgagccgagattgcgcgactgcactccagcctgggtgacagaatgaaactccatctccaaacaaacaaacaaacaccaaaaaaacgatgctgggatgtgatgcacaaagtcggctgtggggtccactaggaccccagactcggcactgacaccctccttcctgctgcagccttagctccgggcgctgctgctacttcgccgccggctcagccaccaggctgcagttctccgaccaggctggggtgtctgtgctgtacactgtcacactctgggtggaatcctgggccaggaaccagacagagaagtctcctgaggtvaccctgcagctctacaactcaggttagcaccttgttctccccmcgtccgttttttacccagagaggccatcaggctgcaaggctggagctagagaggattcctggcccttggcaagggacttgatactactagccattgtcacttcacgtagtgtcacgcaaacactattgtgacaaagcagtctttcatggtccccttaccaatcccctattcgtgggcacktagattgcttctggtttctctctgctagccataatgctgccaagacctggttgggttcttattatctgttctcatgactcgacatcatgtattttgccgggtgcggtggatcacrcctgtaatcccagcactttgggaggctgaggtgggtggatcacaaggtcaagagatcgagaccatcctggtcaacatggtgaaaccccatctctattaaaaatacaaaaattagccaggartggccacgcgcgcctgtagtcccagctactggggagactgaggcaggagaatcgcttgaacccgggaggtggaggttacagtgagctgagattgagccactgcactcctgcctggcgacagagcaggactccatctaaaaaacaacagcaacacacaaaaaagccaaaaaaatttgcctggtgtggtggtgcatgcctgcaatcccagctacccaggaggctgaggcgggagaatggcttgaatccaggaggcagatgttgcagtgagctaagatcaagtcactgcattccagcctgagtgacagagcaagacactgtctcaaaaaaaaagaaaaaaaagaaaaaagaaaagaaaagaatgaaggaaaacatgtcatttgccacaacatggacaaagctggaggacattacgctgagtgaagtaagccaggcacagaaacaaaaacatttcatgatctcacttacatgtataatctttttttcttttttcttttttttgagatggagtttcgctctgtcgcccaggctggagtgcagtggcgcgatctcggctcactgcaagctctgcctcctgggttcacaccattctcctgcctcarcctccccagtagctgggactacaggcgcccgccaccgcgcccggctaagtttttgtatttttagtagagacggggtttmaccgtggtctcgatctcctgacctcatgatccacccgcctcagcctcccaaagtgctgggattacaggcgtgagccaccgcgcccatcccacttacatgtataatcttaaaaaaaaaaagtcgaatatctaggcaccgaaagtagaactgtggttaccggggatggagagaaggaggaaatgggggagatgtaggtcaaaggaatacaatttgtagttacgcagcacaaataaatctagagttccaaggtacagtagagaactataattaaaaataatgtatattgaaaatttgctaaaagaatagatttaagggctgggtgcagtggttcacgcctgtaatcctagcacttcgagaggccgaggtgggaggatcacctgaggtcaggagttcgagaccagcctgaccaacatggtgaaaccccatctctactaaaaatacaaaaattagccgagtgtggtggcgggcgcctgtaattccagctactcgggatgctgaggcaggagaatcacgtgaacctgtggtatggaggttacagtgaaccgagatcacaccactgcactccagcctgggtgacagagcgagactccatctcaaaaaaaaaaaaaaaaattttaagtgttctcaccacacaccaaaaaagtaattatagaaggtgatggatatgtatatatatttttaagagatggggtcttgctgtgttggccagggtggtcttgaactcctgggctcaaatgatcctcctgtcttggcctcccaaagtgcttygagtacaggcgtgggcccctgtgcctggccatggatatgttaaattccttactgtagtaatcatttcactatggatatgtatatcaaaccatcatacctcttaaatttatacaatgatataaaaaaagaatcaggccgggtatgaccacggtgcagcaagactattttatgctaatttatgtctctccttrggtcaggttccttgaaatagatctaaaaactaagtacgatttccctgatagttctaaacaaacaaacaaacaaaaaaagaatkggctggacacagtggctcatgcctataatcccagcactttgggagcccgaggygggyggatcacccccaagagacaggcacttttgtaaaktgcttaccagaattgattaccctctggcaagcaatttacaaaagtgcccgtctcttcacagccttgccagcaatgggtgttaatattttaaagttatcttcactaacaggatcctgtgtataaatctttattaaaaatkatttatttttaaattttaatttaattttaatttgttttgagacagagtcttgctctgtcacccaggccggagggcagtggtgggatcttgtctaactacaacctccgcctcctgggttcaagcgattctcctgcctcaggctcccaagtagctgggattacaggtgcccaccaccatgcctggctaatttttgtatttagtagagacggtgtttcaccgtgttggccaggttggtcttaaactcctgacctcagatgatccacccaccttggcttcccaaagtgctaggattacagctatgagccactgctcctggccatatttgttgtttttttagagacaagttctccctctctctcctagattggagagcagtggtgtgatcagggctcacttcagcctcagcctcctaggctcaagagatcctcccatctcactctcctaagtagctggaaccacagtcatgaactaccatgcctggctaatttttatgtagagatgagggggtctcactatgttgcccaggctggtctcgaactcctgggcttaagtgatcttcctgccttggcctccyaaaatactggaattacagggtgagccaccgtatgtggcttgtgtataaatcttgactttttgatcataatataccaggcttagctgggacctgcaagtgtcccctaattcatatttagggattcagttgcttaccctggacagggtggattttcagggcccattaactcacatacgtgtgggctgcccctcgccaatccctacctctgcttccagttaaatatgagcctcctctgggagacatcaaggtgtccaagttggccgggcagctgcrtatggagtgggagaccccggataaccaggttggtgctgaggtgcagttccggcaccggacacccagcagcccatggaagttggtgagtttgtttcccaagtccagggtggacacgggcctctccagggcaccttcacccccaaatcagtctcaccatctctgcatctgtccccgctcccaaccagcccccactctagcccctgaggtggtttttttytttttcyttttttttttctgagacggagccttgctctgtcgcccaggctggagtgcagtggcatgatctcagctcactgcaacctctgcctcccgggttcaagcgattgtcctgcgtcagcctcccgagtagctgggattacaggcatgcgcccactaccacacgcagctaatttttgtatttttagtagagacggggtttcgccatgtgggccaggctggtctcaaactcctcaggtgatccgcccaccttggccttccaaagtgctgggaatacaggcatgaaccaccaygccttgctcccactaaaattttttaaaataaattttttcttttggaataaccttcgattttcagaaaagttactatataaactggtgcagagaacgcccatatatcctttacccaaactcctctaatgttaatgtcttacataaactccaggcattatttgaatgtcaccaatttttccaggaatgtcttttttctgctcccagattcaatccaggatcccacattgtgtttagtaaaataattattaatttttaaaatttagttataataattttttacygctttatatgttcctaaagaaggtttgaacctagagaaggttctctagtaattaaygatagaaataatccctggaagtatggtctttaatttaaaaaaatttagcgaggtgcggtggctcacgcctgtaatcccagtgctttgggaggccgagttggggtgggattgcttgaggccaggagtttgagaccagcctgggcaacatggtgaaatcccgtctctaccaaaaatgcaaaaattagctgagtgtgatggtgcatgcctgtagtcccaactactcaggagactgaggcgggaggatcacctgagccctgggaggttgaggcttcaataagccatgattgcaccactgcactccagcctagatgacagagtgagaccgtgtctcagataaataagtaaataaataactaattgtaaaacagcaaatatttttcagcaccaaaatgcaaaacaatatatgaatatgtttttattctagggcgactgcggacctcaggatgatgatactggtgagaataataatagtaatgacaacaacagctgcagcaaattggcattaattgagcacctactgtatgccaggtccaatgctgaatttttttgtatgcctcttaccctgccccatagttcagtattggattctttccaaattgcaggtggggaaacaaatcacgacttggagggggtgagaagcctttggccaaggtcacgaccgaagggatggccgcagccaggacttgaactgaggggcagggatggacgtgggtgatcctggaggccctaagaggacagggcctggcctgcttctgctgagcccccaggacccagcacgtggctctgtacacagttggagctcaataagcrcatgatggttaagtgactggtgccaagtcctggacaattcttacggcctgatgttcgacctgcctctccccagagtcctgcctctgccccctggagatgaatgtggcccaggaattccagctccgacgayggcrgctggggagccaaggaagttcctggagcaagtggagcagccccgtgtgcgttccccctggtaagatcactctgagtacaggaacaggggcaagcattagaaataaggcaacagccggaggtggtggtgcacacctgtagttccagctgctcagaaggctgaggcgggaggatcacttgaggccagtggtttgagaccagcccgggcaacatagtgagaccccatctctaaaaaataaaataaaatgggkctgggcgtggtggctgatgcctgtaatcccagcactttgggaggctgaggcgggcagatcacttgaggtcaggagttcgagaccagcctggccaacatggtgaaaccccttctctactaaaaatacgaaaattagctgggcgtggtggcgggagcctgtaatcccagctacttgggaggctgaggcaggagaatcccttgaacccgggaggtggaggttgcagggatccaagatcacaccactgcactccagcctgggtgacagggccagactctgtctcaaaaaaaagtaaaaaaaaaaaaaaaaagtaataataaaataaaatggaaaaagaaataaggcagcaggtattagaaacaaggtggtgagtgttagaaataaggcagagggagaaatgggtgctcaaaccctgacaatgtggcatccggtcttgctgcacccactttagggttttttgctgctgttttttttgtttgtttgtttgttgttttttgttgtttttttttttgagacggagtctcactctgtcacccaggctggagtgcagtggcgccatctcggctcactgcaagctccgcctcccgggttcacgccattgtcctgcctcagcctcccaagtagctgggactacaggtgtctgcaaccacgcccggttaattttttgtattttttagtagagacggggtttcaccatgttagccaggatggtctcaatckcctgacctcgtgatctgccctcctcggcctcccaaagtgctgggattacaggcgtgagccaccgcgcccggcctactgctattttttgttttgttttgagactgtcttgctctgtcaccctggctggagtgcagtggtgtgatcttggctcactgcaacctccgcctcacgggttcaagcgattctcctgcctcagcctccagagtagctgggatttacaggcatgcaccaccacgcccagctaattttgtatttttagtagagatggggtttcgccatgtttgcccggctggtctcgaactcctggcctcaagtgatcctcccaccacggtctcccaaagtgctagaattccaggtatgagccactgcgctcagcccactacagggctttatcaagtgagaatcatcaggctgaacctcacggtgtctcaaggacaatgtcacctgcaggtggcagggtktactaaacagctgctgccctgagcctgggcaacaggaaaatgagtgagagggtttcaaaccatgcagaaaggcctggcgctgtggtttatgcctgtaatcccagcactttgggaggccgaggccagaggattgtttgaggccaggagtttgagacaagcctgggaatcaaaacgagactctgtctctagtctataaaacaacagcaacaacaacaaaaccatgcagagaaatacatttgcattcaaaaaggaacttagaggccaggcgcagtggctcacgcctataattccagcagtttgggaggccgaggcaagtggatcacaaggtcaggagttcaagaacagcctgaccaacatggtgaaaccccgtctctactaaaaatacaaaaattagccggacatggtggtgcatgcctgtaatcccagctacttggaaggctgaggcaggagaatcgcttgaacccagaaggcagagattgcagtgagccgagatcgcaccagtgcactccagcctaggtaatagagtgagacttcgtctcaaaaarcaaacgaacaaacaaacaaacaaaaaaccttaggcaacatgagattacaggtggcagttatccctggggatgcaaattgtgttaatttttcttccttcagttttttctcttttctgcaatttggggcagcaagggattttcactttgtaaatgtggagaatccatcatttacaaagaaaacatccatcagtctttctctccttccaattcgtctagttggtttggttctgattgcagaaaaccccccacagcctcaggtgagattctcggtggagcagctgggccaggatgggaggaggcggctgaccctgaaagagcaggtaacggggctgtcacagggctgtggggtggcctgggatggggagcaggaggcaaaagcctaggcgggggatgagcaagtggtagatggagggagatgagatgtagaggtggcaggaagtgggcaaattgtgggtttaactctgaaggtaatagggagccatggagtgtgtgtgtgagcaggagaggcacatgactggactcagatgttcacagactttccctggctcctgtgtgagaaacagagtgtgggggaattgcacagaagccagaaggccaggaaggagataatggtgactgcatttgcctgggtagcagattattgctttaagtcccaaaacaacccattaagtgcagtctgattagtttacagagagggaaactgaggcatagagggagtatctctgttgaracaaaactgacaaatactccactcgttgactttaccatagtcatcttagtcaggtccctaatgggctgttactataaggctgtagcaaaaatcctttatttcctatgttcctctaactcaaattcctcttcttttttttcctttttttttttttttttttgagatggagtcttgctctgtcgcccaggctggagtgcagtggcgccatctcggctcactacaagctccgcctcccgggttcacgccattctcctgcctcagcctcccgagtagctgggactacaggcgcccaccaccatgccgggctaattttttgtatttttagtagagacggggtttcaccgtgttagccaggatggtctcaatctcctgacctcatgatctaccygtctcggcctcccaaagtgctgggattagaggcgtgagmccccgtgcccggcctctcaaattccttttctaaggaaaaattttctgcttgaggtaactgggttaaaagatggaaacatttttgttttcctgaatgtcagtgggttttgtcaatttcccacctccctcaagctagatgtgtgcgggaggtgaatgcctgtctcacagcagctttgccagcattgaggtttattattcttttaatttttgatgcatgttattggctgtggcctttgtccaagtctgtcttcataggctgtgccctgctgtctgcctatgggatgatgagtgtgatcaggtacccacaagctgtctttcatactcctgacagccaacccagctggagcttccagaaggctgtcaagggctggcgcctggcacggaggtcacttaccgactacagctccacatgctgtcctgcccgtgtaaggccaaggccaccaggaccctgcacctggggwagatgccctatctctcgggtgctgcctacaacgtggctgtcatctcctcgaaccaatttggtcctggcctgaaccagacgtggcacattcctgccgacacccacacaggtgcctcctctgggtggggaggkcggtatgagggcccctcagagctgagcacctactctgagcctcagctagaccagggtgagaggagcgaggcagaaaattttaaaggagtgcctgatttaggggtgtatcaaaaattcagtaatcagcyaggcacggtggctcacacctgtaatcccagcactttgggaggctaagacaggtgaatcacctgaggtcagcagttcgagaccagtctggccaacgtggtgaaacccagtctctactaaaaatacaaaaattagctgagtgtggtggctgtagtcccagctacttgggaggctgaggcaggagaatcgcttgaacccaggagccagaggttgcagtgagccaaaattgtgccattgcactccagcctgggcaacaaagagcragactgtgtcaaaaaaaaaaaattcaataatcaagatccataatgcagttttttgttgttgttggtttgttttttttaagagacagagttttgctaygttgcccaggctggacttgaacttctgggctcaagcaatctttctccctcagcctcccaaatagctgggaatataggcatgtgccatcatacctggctattatgcattattaaagaacaacaacaaaaactagctgagccactgcgytccaccctggttgatagagctacactctttttcaaaaaagaaaaaagagagaaagaaagaaaaaaggctagagttgaccctgtgtttatttaagatctaatttcttttttttcttgtgacagatggcatgatctcagctcactgcaacctccgccttccagattcaagagattctcctgcttcagcctcccgagtagctgggattacaggcatctgccaccatacccggctaattttgtatttttagtagagacggggtttcaccacgttggccaggctggtctcgaactcctgacctcaagtgatccacctgccwtggcctcccaaagtgttgggattataggcgtgagccaccatgcccagcctaatttttgtatttttagtagagatggagtttcaccatgttgcccaggctggtctcaaactcctgccctcaggtgatccacccacctcagcctctcaaagtgctgggattacaggtgtgagycactgtggccgacctactatttttattatttttgagctaggttctcagtctgttggcagactggagtgcaatcatggctcactgcagccttgaactcccagactcaagtgatccttccacctcagcctctggagtagctgggactacagacatgcaccaccacacctggttaattttttatttttattttttgtagagacaggtgtctcyctacgttgcccaggctggtctcgaactcctgggctcaagtgatccacccatctccacctcccaaagtgctaggattacaggcgtgagccaccgtacccagcctggtcccatatcatagtgaaatggtgcctgtaaagctctcagcattggcttggcacatgcagttggtactcaataaacggctgttgctatccccagaattgcaagcagtatccatctctctgacattcatgaagacgccctggcgggagggagtgggagagatttgcccagggactgagtgggtgtgtrctcgtgcttctgagtttggcatgagaccaccagtggcgccggtcaggccagggaggcctagtcttgcatcacactctccgcctaggctaggcaagtggtgggcagccaggtatctgccacagccggagacgcctacaaggctggaagtgggtgtaatggcagtacaggaagctctcatggtgaatatcctggcaaggagacagcagttaggctggaggaggactcagctcattcaaacaccacctgctgactggatgcggcggattaygcctgtaatcccagcactttgggaagccaaggcaggtggatcactggaggtcaggagttcgagaccagcctgggcaacacggtgaaaccccatctccaccaaaaaataataataaattagccaggaaatggtggcgcatgcctgtrgtcccagctactcaggaggctgaggcaggagactcatttgaacccgggaggctgaggttgcagggagccgagatcatgccactgcactccagcctgggcgacagagcaagaatccgtctccaaagaaaaaacaaaaaaaaacaaacgccatctgctacccactttgtgcctggccccaaggcagcctccagtgcagggaaacagccaaacacagacayccctggccctgtagggtcaggggtatagacgagagggtgggagagaggctgcaggagccagagaaggggactggggagagagatggcaactgtctcgatgcgtctctcccctctccttccagaaccagtggctctgaatatcagcgtcggaaccaaygggaccaccatgtattggccagcccgggctcagagcaygacrtattgcattgaatggcagcctgtgggcyaggacsggggccttgccacctgcagcctgactgcgccgcaagacccggatccggctggaatgggtaatggcctggaatggcctgcgcctacccctcctctgtgccctcccttttaggtcctggtgggttcaaacctgcagggaaggcacacagygggtgtctaagkcccagagaggtgttgcygcttactcaatgtcatacagaggtagggacagggtgaggttyggagcctctcacccatatgggtctggaacctcttgctggcatcctgagctcagttccaggcagatcacacacatacaggtaatgaatctcacatcccaaggtgtttgttaaatattcaaccncgccagggaaggtggcagttcgcgagatgctggtggcaaattaatgagcagtctttarggaaaggggggccgtgaggctcaggtggcctctcactctcycgcttcctgctctgggccttgccagagccccagaaagcctcagcctcagcctgttccttgaagaatacacagcctgaggagacagaactggacacggaacccctgaccccattgtccgggcaaggtggctaacacctgtaatcccagcactttgggaggctgaggcaggtggatcaacagaggtcaggagttcgagaccagcctggccaacatggagaaaccctgtctctactaaaaatataaaaattagccaggcatgatggtgtgcacctgtaaatcccagctactcaggaggctgagacaggagaatcgcttgaacccgggaggcagggattgcagtgagtcaagattgcgctattgcactccagcctgggtgacacagcgagactccatctcaaaaaaaaaaaaaaaagaagccctggttccatggagtaagggctgggttagagggggatggggatggggttgggggtgttgcatagggaagagatcttggaggaggggatattggtgcaagggctttgaaacatgagtaggagttttctgggggttcctggcaratggcacagccagtgcaaaggtgcagaggtgggaacacaatctactgaatggcctggcctttgcttatccttccagcaacctacagctggagtcgagagtctggggcaatggggcaggaaaagtgttaytacattaccatctttgcctctgcgcaccccgagaagctcaccttgtggtctacggtcctgtccacctaccactttgggggcaatggtaagtgacccaaacctgcaggtttacattattttttctttttaaataatttaaaaaaatagaggctgggcacagtgactcacrcatgtaatcccagcactttgggaggccaaggtgggtggatcacctgaggtcaggagtttgaaaccagcctggccaatgtggcgaaaccctgtctctactaaaaatacaaaaattagccgggtgtggtggcgggtgcctgtaattccagatacttgggaggctgaggcaggagaatcgcttgaacccaggaggcggaggttgcagtgagctgagatcatgccactgtactccagtctgggtgacagagcaagactctgtctcaaaaaaaaaaaaaaaaaaaaaaaaaaggacaatgctgttaaggcagacagaatggctcacccctgtaatcccagcactttggcactttgggaggctgaggcttgtggatcacttgaacccaggagttcaagaacagcctgggcaacatagcaagaccccgtctctacagaaagaaaaaagtttgccagccatggtggcatgtgcctgtagtcccaactactcaggaggctgaggtggkmagatcacttgatcccaggagtttgaggctgcagtgagctatgattgcaccactgcaatcatacaacctctgcctcccgggttcaagccattctccttcctcagcctcctgagtagctgggattataggtgtgcactaccatgcctggataattttttgtatctttagtagagacagggttttagcatgttggccaggctggtctcaaatgcctaacctcgtgatccacctgccttggcctcccaaagtgccgggattacaggtgtgagccactgcgcccggccagcattgtccattttatagataagaaaactgaggcccagggaagggaaatgacagtgactgagtggcagaaccagaattaaaacccagctcacctgactctgtggccaatgttacctccgtctctggacagtgggaggctgggcattcaggaagtgctcaaccagcactccttttttttttttttttttttttttcttgagacagagtcactctctgtggcccaggctggagtgcagtggcacgatcttggctcactgaaacctctgcatcccgggttcaagcgattctcgtgcctcagcctgccgagtagctgggattacaggcgcccaccatcatgcctggctaatttttgtagttttagtagaaacagggtttccccatgttcctcaggctagtctcgaactcctgaccttaagtgatctrcccaccttggcctcccaatatgctgggattgcaggcatgagccatcgtggctgggctttttttttttttaaagacagggtcttgctctgttgcccaggctggagtgcagtggtgccatcttggctcactgcaacctctgcctcctgggctcaagtgattctcctgcctcagcctcctgagtagctgggattacaggtgtccgccaccatgcctggctaatttttgtatttttagtagagaaggggttttgccatgttggccaggctggtcttgaactcctgrcctcaaatgacttacccacctyggcctcccaaagtgctgggattacaggtgcgagccactgtgccaggcctcgaccagcattcttggtgttgactatgacaatggtactggttgcagcctcagcagctgggacaccgcaccacgtctcggtgaagaatcatagcttggactctgtgtctgtggactgggcaccatccctgctgagcacctgtcccggcgtcctaaaggagtatgttgtccgctgccgagatgaagacagcaaacaggtgtcaggtacgtgaggcagtgcagacctggcttggggaggaagggaggatcctggcctgtgatctctcttgctgtgtgaccctgggcaccttgccgtccttctctgggccttggttatcaaacccttaaaacaagagaattggctgggcgcagtggctcacgcctgtaatcccagyactttgggaggccaaggcgggcggatcacctgaggtcaggagttcaagaccagcctgacmaacttggagaaaccccgtctctcctaaaaatacaaaattagccgggcatggtggcacatgcctgtaattctagctacacgggaggctgaggcaggagaatcgcttgaacccaggaggcggagattgcagtgagccgagattgtaccastgcactccagcctgggtgacagagtgagactctgtctcagaaaaaacaaaaacgaaaacaaacaaacaaaaaacaaaaacaagagaattagacttgagggtcttttttttttttttttwaattttatagacagggactcactctgtgcccaggctggagtgcagtggtgccatcatagctcacagcagcctcaacctcctgggctcaagcgatcctcccacctcagcctccctagtagctggaaacacaggtgcacaccaccatgcacagttaatattttattttttgtagaaatgaggccttgctatattgcccaggctgggattttttcttttttttctttttgagagggagtctgtctctgtcacccaggctggagtgcagtggcgccatctcagctcactgcaacctctgcctcccgggttcaggcaattctcttgcctcagcctcccaagtagctgggattacaggcacccaccaccatgcctggcaaatttttgtatttttagcagagacggagtttcaccatgttgaccaggctggtctcaaactcttgacctcaggtgaatcacccgccttggcctcccaaagggctgggattacaggtgtgagccacygtgtccggcctcgctcaggctggtttcaaacttctggcctcaaactatcctcccaccttggcctcccaaagtgctgggattagtcatgagcacccagctgaacttgagggtctcgatcaccccttgcagaccctggagaaggctgggtgggcaccagccaagtgcttatggtgtattggattcatccatgggaagctgcccctcacatgtagcagcagctgaactctcatcaagcagggatgactgtctccattccacagatgaggaaacyaaggcctggaggggggatctgatgagggacaggaaagcccacaaaacagggtttagccaggagggtttttggctttccccaggaaagagttcaagtgcatgtcggtggtgttagacagaaacttttactgaagtggccgtgtagagcagcagcagaagtcctgctccttgcagagtggggacgccccacaggcagggcagctacgtctcatatttatacccgcttttaattatatgcaaatgaaggggcggtttatgcagaaatatctaggatgaaggtagtaacttccgggttgtgggatcattgccgtggacaggggcggtaatttccgggtgttgccatggtaatggtaaactgacatggcacactggtgggcgtgtcttatggaaagcccaggacctgctttagctagtcctcagtttggtcctgtgtccaagccctgcctccagagtccaatcctgcctccaacctcagatccacctgcccaaagatccaacaagtcagccggacgcggtggctcacgcctgtaatcccagcactttgggaggctgaggcgggcggatcacttgaggccaggagttcaagaccagcctggccaacatggtgaaacctcatgtgtattaaaaatacaaaaaattagctggctatggtggtgggcgcctgtaatcccggctactcaggaggctgaggcacaagaatcgcttgaacctgggaggtggaggttgcagtgagctgagattgtgccactgcactccagcctgggcaacagagtgagactccatctcaaaaaaaaaaaaaatcttgagatgaatgggcgcattaagagaagagattttaggttgggcttggtggctcacrcctgtaatcccagcactttgggaggccgaggtgggcagatcacgaggtcaggagatcgagaccatcctggctaacacagtgaaaccccgtctctactamaaatacaaaaaattagctgggcgtggtggcgggcgcctgtagtctcagctactcgggaggctgaggcaggagaatggtgtgaacccaggaggcagagcttgcagtgagccgagatggcgccactacactccagcctgggcgacagagcaagactccgtctcaaaaaaaaaaaaaaaaaaagaaagaaagagtagagattttagcaaaatgcctatgaatccccaccccacccacaggctgtggtagcccagcctggcctctgaggagtaaagaggtcccaggactcagggttgcctctcccactgcagagcatcccgtgcagcccacagagacccaagttaccctcagtggcctgcgggctggtgtagcctacacggtgcaggtgcgagcagacacarcgtggctgaggggtgtctggagccagycccagcgcttcagcatcggtgagtggagggggtaggacccagttatttacccagcatgcactgcactgcgcttcccacaatgatcttagcagccctgccctcactctcactccctctatggctccctactgccctcaggagaaagtagcagctcaaactgctcccattgccttctctcgcagcttcctctcacactccaggagccttgcccatgcaggcccttccctgcctcctgcctggaatgtttgttttccacacggtccaactcctattcgtccttsaaaactcagctcaaaagttccctcctccagcaagacttctctgccyccttctggccatgcccttgtttacaactgtcccttctccctggtctgacactgcggggttggggtagatgtgtcaaggtatctgggggctcttggggaggaggaagatgcaggaatctgttcattgagcgacaaataaatgaatgcaaaaataaggaggacacaggcaaaacccggtgtggtggctcacacctgtaatcccagcactttgggaggctgaggctggaggattgcttgagccgaggagttcaagaccagcctgggcaacatggtgagacctcatctctacaaaaaatatttttaaaatagtggggtgtggtggtgcacacctgtagtctcagctgctcaggaggctgaggtgggaggatggcttgagaccaggagttcaaggttgcagtgagccgtgactgcaccactgcactctggcctgggcgacggagcaagaccctgtctcaaaaaaaaaaaaaaaaaaaaaaaaaaaaaaaaaaaatagaagaagaagaaggagaagaaagaagaagaagaggaagaggaatagaagaagagggaggaggaggaggaggaggaggaagagaacaacacaggctctgttgtcgggtgcatggttataagagattcagagatcaaatgatccctgttcatgccacggtgtcctttcagttccaagagaaccaactggaacccagagaacaaaagagtcagggttggtggggggcaggcaggcctgggtccaggggcagccacatgtgccctatgtgcaggctcctggaattacrgagtctttttttatctttttgagacagattttccctcttattgccgaggctggaatgcaatgatgcgatctcggctcactgcaacctccgcctcccgagttcaagcgattcttctgtctcaccctcccaagtagctgggattaccggcgcacaccaccacgcccagctaatttttgtgtttttagtagagacaggtttcatcatattggtcaggctggtctcgaactcctgacctcaggtgatcagcccacgttggcctcccaaagtgctgggataacagtcatgagtcactgtgcccggcctggaattacagagtcttgaacacttcctgcatgccaggcctttatttcttgacagctaccgggcaggtgggttctgtggtctcccagtgagaagcccgtggcatgtgcaccaggatcagcagcaagttcatggagaaaccaggccctcctagctccttccctgaggaagaggcaggaggtagccctctgccaacccacgctctcccacctcagaagtgcaggtttctgattggctcatcttcttcgcctccctggggagcttcctgagcatccttctcgtgggcgtccttggctaccttggcctgaacaggtaactgacacctcttaccgttaccatagcgatggtaatgatgctgggcaggggagccctaaagtggagcttagcccgcagattgggtccttggctttgcccaggaaataattcaagggcaagccagaggtagaagaaaacagctttattgaagcagcagttatagctccgtgactgcctctgcagagcagggcttccctgtaggcggagagtagccgctgagagcggttttgcagtcagatttatacttacttttaattgcatgcagattaaggggggcagtttatgcaaaatttctttcttttttttttcttttttgagatggagtcttactctgttacccaggctagagtgcagtggcacgatcttggcttattgcaacctccccctcccgggttcaagccattctcctgtctcagcctcccaagtagctgggactacaggtgcgtgccatcacacccagctatttattttgtattttcagtagagatagggtttcaccatgttggccaggctggtcttgaactcctgacctcaggtgatcctatgcagaaatttctagggaagggatagtaacttttgggtccttggtcattcccatggaaaggggcggtgacactggtgggcatgtctgattgaaagctgctttcaagccgggcacggtggctcactcctgtaatcccagcactttgggaggctgaggcaggcagatcgctttaggccaggagttggacaccagcctggccaacatggcgaaacctctctctaccaaaactacaaaaattagccgggtgtggtggcacacgtttgtaatctcagctactcaggaggctgagtcaggagaatcgattgaacccaggaggcagaggttgcagtgagccgagatcgcgccactgcactccagcctgggcaacagagcaagactccgtctccaaaaaaaaaaaaaaacctcagctcctctcactggtcccctttcctccccagggccgcacggcacctgtgcccgccgctgcccacaccctgtgccagctccgccattgagttccctggagggaaggaggtaaggatgccttttctaattccaagtctttttattgggtgcacaygctggacaagggttacgcattagctcattttattctctcccaattcatcaaggtaaggactccaaaaccagtgctccataccccttcccattttaaagacaggcaggcagaggtccatttcctggcactagaaacagaattcaaagtggctttattataaaggaaacctgatggaaaaaatcccaagggaatgggcttcagatatgcctgaatccagcgattggggtctatctcggagctgcccgttcagggttcttccgcaggcaggctgagccttctctgattggaagcagggtgtccattttccccattaactggggcaaaagtctcagggccatcactgattggtccagcttgggtcacatgcccttccctgagcctatggctagaaccagaggggtagggaagggtctgatgggtgggctggccagggtcacatgaccattgctagagctgaggtggggtcactgcactgtcaaccacaccatctgtgaaaagagggagggaaatttcccaaagacagatgggagtgytcttcctaagaggggctgaatgggagtcagtgcggcagactccatcctcaaatcggtctcaggatatatggagtctcgctctgtcacccagcctggagtgcagtggcgccatctcggctcactgcaacctctgattcccgggttcaaacgattctcctgcttcagcctcccaagtagctgggattacaggcgtgcgcaaccaagctcagctaatttttgtatttttagtagagatggggtttggccatgttctccaggctggtctcaaactgctgacctcaagtgatccacccgcctcagcctcccaaagtgctgggatgacaggtgtgagccactgcacccgtccaggtctcaggatgttagagaatttaaccagcagtgacctggtccrttccatcctgctgtggatgggaagtagagctctgctcacagctgtggccctaccctccctctgcagacttggcagtggatcaacccagtggacttccaggaagaggcatccctgcaggaggccctggtggtagagatgtcctgggacaaaggcgagaggactgagcctctcgagaagacagagctacctgagggtgcccctgagctggccctggatacagagttgtccttggaggatggagacaggtgcaaggccaaggtcctggggcccagtgggccagacggtcaggggtgcaaccctgccckgggggtgggggggctagacatccatcgctcctgggatatcagggcctggaggcctgagggagaaacgaaaacatccactttgtcttacagacacgaagagcgactatctcaatcacaacggctggttattaagcacttatggcatacccagcccattccatccactcacatgattccctaccaaatccctacaaccaccccctgaaaggaaccatgactgttgtactttacagatgtgatcgttgaggctcagagagggtgagtgactcgccygaggctacgtagcacacacaggagtcacatttggacccaaataacccagagctcctccaggctccagtgcacctgcctcctytytgccccgtgcctgttgccacccatcctgcgggggaaccctagatgctgccatgaaatggaagctgctgcaccctgctgggcctggcatccgtggggcaggagcagaccctgccatttacctgttytggcgtagaatggactgggaatgggggcaaggggggctcagatggatccctggaccctgggctgggcatccacccccaggagcactggatggggagtytggactcaagggctccctgcagcattgcggggtcttgtagcttggaggatccaggcatatagggaagggggctgtaaacwttgtgggaaaaatgacggtcctcccatcccaccccccaccccaccctcacccccctataaaatgggggtggtgataatgaccttacacagctgttcaaaatcatcgtaaatgagcctcctcttgggtatttttttcctgtttgaagcttgaatgtcctgctcaaaatctcaaaacacgagccttggaattcattcattcattcattcattcattccacatatatttattaatctcttcctctaggtctcctccaggagcacctaatccgggggagacagagccggatgagagcttggaaccctactaagttaggactgagcaggggaagggacggcctaggrggagtggagcagccgggcactccggtaacaggaaccgtggtttgcccccacgctccttcctcctcacgcccaccaactcgcagcaggacccttgccccccttacacaccctgaatcctccctctttctgcccacactgccccacctccctcgcgttctgcagccgcctccccctgatccccactgcggtctgagccgaggtgtgggggggsgctcctgaaatcccaccccagccctggcgattagcgggtagtccagattctccccatggccaccaggtggcaacagcggcgcgcgtttccccggccgggcccgccctgcctcctcccaccgcgtttgctmaacagacttttccggtttcagacagaggaggggagttaaaaagcccagaactactgaattttgtggcaaaaaaaggatgagacctctcggggagagacccctggcagccaatagggccaggaggcaagaggcccaggccccgcccctttggtctgggggcctccctttccccatcgatgcatctagatagggaaacagaggcctggatctcggtgccccagccacacggtggctggtcagagttctgcaaatgccccccgccccgctccggatctgccacatcccagcttctgctcaagccgttccctccaccaggcatgccctcccttgagcgtttatcctcctttcttttttctgagacggagtttggctcttgttgctggagtgcaatggcgcgatcttggctcacggcaacctcccgggttcaagcgattctccygcctcagyctcccaagtagctgggattacaggcgcccgccaccctgaccagctaaaatgtgtttgtatttttagtagaaacagggtttcaccatgttggccaggctcgtcttgaactccagacctcaagtgatccacccgcctcggcctcccaaactgctgggattgcaggtgtgagccctggaggcccctggagttggcygcaaacccacccctatgcacagtcccttgggtgcgagaagtaggagacaggcaatgtttactggcagcagctgggacttttgccagagtgcatggggaagatgcacaccctgcttccactagcgggagactgagctggacagagggaagcctggagcttggagcctctttccttcctaccgtggggatgcctgtctgagagaggagcctgcagggaggacagcagcaccgagatgaagcattagttcctggatccagccatacctgaaacccaatattttccatctggttcctstttttaaaaaatattttaggccgggcatggtggctcacgcctgtaatcccagcactttgggaggcagaggcgggctgatcacctgaggtcaggagtttgagacaagcccggccaacatggtgaaaccccgtctctactaaaaatacaaaaattagctgggcgtggtggcaagcgcctataatcccagctacttggkaggctgaggcgggagaatcgcttgaacctggaagggggtggttgcagtgagccgagattgtgccactacactccagcctgggcgacagagcgagactccgtctcaaaaaataaataaataaataaataaataaataaatattttttwttatttwttgtttcttttttgagacagggtctcactctgttgcccaggctggagtgcagtagcaccatcttggctcactgcaacctccacttcctaggatcgagtgatcctccagcctcagcctcaggctcaagccttgttgccaaggttttgccatgttgcccaggctggtctcgaactgctgagctcaaatgatccacctgmcttggcctcccaaagtgctgggattacaggcatgagccactgcacccggcctcagttccctgtttgatgaagccactttgagtccttcttctgtccctagaaaatgaccaacaggaggttctttctgggcctctgcttayccgtctataaaataggaagggrtttggagtccttttctcaatgggcccagcaagtttgcttagctgggccctggcctggtatttattgagcaactgctatgcaactattactccagggctcctcagagcagccattgcctcagcttctcccagcagctccaggagtcaggatggtgttagyccccatttcacagctcagtttcattcattcatttaagaaatcagggtcyggcgyggtggctcacacctgtaatcccagcactttgggaggccaaggcgggccgatcgcttgagctcaggagytcgaggccagcctggccaacatggtgaaaccccgtctctactaaaaatacaaaaattagccaggtttggtggcacatgcctgtagtytcagctacttgggaggctgagggctgaggtgggagaatcacctgarcctggggaggtcaaggttgcagtgagctgagatcgcgccactgcactccagcctgggtgacaaggtgagaccctgtctcaaaaaaaaaaaaaaaaaagccagcattgagtgcctactgtataccaggccccatcttgcacaagtcaggatcttcctggtcataaggggctcttagctgggtggggaaggcagacactaatctaattatcactcagagagttatgagaaaccgtaagagtgatgagtggggatrtgaggagtagccagtgagrgagggcttcctggaggrggcaatgctaggaccaaggtggtaaagaggggccagaagagggagtgcaaaggccctgaggttgctggtggrgaatggacgggggatgggggaagaggttgtagcccacgtgaggctgggggcatrtggaccagagctgttttttttcttttgagatggggtctcgttctgtcgcccaggctggagtgcagtggcgtgaccacagcgcactgcagsctcgacctctcrggctcaactgttcctccttcctcagcctcctgtgcagctagaaccacaggcacgtgccaccacgctcagcttagtttatytgattatttgtagagacagagtctcaccatattgcctgggctgatctcaaactcctaggctcaagtgatcctcctgtcttggcctctcaatgtgctgggattacaggcgtgagccactgtacccgtgggctaggtttttttttttttttgagatggagtctcgctctgttgcccaggctggagtgcagtggcgcgatctaggctcacygcaagctctgccttccgggttcacgccattctcctgcctcagcctcccgagtagctaggactacaggcgcycgccaccatgcccggctaatctttttctgtttttagtagagacggtgtttcaccatgttggccaggatggtctcgatctcctgacctcgtgatcygcctgccycgkcctcccaaagtgctgggattayaggcgtgagccaccgcgccyggcgggctagggttttattcttgggttgtggggtcctggagctggagagtcaggtcctgacgggtgagaggttcagagtttattctggctgcagttcagctgggagttttctggctgcagttcagctgggagtaagtgattcatcttgtgggcctcagttttctggtccataaaatggatgtggtcaggcagcctctccagagcccctgcccctcttcccacctcccctcctctgtctctgtctttcctgatccatcttttcccttctccatggctcccacctactgggtgggaagcgtgtctccatcagagagataggctgcctcagtttaccttcccaggtaccttccttctctatctctccagtagcctctgggtttggtcagaaacagatgttgtctctgcctctgcccttcagccgggatgggactgaggtgtcaggtttctgggaaccatgagctgcaggagatgacccctggactcagggtagcccctggcctggcccctgatactttattatctgtgccccagatgccaggccctctgcccaggaaggcccttcttccaactctgccctctgcccatttctctctctctcttttttaactcatttctttcatttaaaaaaaaaatttaaagtagaaacagagtcttgctatgttgtccagaccaatcttgaactcctgggctcaagcaatcctcctgtctcagcctcccaaactgttgagattataggcacgagccactgagccccagccttattcctctttttttttttttttttagatggaatctcactctgtcgcccaggaggctggagtgcagtggcgtgatctyggctcactgcaaccccacctcctgggttcaagcaattcttctgcctcagcctctggagtagctgggactgcaggcaccyaccaccaagcatgcatggctaatttttgtatttttgctagggacggagtttcaccatgttggccaggctggtctcaaactcctgacctcaggcgatctgcccaccttggcctcccaaagtgatgggattacaggcgtgagtcactgcgcccggccattcctccttttttaagatacattcacacaccatacrattcaccctcttaaagtgtacagttgacactgagcgtggtggctcatgcctgcaatcccagcattttgagaagccgaggcaggaggatcacttgagcccaagaggttgaggctgcagtgaaccgtaattgcaccactgcactccagcctgagtgacagagtgagaccctgtctcaaaaaaaaaaaaaaaaaaagtayaattcagtggtttttgtacaatcacaaggttgtgcagccatcactcatacctaattstagaacattttcatctccccaaaaagaaaaccttgtgccatcagtagccactccccgttcccctcccccagcccctggcagccactaatctgcttcctgtctctatggatttgcctgttctgggcatttcatatcaatgaaatcatacaatatgtggcctttctgtctgttcttttgtgaaagaaactcagatgtttttgaaacgcatcctcattatagtgtgtgtcagggtttcgttcyttttgatggctgartagcattccattgtgtggatgtgtcactatttatttatccactcagccatcaatggacatttcggtggtttccattttctggctattgtggatagcgcagctctgagagtttgtgtacaagttttggcgtaaacacctgttttcagttttctccgtatacatctaggagtggaatcacagagtcatatggtaattctgtgtttaacttctggaagatctgccaaagttttccacgtcagctgtaccatttcacattccctccagcaaggcatgggggttcaaatttctccacatcctcatcaacacttgctattttcctttttcttttctttttttttttttttttttgagacaggatctcactctgtcacccaggctgcagtgcagtggcgtgatctcggatcactgcaacctctgcctcccrggttcaagcgatcatcctygtgcttcagcttcccaagtagctgggattacaggctcttgccaccatgcccggctaatttttgtatgtttactagagacagagtttcaccatgttggccaggctgttctggaactcctgagctcaagtaaccctcccacctcagcctcccaaagtgttgagattacagacgtgagccactgcgcctggcctcctttttcttcttatccttctccttctcctcctcctccttcttcttctttttgatgttctgatgccaaggctggagtacagtggcgttatcttggctcaccacaatctctgtctcccagattcaagcgattctcctgcctcagcctcccaagtagctgggattacaggcgttagcca

SEQ ID NO: 10018 - DNA, 65885 bp, Homo sapiens
tttcaagctatccttctacctcagcctctgatatagctgagacacaggccaatgccaccatgatgcctggcttttcttttttttttttttttttttacttttgagacagagtcttgctcagtcacccaggctggagtgcagtggtgcgatttcagctcactataacctccgcctcctgagtttaagcaattctcctgcctcagcctcctgagtagctgggattacagacatgcaccaccacacccagctaatttttgtatttgtagtagagatggggtttcaccatgttgkccaggctggtctcaaatgcctgaccttaagtgatctgctggcctcggcctcccaaagggctgggattaccggcgtragccaccgcccctcgaccatccagctttttttttttttttttcagtttttggtagaaatgtggtctcatgcctgtatcccagcactttgggaaggccgaggtgggcagatcacttgaggtcaggaattcgagactagcctgaccaacatggagaaaccccgtctctactaaaaatacaaaattagccgggcatggtggctcctgtctgtaatcccagctacttgggaggctgaggcaagagaatcacttgaacctggtaagcggggtttgcggtgagccaagatcgtgccattgcactccagcctgggcaacaagagtgaaattctgtctcaaaaaaataaaataaaataaaaatacaaaattagccaggcatggtggcacgcgcctgtaatcctagctactcaggaggctgaggcaggagaatcgcttgaacctggtaggcggaggttgcagtgagctgagattgtgccactgcaccccagcctaggagacaagagcaaaactctgtctgaaaaaaaaaaaaaaagaaatgtggtctcactatgttgcctaggctggtctcaaactcctggtctcaagggatcctcccacctcagcctcccaaagtgctgggattacaggcatgagccaccgctcccaaacagattagaggatgttttaaggaagactcaggaggttaccaagaaaaaagttcattcaaccaccacacttcctgatgtcccttatagagacatgtgaggagagttttgatgggtacatagaagctcacaagaataaaatgtatttgttcattcaatacaaggtcctctgatacttctcaaagagaatttgaagtggattttgaagaatatatagatgttaggccgggcrcagtggctcatgcctgtaatcctagcactttgggaggctgaggtgggtggatcgcctgaggtcaggagtttgagaccagcctggcaaacatggtgaaaccctgtctccactaaaaatacaaagattagccgggtgtggtggcaggtgcctgtaattccagctactcgggaggctgagcgcaggagaattgcttgaatccaggaggcggaggttgcagtgagccgagattgctccactgcacttcagcctggscaacagagctggacttttgtctcaaaaacaaaaaacaaaaaaacacaaatatatatatwtatatacttgtgtgtgtgcgtgtgtgtgtgtgtgtgtgtgttaaccayagaaaawctgcattcattcattcagtcagtccagtcagtcactcaataagcactccttcttgcccactgaggggttgttcaggaggcagttcagtgtaggaattctccagatggagcagcggatttgagacctctctggtggctctctccagcatgttcccacatgcccaacccaaccctggttcagggaacctctctttccccaggattccagtcaaagccccagggagggctctgataggctgagcttgggtcacatgtacaccttgaaccaatcacagtggctgaggtggataaacgagtctgagtcacatgtccaccccaggctggactaagggagaactttgaggcagagctgcccagagtcagaacaattggccattgcaggacatgagcttctcatcacttggggtgtgcaagctacagcctgaagttcacttagtgtaggactgccagataaaacacacgacttccccacccccattgacttctgccttctcagggaccttcagcccgaagagtggggagcttccctccatgtggccaagagaccctgatgcccctgaggggtcatctaaagagggtgttgaaggatgcataggagtttgccaggagaaaatctattcattcatttaacaaactcactcgtagtcattattcattaaataacatttaaattaaattcccagttaaattggaatttcagacaaccaacatattggtttgtgttttgttttgtcttgttttgttttgtttgagatggagtctcgctctgtcacccaggctggagtgcactggcactatctcagctcactgcaacctctgcctcccaggttcaagtgattctcctgcctcagccccccgagtagcggggattacaggcgtgccccattacgcccccttaatttttgtagttttagtagaracgcggtttcaccatgttgcccaggctggtctcaaactcctgacctcagatgatccacccacctcagcctcccaaagtgctgggattacagacatgagccagcacacacggccaacacattgttgtttaatgcaactatgtcccaagtactgaagggggcatacttacactgaaaaaacattcattgtttatggaaatttaaatttaactgggtgtttgctttggaaaacagcctggttgtcttttacaaatttaaaayatagagttgctgggcgcagtggctcatgcctgtaatcccagcacgttgggaagccaaggcaggaggatcgcttgagcccaagattttgagatcagcctgggtaacatggcgaaaccttgtctctacaaaaaatacaaaaaattagctgggcatggcggcatgtgcctgtagtctcagctactccgccctccagcctgggcgaaagagcaagaccctgtcccaaaacaaaacaaaacaacccaaaacatagagttacaccatatgaccccggaagtccattcctaggtaagtacccaagagaaccaaaatatatccacaaaggcagggggcggtagctcacacctgcaatcccagcctttcgggaggccaaggtggatggatcacttaaaggtcaggagttygagaccagcctggccaacatggtgaaacccccgtctctactaaaaatgcaaaaattagctgggagtggtggcgggtgtctgtaatcccagctactcaggaggctgaggcaggagaatcaattgaacctgggaggcagaggttgcagtgagccaagatcccgcgactgcactccagcctgggcatcagagcaacacttcatctcaaaataaataaataaagaaataaatctatgcaaaaagttgtatgccaatgtttatagcagctstattcagaatagctaccaaaaygtgaaaaaatccaagtgaccaccaacaaatgagtggatcaacaaaatgtacatgtacatatatacaatggaatattatttggtcatgaaacggaatgaagtactgatatttgccacaacatgggtgcatcttgaaagcatgatgctgaacgaagccagacacataaggccacatgttatgttttcatttttatgaaatatccagcacaggaaaattcatagaacaggaagcagattggtagttgccaggggctgagagagggggaatgaggactggctgctaataggtacagggtttcttttggggatgatacaaatgtcctggaatcagatcgtggtgatggttacacaactctgtgagtatgcttaaaacactgaatttattgcacactttaaaagcgtgaattttatggtatgtgaattatatgtcaatttttaaaattgtatgagaaaaacaagttttccctggcatcctgtatttttatttgctcaatctggccaccataacttgatgcaattctacagtacctcatggacagtcaggcccagtgacccttcctagggtcccctcgagcctgaaagcatactccagtgtccacactgtacagyggggcagccgaagacaactgcggctgcagagaaagtgcgagtcccagggaaagaaaaaatgcaggtgctaagccaggcacagtggctcatgcctgtagtcccagcgctttgggaggctgatgcaggagcatcacttgaggccaggagttcgagaccagcgcgggaaacatggcggtactccatctctacaaaaaaaacccaaaaaaattagccaggcatggtggcatgtgcctgtggtcccacctactctgggagctggggtatgggggctgaggcaggaagatcgcttgagcccgggaggtagaggctgcaatgagacaagattgcaccactgcactccagcctgggtgacagagagagaccctgtctcaaaaaaaaaatttttttttaaatgtgggtgctattttgggactttgggcttttctcagcctcagtttcccctcctgcaaaatggagtagaacaattatcttcaaatatctgtgagagatggtgtttatgagacacttagggcaaaaaggcaatcatcctcaaaaaagaaactgacaactgcagcggctacctgcttttgtaagtaaagttttattggcaccagggccaggattaaagggaggcaaacaaggctgagtggtgcaaggacaagggtctgatcatgtcttaagagttttagtgttttggccaggcaaaacaccaaaactctttggcctgcaatcccagaactttgggaggctaaggtgggtgaatcacctgaggccaggagttcragacaagcctggccaacatggtgagacctcatctctaccaaaaatacaaaaaatcagcctggtgtggtggtgggcacctgtagtcccagctactagggaggctgaggcaygagaatagcttgaacycaggaggcaggggttgccgagatcatgccactgcattctagtctgggcaacagagagactcgtctcataaattaaaaaaaaaaaaaaaaagttttggtgttttggccatatgcggtggctgacacctgtaatcccaacactttgggaggcctaggcagaaggatcttttgaggccaggagttcaagacsagcctgggcaacatagtgagatccccgtctctaaaaataaaataaaaaataaaagttttgatgttttgttcatcataaatgttttcattaattttatgtttttaaaatattatttctcttgatggctgagttttgtggggccaccttaaattttgcacaggggtgagatcctcactcgcctcaccctagaacccgttctgctgtgtgtactgggcacattttttgttgttgttttgtttttgtttttgagacagagtctcgctctgtcgcccagtctggagtgcagcggcgctatcccggctcactgtaacctccgcctcttggattcaagcgattctcctgcctcagtcttctgagtagctgggattacaggcgcgcgtcaccacccccaagtaattttttttttgttttgttttggttttttttgtttagtagagacagggtttcaccatgttggccagggtgatctcgaactcctgacctcaagtgatctgcccacctcggcctcccaaagtgctgggatacaggcgtgagccactgcgcccggccaatgcgctgggcatattgattaacctatcttagcctcagtttcttcatctgcaaaatggggctgaacgatgctgccttacttctgagaggattcatgcaaaatatttacttctgcgctctgctggaggggcggggccagckcgcccagtgggggcggggccctgtggtcgggctccccgggaggggcggggccaggccgtgtcagctgaccggcctggccaatggcacctggcggcggggcckggcaggccggggcggggccgggggcgggcctggcggcgcggactcccgggccatggacgagtcgagcctcctgcggcgccgcgggctccaggtgaggcccctgcgcgggcgggcggaaggcagagggcgcggccaagtggacgcggcctgaaaggtgccgggaggggcggggccttcacgggctgtagggaaactgaggcagagggtggggaacgctcagatcgcttctttttgaccacccgcttctcaaagtgctttttctcatggtgggaagggggaaggtgcccccttggacatctagggaaactgaggctccaagcgatggcgtgggaggaagaggctgagggctctgcccctccccaccagctgttctaataataatgctagcaacagcagccagagagctcaccatatgttcatggttgttttagtcctattactagcgatgtattaatatgagttcatatgtattaatacctccttgggtcgtcgctgcaccactgtacaccctcagctcagccctacgacgacctggggaggttggggctgtcaggcgcccatttgtcagaataaggaaactgaggctctagtcccggaaagccactctccagaggtcgcctagctgggattcgatctgcgccctcaaccagctctcttacggcacaaggcgctgccaaccagcagtgtgacctggggggagggcacccttgcttctctgggcctcagttttccaatgagccatagggtcctccttttactgagtttatgtttaggaggctgtgtcatcaggaggtagggacacaggcgtcggggacagcagaagcctaagtttgaagccacacagggactacatgaccccgggcagccaccctttgacttctctgggcctcagtgtccccattataagaaaagaaaaacaggaattaagatttggccattttcctctgggacttagaccacacccttaagaagccaccaagttttcaggtagggaacctgggattcagcacttacccaacgaacatttatggagcgcctgctgtgtgcctggctctggagaggcagcggagtgttctgcaacctctggagctgccctcctagaaaccccaacctgttgggggaggtagacgccagagcagcggtgaccccacggagtgatcagttgtgataagggactcacagcaagtgaaggaggcgcctgacccagtcattgctgggagccctggggtagaggaggcagccaagggtggcgaggcattgcagcggggggcggtatttagggaaatgaaagaggttgacagaagctggaacctagggaggactgagcaggtggggtgggggtcggggactgaggttagctccgggcgggttgagggggtgagaggaatggggccggcgggtctccaacctggagccgcaccggtagctgcgggactgcgaactcagcaggtgatgggaagccaggtcgggagtggtcagggaaggcacgggctgagctgcagatcagagacacccggtctctggccgcgcgggggtggggcagaactgraggcgctgaggccagaggcaagagtgggggacttgggcggaaaggagggggcggggcgggattggcgagcagcgtggtgttggtgggggggcagtcccgcctccagccccagttagatgccaacccgcccgcagcctcttaaaatagagaaaccgcctccgggtaggcgaatgggggtgctgctgacgtcaagaagtggggcctgttccatggtgggggggtcaaacatttcctgatggtaagttctatgttacaaaaggggaaactgaggttcagagaagcatagccactgtccgggtttcacaaagtataggtgacagagtcagacaggatttgaacccacgcagttccggcttcctctccaaaccaacccagcacaggcgtccctccacgaaggtggagggatgagcacggattccccgactgaatgagggcattccgggcagaggccacagcacgtgcaaaggcccagaggcatgtagcctttcttacctgtttatatggggaaacaagaacttgaacctatttcttagcactagaggctgatggccaggacttaatgcttccagggccttcagtgctgattttgaagaggttagactttccccctagggtgatggggagctatggaaggtgctggagcaggagaggacatgcccatattgaggggctgggaagactcctctggagggctaggagcaggagtgggggaatcaaaaagggcaggaagccaggaaggagcatggaatgaaagtctaagtgtaccaggtgtggtggctcatgactgtagtcccagctactcaaggaggctgaggcagaaggwtctctctctctctctyttttttttttttttgagaaagaatcatgctctgttacccaggctggagtccagtggcgcaatctcggctcactgcaacctccacctcccgggttcaagtaattctccctgcctcagcctcccgagtagctgggattacaggcacatgtcaccacgcccggctaatttttgtatttttagtagagacggggtttcrccatgttggccaggctggtatcaaactcctgayctcaggtgatccgcccacctcggcctcccaaagtgctagaattacargcgtgagccaccgcgcccagccaagaaggatctcttgagcccaggagtttgaggctatagtgagccatgatcacgagaccctatctcaaaaataaaaataaaggtccaagtggaagaagattaaaataataataaaataatagtaaagtgggaataaccgttcatattaacaggctaagccctctcatgcattcaattctcccaacagcccgagtggtcagtgctattattagttccacttttcaaaggaagaaactgaggcccaaagagggaagtacccaccaggaagccagagaaattctarccaatctggcacgtgaaggtgttgtcttcatcagccccagtttggggtctcttttgactggaaaccttgttaatggtccaggagcaccccagccaatcagggggtagatcgctgatgcgagccaatcagatttcctggaggccaaaggccaaagagtccattcacaaacgggtgctgaccggccaatccagacgcatagcccagggcgtcctctccggtggtgacaatgtgaggcgtgctgttggctgtgtgcaggaaaggtctgaaaaaggatccggcctggcccgcgggcggccagtttgcgacagccctgggtccagggaggaggtggagaccttcccaatttgggttaaactcagcctcacgcataacgtgtgcaggcaccgggtaacgtgagctgttattactactactactattatcttattacatttatcatctcctacttggacctttgctttacacatgaccgaatttcaaaacaccaggtcccacaaacagagcatcccccggcagagaagggctagagcctgtatctggacttttgtctctgccgctactggggtggctcctctaggttcagccctccaaggtgatcctgctttctcatggacagcttccacttattttcctcctcctcctcctcctcctccttctccttctcctcctcctcctcctcctcctggaagccctggggctggtgccatgtggtccatgctgacttctctcccatttaattccaggggcatcgaacttccaaccgggcttggtgcccagcaggctgagtctcacctccctttgcacgtgctgtttgctgggcatggactggtgttttccatgtgcctgcaggctttgtttgacaccccctactccaggaagccccttagctctcctctctgtgtgcctccaacccctcttctccctttgagtctctctttttttagacaggatcttgccctgtcgcccaggctggagtgcggtggcccaggctggagtgcagtggcgccatcttggctcactgcaggctccgtcacctggatacaagcgattctcacagcctcagcctcctgagtagctggattacaggcgagcgccaccacacccgactaatataatttttatattttttagtagagatggtgtttcaccatgttggccagaatggcctcaaactctttttttttttttttttttttttgagacggagtcttgctctgtcgcccaggctggagtgcagtggcgtgatctccgctcattccacctcccaggttcatgccattctcctgcctcagcctcccgagtagctgggactacaggctcctgccaccacacccggctaattttttgtatttttagcagagacgggctttcaccgtgttagccaggatggtctccatctgctgacttcgtgatcctcccrcctcggcctctcaaagtgctgagattacaggtgttagccactgcgcctggccttttttttttgaaacggagtttcactctttcgctcttcttgcccaggctggagtgcaatggcacgatctcggctcaccgcaacctctgcccccgagttcaagcgattctcctgcctcagcctcccaggtagctgggattacaggcatgcgccaccacatcctgctaattttgtatttttagtagagacggggtttctccatgttggtcaggctggtctcgaactcctgacctcaggtgatctgcctgcctcagcctcccaaagtcctgggattacaggcatgagccactgcgcccggccaccttttttttttttttttttgagacggagtctcattctgtcacccaggctggagtacaatggtgtggtctyggctcactgcaacctccgcctccsgggttcaagggattctcctgcctcggcctaccgagtagctgggactacaggcgcctgccaccacatccagctaatttttgtattttaagtagagacggggtttcactatgttggccaggctgatcttgaactcctgaccttgtgatccgcccaccttggcctcccagcgtgctgggattacaggcgtgagccaccgcacctggctcaaactcttgatcttaagtgatcctcccgcctcagcctcccaaagtgctgggattacaggcatgagccacagcacccagctgcttcgggtctctcttaatccctccagtatgggggtgctcctgctgtgctatgtcttctccaaaatgggatttcctcaaggtggggctaaagcttgttggggaggcagcatcccccagcctgggcaagcgcagacgggtataccataaatattacctttaaagggcagtttcagggggtcggggcctccccaacctccactcctctgggtgggaaccactcccaggggaacagcaggcacagagggagctgtgggtggaaagcagatggtgcggggaccgaagggtccgggagtggtgccaggagagttctgtgtggtccagcttccccgggagcctttgcagggagctgccgattttgcytcacctctctctgccactttaaaaaaacatcttcaggccaggcacagtggctcatgcctgtaatccagcgttttgggaggccgagatgggaggactgcttgaggtcaggaggtcaagaccagccwgaccaacatggtgaaatcctatctctactaaaaatacaaaatcagccaagcgtggtggtgggcgcctgtaatcccagcttacttgggaggctgaggcagaagaatcgcttgaacccaggaggtggaggttgcagtgagacaagatcgcaccattgccctccagcctgggcgacagagcaagtctccatctgaaaacaaacaaacaaacaaaatattcacatctttttgtcttttggaagcaactttcaactggtggttattattcacgtcttgatcattgtcttgactcccatccatccaagtytcccccagcaccaggctctgagcttgctactcattgattcctccagggaccctatgtcacygggccattttccaaatgagaaaactgaggcacagaggggttaagtcacttgtcgggtcacacagtgcaggagtgggggagccagactgggaacctaggactgtcagagttttggaaggaaatgcctggatggggtgcaagtgggaccccccaccagggttcaaatccctccctgtttcacgtggggtagtggaggaagtggtataagatcccacaactggctgggtgcagtggctcatgcctgtaatcccagcactttgggaggccaaggcaggtggatcacttgagaccaggagttcaagaccagcctgggcaacatggtgaaacctcatctctataaaaaatacaaaaattagccgggtgtggtggcacatgcccmcaatcccagctactctggaggcggaggttgcagtgagccaagattgcaccactgcattccagtctgggcgacatagccagacgctgtctcaaaaaaaaaaaaaaaaaaaaaaaaaaaaaaaawattcccacaactattggaaggggaagaaggagaccctaatggccacggtgatggtggtgatggttccatcaccatgactgcttgaactaaacgccgtgagttgtctgtcctcagacatattcaagcagtcagagagaccttcgaggggtagattattctcctcccatcgtgacagcttggttttctgagcgcagagcagctgaagtcaggcctggggtracgccacacccccgcgaccyttccccgcctctcccgggagaccttgccctcccagctgggtcatccggcagcccagcagcttccggccccctccaattggctgtaggggccgatggcgtcactggttgctatggcgaacacccagatcacgacgtgggcagcctggagcccaccaaagtaaaaatagtcgtgtgtccccaacgtggccgccctgatgtgtgtggagggagggtgtcctgagacccagtttcctgcctctcactccactaagagacgtgggcagccggctttcctctgcacctaagtttccctgccagtaaaacagcccctgcccgcggttcgtaggaggtggctcagtaaatgcaaggacatttaccaggtattatgacagcttccatggtcccttgctgagctcaacaatagtacaacagcacacaacagcagcaatagtaatggctgatcatgattaacccagaaccctcctcacgtcatctccagttacagatggggaaactgaggcacggggcatacaaataatttgcatggccaggaagaaacagagaattgaactggacccaggtctgggtgtccccagattctaaacttgtgccacatggcattttgagaatttaataaaccctcgtgattgaccgggtgcgatggcttacactgtaatcccagccctttgggaggctaaggtggatggatcacttgaggtcaggagttcgagaccagcctgggcaacatagtgaaacctcgtctctgctaaatatacaaaaattagccaggcatgctggcacacacctgtaaccccagttacttgggaggctgagtcaggagaatcgcttgaacccgagaggcagaggtttcagtgagccaagactgcaccactgcactccagcctggcgatacagtgagactccatctaaacaaacaaacaaacaaacaaaaaactggttttttggccaggcatggtggcttatgcctgtaatcccagcattttgtaatcccggcattttgggaggccaaagtgggtggatcatctgaggtcaggagttcaagactagcctgggtaacatggcaaaaccctgtctcttctaaaaaaaaaaaaaaaagtcccagctactctggaggttgaggcaggagaatcgcttgaacctgggagacagaggttgcagcgagccragattgtgtcattgcactccagcctgggcaacaagagcaaaagtctgtctcaaaaaaacaaaaacaacaacaaaaaaaaaccctcttgggcagcccatgtctgaggatggactgtgaggtcacagtggaacacaagctcasggctttctatccttcatgcggtgagggcacccagagttggtgcaggtcagtttgctgagctctaaaagggtcttcaaaagggagtcacccgtcagccgtcctccccacgcccccactggtacccagggcccaaacctgcataggctttgcagcgagtgaggagagaatggcgttcagacctagacccaggaggagagggacatctgagatgggacagggagaggacaactcaggaatctctgttttctcaacagattattagtttttagccactactgacatacttcttcataaatacaactaattggtaattttaaataaaattattattaattttttttagacttagagtcttgctctgtcacccagactagagtgcaatggtattatcatagttcactgcaacctccaactcctggggtcaagcaatcctcccacctcagtctcctgagtagctgggattgcaggcgtgcaacaccacacctggctaatttttttttcttttttgagacggaatctctcattgttgccaggctagagtgcaatggcaccatctcagctcactgcaagctcygcctcccaggttcaagcgatcctcccgagtagctggggctacaggtgtgcaataccacgcccagctaatttttgtatttttagtagagacagggtttcaccatgttggccaggatggtcttgatctcttgaccttgtgatctgcccgccttggcctcccaaagtactgggattacaggcatgagccaccgcacttggcccttcttatttatttatttatttatttatttatttatttatttatttatttttgagatggagtttcgctcttgtttcccaggctggagtgcaatggtgtgacctcggctcactgcaacctccgcctcccgggttcaagcgattctcctgccttagtctcccaagtagctggaattacaggcacccaccaccatgcctggctaattttgtatttttagtagagatggggtttcaccatgttggccaggctggtcttgaactcccgacctcaggtgatctgcccacctcagcctcccaaagctctgggattacaggtatgagccactgcgcctgaccggcccggcctttttttggagacagggctcaagcaatcctcccacctcagccccccaagtagctaggagtacaggcttgagccaccatgcccagcaatttttttttttttttttttttttttttttgtagagacggggtttcactctgttgcccaggctagtttcaaactcctgaactcaagtgatccatccgccttggcctcccaaagtgccagaattacaggygtgagccaccgcacccggcctactctggctaatttttttaaaaagttttgtagagatgtagtcttgctatgttgcccaatctggcttaaacttctgggctcaaacaaccctcctgctttggtctcccaaagtactgagatcacaggtgtgagccaccgtgcccagcctaaaatattttttaatgcaggtatggtaggagccgggtggggaattagactgtgaatctggagggcctccaggaagaaaggatgttgagttcaratctggagtatgagctgcagttaattagggccagaagggagggaaggctgttctgagagagcgcacagatagcgcaaaggccttgaggcagggctgagccagtgtgtagagtgagcgggaaagatgcattggttggggcatgggattggggattgtgggggtgcatcaacggccaggggttctgagggctagtctctctgagaatgatccccatttctgtctcattgcagaaggagctgagcctgccacgccgaggacgtgggtgagttcacctgggactggcgggctgggtgggccccagtggtcttggaagtggatatttcagcaacagccactgaattgtgaatgtatttaataattacagcaacacatctcatgttcattcttgccctcgtgtttgcaaagtgcttcacaagcacctggcctctcaccacaaacatgggaggccatgccagtttgcaaatgaggaagctgaggtgcaaaggggtttcatcaccagctaaggacactcagctgggaaggagagaaacttgtctggaatccagagtccagatgttgaatttcagctgaagtgtattagaactggcttgaatgcctctcatgacggggagctcacttccttttggggaacaccagcagaaaatcatctctcagctaggcacggtggctcccgcctgtaatcccagcactttggaaggctgaggcaggcagatcacttgaggccagaagttcragatcmgcctggccaacatggtgaaaccccgtctctactaaaaatacaaaaaaattaaccaggcgtggtggtgctcgcttgtaatcccaggtactcaggaggctgaggcaggagattcgcttgaagtgaggtgaagattgcagtgaaccaggctcccaccaccagacttcagtctgggcaacagagtgagactctgtctaaaaaaaaagaaaagaaaaaaatcatctctctcgggatcacatcagtgttcctgtaggttgggtttttttttttttgttttgctttgttttctttttgagacggggtccctctctctctgtcacccacatagtacagtgcagtagtgtcatcttggctcactgcaaccactgcctcccaggttcaagagagtctcccgcctcagcctccagagtagctgagactacacatgcgagcctccacacctgacttgtatgtttagtagagacagggtctcactatgttgcccaggctggtctcaaactcctggactcaagcgatctgcctgcctcaacctcccaaagtgctgggattacaggcatgagccaccatgcccagtctaggttaccattttttatccccaaatcttagagaacattattgttcaatgctttcattcatttacagatgaaagaaaccaaaggccggggtggggaggggttttccttgagctagtggtctggaagtgtgtgactgtggacaccccatctttgggagctgcttttgcctgagttgggggtgggaatcactcaatgaacatttttttgagcacctgctgtacactgggccctgctgaagccagaggggatacagacaattcaatctcagagcaatggttgaagttttgtactcaggagagagctcaaccagagaawgagacagaggtgctgggggtggctttatcctgaagatctggggcctcttggaggaagtgacctttgagcttagatctggaagaagaggaggagctggcagcggggaagtctggggagaatggcattccaagcagcaggaacagcttgggcaaagtttctggggtgccagtatgcttggcgttagaagaacagcatgaagacaagggtagctgagtggagtgagtggagatgaggtggcaggacagaaggaggaggtcctgggaatggggtcagagtggcccccaatcccaggccatctgcttctgttccagtggggatgatacagttggtggggaggtgcttgaaggccccagtggttgggggttgctgggggactgggacattgccccgagagccggcactgtttccagccttggcccaagctgtgggcagagtgttggaccgtgaatcaatgaggactgccgagggcaaagtcctggaccttggggcaggacagagccaaagactccacaagggatgwccactccctgccaccttccctgtgccccactgggtccaccggggcctcaagagggccagagtgagacacagacacccccagaccgtggggtttgcgctgagagggaggaaggacagagctggcggcgcctggtgctggtgggggtgcaggtacagcttggcggaggaggggctggtggggttgggatcgtatatgggtgagggggcgaccttcctggcagaggaaacagctggaagccagggactggaggtgtggtcagagcctctagtgtgcgcggggatgcggagacccgagcgggttaggacctcagtgctgagcagctggccgggatgcggggttggggagttggggcggactgcgctcagatcccggctcccagagagccccagggccggggcgagggcagaggccgggccggggcggggagaggcggggtcaggccatggagcaatcgcgcggaccgcggagccagtgaccgcccttcccttccggggcgcagctcgggggctcccaagccggcggcctcggcgtccctgcggcagacagggcggcacccgcggctcccctttcccgctgcgcgaccctcgctgccgggccgggcctgcgcgcaggtgcggagctgcgatccccgccccgaggcggagccagcccggcccccagcggcccagcccccgcgtctagtctgccgcaccagccaggcgtctgtccctgcgtccgtgtgtccgtccgtcrgtccgctcgcgccacgatcagggcttccgggggccaacaagggggcgtcggtaccccgccgcacagaggcggcctctgcctcggcatgaagtcccgcagggacaagctgcacatcccggcgctgaccctcgagtgagtgttgggcagggcgggggtatgcggggtgcagggaggacaggatgacaactaccctccccccacgtctctgttcgtgtcgcccagaaacgcaccgccgcctccggggagccctcccgggccatcggtctggccccgccctcacgtcctgagctgaacccagaatccccggtcttgggcccctactccctgagggaaccgcagccgccatccggagatccggattcggccacacgaaggggcggccgccaggttcaccgtccccggcctctttctttgcagtctgtctccgagcagccagagcccgtccctgctgggtcccagcagcccctgcagcccctgtagcccctccttgggcctgcacccctggaggtaagtgacagcgcgtgtgggcggggcgcagacatcgccctggcaccccagagccttggaaaccctccagactcatcggtctcctcaagatactgyaggttggtgacatcacctctctgggcctcagtttacccctccacataatggcactgcgatacgttctaggggcttaatgggaaaattccatttttagccaggccagcatctgacaggtggccaaggaaagggaagaacttaagctgttgcccaaggacttcgccaagacaggtgccggattcccaagcggctcagggcactccctgctgaattggcctggactcctgggtggtgacctcagggagaaagctcctccctytaaaacacacgcacacccaaggctgagaggccaccaacgagagccctgtgaattgagmttaaccraagtggcgccgggagaaaagaaccagggtgactgagcgctccctaaccctttcctgatccctacttcccagttaagaaaactgaggctcagagaggagatgccagttttcctgattcagtccatcccccgggggccaagcatcagggacagctttgctaccaggtctgttgagggttctactggccagttggttgactctgtgactggccaggtttcaggacaggaaggagttttgtgagctcctctcatggtttgggcaaaagtttagggagggacagatgtgaggtcaatggtgtctgttagagttatgtggcccatcaaccatttacactttagtatgaatgagctgcttaactctttccacagacttttttttttttttttttttttgaggcagagtcttgttctgtcccctaggctggagtgcagtggtgcaatctcagcttactgcaacctccacctcctgggttcaagcaattctcctgttgtagcctcccaagtagcagggactataggcacctaccaccacatccagctaatttttgtattttagtagagatggggtttcaccatgttggccaggctggtcgcaaacccctctgcctcagcctccccaagtgctgggattacaggcataagccacacgctgggccatccacagacctttaacggggagaagagagaacaatayagagcccacatttgggtgctgggcaacagggaggtaccttccttcagacgccaagcacttatgaggcacctactgagatccaggtgctaaaggcattgctataaagaaaacatagtccctccatcaatgacttctcagtcagcttagggaattcagtgataaaactaatggataaacaagatgtattcagacagggacctcttggggaggtgatgtttgagccaaggcctgggcacagctaaagaaagattggcaccaggcagtgggtactgcatgtgcaaaggtcctgtggcaggactgaggtggtgggttttttgtttttgttttttgagacagtctcactttgtcgcccaggttggactgcagtggcatgatctcggctcactgcaacctctgcctcccaggttcaagtgattctcctgtttcaggctccgagtagcggagactacaggcgtgccaccacgcccggctaattttttgtttgtttgtttgtttgtttgagaagggatcttgctctgttgcccaggctggagtccagtggtaccatcttggctcactgcaacctccgcctcctaggttcaggtgattctcctgcctcagcctcccaagtagctgggattacaggcacacaccaacactcccggctaatttttgtattttcagtaaagatggggtttcaccatgttrgctaggctggtctcgagctcccgacctcaagtgattctcccgccttggcctctcaaagtgctgggattacaggcatgaaccaccaagcctggcctaatgtttgtatttttagtagaggtggggtttcattatgttggccaggctggtcttgaactcctgacctcaggtgatccacccgccttggcttcccaaagtgctaggattataggcgtgagccactgcaccccgcctgagattttttttaagcctctgtgtctgccttggggggagaaagttctgctggggccaggaatggaggtggccagagagaaggaggtggctaggacaacatccaggaacaagtcgaggcatccactgagaatcagagactgccatcacccccatttagtgaagaaaacaggggcataggacctcagaatgtgttatcaggagcatcctaggaaggtttcgggccagatctgactctgtctaaatccttggcttccaccccaggtgaggacatgatgaagggagggacccgtgtgttggaggccgctgagcagatttgaccagttttaactgggaggggagggaggaagtatctgggactgagaaaggccrtaaggctgcctcactcaccaccggggggcagcagagccacattgccttgggcctggcgggggaatgggtccctgcctgccatgttccaagcatcctaggaataagctcataaacgtcccaacagagtccagcctctgcaactcccctgcctcctttttttttttgagacagtctcgctttgttgcccaggctggggtgcagtggtgtgatctctgcttactgccacctccgcctcctgggtcaagcgagtctcctgcctcagcctcctgagtagctgggattacaggcatgcaccactacactcagctaacatttgggtggttttttttgtttgtttgagacggagttttcctcttgttgcacaggctgcagtgaagtggcacgatcttggctcactgcaacctccgcctcctggattcaaatgattttcctgcctcagcctcgtgagtagctgggattacaggcatctgccaccactcctggctaattttttgtatttttagtagagatggggtttcaccatgttggccaggctggtctcaaactcctgacttcaggtgatccacccgccatggcctcccacaatgmtggaattacaagcgtgagccactgcgcctggcctgatctttatatttttagtagagacagggtttcaccatgttgaccaggctggtcttgaactcctgacctcaggtgatccacccgccttggcctcccacggtactggaattactggcatgagccattgtgcctggccttgcaacttccctgcttccatyctatccatctccccgtcgctcacttggctccagccacatggctgatcctccagaatgcaggctggtccagcctcagggcctttgcacttgctgtccccactgcccagagctctgttccctcctttcttcttccgtcacatcctcatcaaggcctcagcctcagataggaagccttccccaaccaccccctccttccaggccccacaaacatggggtataatatgcattatacctgtccatttccacatccagaccccagggattttctttttctttttttttttttttaagacagtcttgctctgttacccaggctggagtacagtggtgcgatatctcggctcactgcaacctttgcctcctgggttcaagtgattctcctgcctcagcctcgagagtagctgggattacagacatgcgccaccacgccctgctagttttgtatttttagtagagacagggtttcaccatgttggccaggctggtctcgaactcctgagttcaagcgatctgcccatctcagcctcccaaaatgttgggattacaggcataagccacggcacccagccaaccccagagatttaatttccacattgtcttgtgtgattatccagttatttttctcacccagaggtttgacagcctctccgagaccagaccttgtctgtcctggtcatatcgtagactcagggcaggcccagggtgtatacagcaggtgctcagttaatgcatgtggcttagatgaatgggcagtatctgggagggctgtccttgtggtagtgatagcattgggggttgggggtgttgttgaagaaggccatgagttgggcgctcataggcaaagtggctgttccaggcagcaacagcatcgtcagagacactttccttctggagcctcaaatcccaagggcaggaagaatgtggattttctacctagggcactaggagccatagagtgtggtgctgggagcggcacagatatatgggcaggtgggaagcgctggggtagtcccactaaaaagggaccgttgaacgggggtgtctgtatatctacctgagactttggcatttacagtcacagcacatgcagggagagtcaaatgccaatgtcacagagtttgtcagggacagggctaggatatgacccctgggagagggattcacccaggaatgcagttttgttttgctgtgagagcaatagggagccatggagggtttgtgagcagggggaagggcatgatctggggagcagtgggccgacaccagagatcagtggctcagccagcctttcatggaaggccttcaccgtggcagcaggccctctggattgtcagctgcagccctgttttgcagagggggaaactgaggacaaatgagcatgggagaaggttctctccctgctacagatgtcagggcagtgggtgtatgtaatagggggtgtgtaggtgttactgggtgtagctgtggctggggacgagggggcagcgcctttaccgagtgtgtgcaaaggtgtgtccccgtgcatatggggtggctcagcacgtagtgacagcaagtggagactgtggccccatccccacttgggtccccagaytcaagagaatctgcaccccgcatgaggcttgggctgcatacctgggggtcataggtgaccactcccatactcatcaccatctctggtggtctcaaaaccaccatctcccctggtctcaaaacaagtcccaaatccacccacttttctccacagcttcaatattcccctcccagacaccgtcccagacccttactggcctcctgctaccttcattcctgtcccccagcagtctgctccccatagcagacacaagggggtttacaaaygtagtccacatcataccctttctctgctcaagcaccctccatggctccccattgctcctacaatacaattgcactcctccctgcagcccacaaggcttatgtggtcagccccgctggcattttgccctcagtgctgcctcagagagttgtgccctttgcctgggacacgctttctgcatagccagctccttcctcctccatttctggctggctgcagcattacctcctctgagaggcctcctggctaaagtcgccccttgcagtgttctctcctttctcttcccttctcagccttggtatttgaaattatcttttttttttttttttttttttttgagacggagtctcgctctrtcacccaggctggagtgcattggtgtgatctcggcccactgcaacctccacctcccgggtacaagtgattctaccacctcagcctccagagcagctgggaatacaggcatgcaccaccatgcccagctatttcttttgtacttttatttcttttattttttatttttttttatttttttgagacagagtttcgctcttgttgcccaggatggagtgcaatggtgctatctcagctcactgcaacctccgcctcctgggttcaagcgattctcctgcctcagcctcccaagtagttgggattatagggacgtgccaccacgcccagctaattttgtattttttttagtagagactgggtttcaccttgttggccaggctggtctcaaactcctgacctcaggtgatccgcccgcttcggcctcccaaagtgctgggattacaggcgtgagccaccacgcccagccgaaattatcttgctcattgaattgtttcctgttggctgggcaaggtggctcacgcctgtaatcccggcactttgggaggccaaggcgggaggatcacctgaggtcaggagtttgagacgagcctggccaacatggtgaaactccgtctctactaaaaatacaaaaaaattagctgggcgtggtggtgcaacacctgtaatcccagcttctcgggaggctgagrcaggagaatcgyttgaacccrggaggcggaggctgcagtaagctgagactgcgccattgcattccagcctgggcaacgagagcgaaactctgtctcaaaaaaaaaaaatttgtctctttagctatgaagcctgggccccagcattgggcctggactgggtcccaaagtgtcctgtggcccaggaaggggcatccctcatgatgacactgcccctgacttrmctgggctgtcatgacaggaggaagcattaattcagtccttacggtgggagacacttctgcttccatagtgaacacatattgtaccctcagccctgttccaggctctgtgtctcagattttattctgttttcagtatgggggatgttacgcatggggaaacagaggcctggaagttagcctgatgctatcgtttatagagataaattatatatagatatggaacatataccaggtgcccttggaagcgcccccttacatctgatttgtgtaattctcatgtcagttcagttttcctccaatttcacagttgaggagactgaggctggagttcaatcaggtggctgcttcctaactgaggcagggctgatggcctttcccgccacacacagacagagcatgtcagacgccccgactcaatttgccaaacacaccctctatgccagtccggtgctgggagctgctgggaccctaaggagcccccarcctggggaagacatagccggacagacaggaaagcgggtttttcagaggagaggacgcagttttgccaggctagattccaagcagtggggccagggtgggcgtggtagcatgagccggccaggacgctggggtgggtcttgggtgccgcactgagaaggggtcagtgctctgggagagaggaaaaagatggagggagcgattagatttacattttagcagaaaggagccaaaatgcctgcccctagctcgaggttaaggtgctgccaacgccccgcccccgccgcccgcgrtcgtagcaacgcccggcctcagccgcccgcggccctagcaacgctccgcctctccgcccgcggccatggcagcgccccgcccactcgccggcacgcgggtccgccggcctcgcttccgcgtcgctcgctccgcctcccgacaggccccgcccccaacggccccgcccccgcactcgcctgggcggagttccagtcgcgctcgggggcgcgcgcttccttctcgccgcccccccatccccgcagccccgtgcgcccccctccctgtccggctccgcggggctcctggggccgatcccaccgccgaggcctcccttcccggcctcrggcggctgcggcggcacaaagggaagcagcatgtccgaccccagctactggacggcggtggcggctcccggccatcggagccgcytggcaaaaggcgcgctgctgcagcgctccaagaggtagggggcacggcgccggcgaaggctcggsggccagccgagcaaacaggagttgccagaagtgtgtcctggccgcgtggcgcggaccacggcgagcgtctgtctgtggcagcagtgggaaggggggaggacgcctgtggatcgaggtgtcccctggggtccctggcaccctcctttcgcccctcgttccctggactggggtgtctgtccgccagcgtcgcagctggggtggtgacagacaggagtgagttgagattgagctaggatttgaacccgggtgtccagggctgggcagaaccagggaggaacttcttggaaaaactgaggctgatctgccgctgggggtccattcagcagaaatgttggctcagaagcaaatatttactgcacgaggctggcatttgggtggggtgtcaggagtccagatagttggggttaacccccgccaaagcctcaccgctcttggagtctcagtttccccttttgaaaagcagagaggataagtgagggctgtggattctaccagacctgggttcaaatttcgactcagccactaccaggctgtgtgacctcaagtagctccttaacctctctgtgcttgggtttctcattggtgctggactggggcaaagtctgggcggtgggaccagctaccgaaagaccttgaatgctgagtccagggcttaaacttacctccaagatcgtggggagcattggagggggaatatgggtgccagagggatgaggtgcaggaggctggcttcaggcccctgctttctgccacattctctctgttgtgtcctgggtaccaagagaggatcgttctcaaatggcaacttctcsaggtcctggatctcctccaggaagagttgaacaaacagtcggccctgcatagatgcttgggaagtgaacagatgatgcttagttctcctttgaggcctcacatttggccgtgttttcaagaagacctcgcccaagaacaggagggagggcaacgaagtgtttttcccaaatgcttttggaagcagcaagtgatacagcaggatcggggagggagggtgctggtggtgcagtgtgggggcgaggaaccaggtgaggggctgggagaggatgtggagacagccaggtgagcgtgcattgaggggttggcaggaagttttgcagaaacctgtgggtttcacttttgcttctgcagctcaggctgggagamaatcactgtgactgttgacatctgtggcttcagtttcccagtctggaaaatgggctcagctggtcattcccaactctggggcttgttggaattggcagatgttggggatgtaattcactcaggaggcactggctgccctcccggcgtgagccaggccctgtgagcattgtctaggcaaagacaacagtgtatgtacccgagtccgacccaaagctgagcactggatgtggtaggtttyatccttcaaggtagagatgaggaaacaggctcaaggggcagccacatgtggagacgtagacaggctgggcctcttctccctgcccaccttgtcacctgtgtcctttgatgatcatacgcttgttctcccatggattgacctgctccgagcattctgcctgggaccccatttctgcacctcggaggccccgagacttcatctctccctccccgcgagattctcccgccgctgagctgcgttggcggcttggggtgtgtgggctgatgctcttgtggagcagagctgttgctgggcaactgctctggtggggcgggggacggtgtcgctcccaacttccttctgtcaaggtgtgggctgaggccagggcccaggtrggagaagaagccaggcagggtgtgagagacctgggccagggatctggtggccagaagggaactgggatggaaagaggaaaacgtgggcaaaagttcagcagaagaggcaggactgtgaaagaggttgcatttagggtttctagttgggtcacattggcattttaggggcatcttgagaagaaggagggttgtcaagagatgggagcaggggcttcaagaggggtatatagaatggggtgtctcagcccatatctgggctccagggtgtgtttggttcacctgatttgctggtgctgctggcagtagccatggtacagggaaaagtgtgggggtgggactgtgacacagaaccctgaaaagctggtccaggggctcctggccrtatgtagtgtcctccatcaggctagaagcacttcatgccattgctgttaataacaacactgccaatagtttgtgttkgtttttgttattgtttttcagatgaagtttcactcrtgtcgcccaggctggaatgcaatggcactatctcagcccactgcaacctccgcctcctgggttcaagtgattctctgccccagcctcctgagtagctgggattataagcatgcactaccacacctggctaatttttggtttttttgttttgttttgttttgttttgttttttgagacggagtttcactcttgttgcccaggctggagtgtaacggcacgatctcaccacaacctccacctcctgggttcaagcgattctcctgcctcagcctaccaagtagctgggattacaggcatgcatcaccacgcccagctaattttgtatttttagtacagaaagggttcctccctgttggtcaggctggtctcaaactcctgatctcaggtgatctacccayctcggcctcccaaagtactgggattacaggygtgagtcaccatgcccgacctaatttttgtgtttttagtagagacgggtttcaccatgtttaccaggatggtctcaaactcctgacctcaggtgatccgcatgcctcggcctcccaaagtgctgggattacagggatgagccactgtgcccagccttgtttttgtttttttaagagagagggccttgtgctgtcacctaggctggagtgctgtggcaccatcatggctcacggcagccttgacctcctgaggctcaagcgatcctcttgcctcagccttctgagtagctgggactacaggcgtgcaccaccacacccagctaatttttaaattttgtatagagacggggtcttgctatgttgcccaggctggtcttgaactcctggcttcagaggatcctcccaccttggcctyccaaagcactggggttactggcgtgagccaccatgcctggccagcagtagtgtcaataataaggaatgttagttgaggggtgattccctcctgggccttgaagacctggctaagggccatgggggaacccagctgggggcagagtgggagtggccatgtccaacatcccatccttctccagaacgggctgcgagtgtgatttaggctgggcaggtggcttagcgcggggccctgggcagccacctaccctgtccccttttcccccsacagctgccgcagcgggaaccgcaagagcttggtggtaggaacgccctccccgaccctctcccggcccctgtcgccattgtcggtcccaacgggtgagtgtgggagcagccagcgggtgctgtgtcctgcctctgccccgctgactcagtttccccgcctcctcctcagcaggcagcagccccttggatagtcctcggaatttctcggctgcctctgccctaaatttcccctttgcccggaggtgagtgattgccggctttggkagacagtgcgggcaccacgggcargggttgggcaggggcacgtgctcggtggctagacctggctcctcattcatttcattcaccttttcccctcccctggcccgtctggtggtggtctccccctctggctcccattcccggcaaatgcatgccatcttgcagccacatcccacgcatggacaggtaatttcaaccagcccagggggtggggggtcatggggggatatagccctaagaatcattaactcactaaagaaatcatkcattcattcacttaacaagagctgattgagcacctgtcatgtgccagacgcttgcatttcatttatttattcatacaacaacattcattaagcaccyactgtgtgtatgctctgtgctgcgggctgagggcatggtcgcaaatgggcagctggccctgagcccctggggagtcctccrtttggtggggggtggtcaatgtgtgccccagaagctacagctcagaggttgaagctttgacaggrgacacagtggcagctggastcacggggggggcttcctggaagaggtacctaaagagagagagcatgcagtggacttggtcagcctgtgtctctgttcttggttattttcaggagatccttcctacaacagggccagaatatgctggccacagtgtctgttcttagtccccacaaaccacaggggccaggccttccttccatctgttcttgttcccctctccagggcagacggcagaagatggtccctcgcgtctctcccatcttccggctatggaaccaacacacccagctccaccctctcggtacccatagccccaccttggcaggtggacaggcagatgccgggttgkggggggacacatctttgtgtgtttttttcaaggtgttggatagttgtgcrgtcagcaaacatactagttacttcctccatgcacgccccattctgggaaatgcagggtcccctgagaagacccagccttggccccaaaatagtccctggttggggagatacagatatcctcagcctatggggtcagggcctgaccagagggggacttggggctgcccaggggtacaggcagagaggacttcctggaggagagggcatcagagctagggttttgagggatgcataggagctaggcaggagaaaggatgttaccttctgatggccagcaggcagcctgggccttgaggggtggtgctgggttcctggccacagcactgacggtgaactcatggctytratccccaccactctctaccagtcaagctcatcctcccgggaacgtctccaccagcttcccttccagccgacgccggacgagctgcacttcctgtccaagcacttccgcagctcagagaatgtgcttgatgaggaaggcggccggtcaccccgcctccgaccccgctctcgcagtctcaggtgggccgcgacctctggccccagccccggcccctccctgggctggtgtggaggcccaagttgtggctcctccttcaccccagccctgaccctgcctgagcctagcctctgattcttgtccctcaaccctggctcagatcccccaacatcctcccctggggttggtctcaggtcccatatcacaagccagctgtcttcctttcagcccgggccgtgcaacggggaccttcgacaatgagattgtcatgatgaatcaygtgtaccgggagaggttccccaaggtgggcagcgcctggcggctggaccagcccctgcacttctttccacattgctgtccctccatggaactctgtcttcctggctatgtcccctttgccagtctkttcatttctgtctttccttcyccttccgttgaaagatgtcgttcctcctgcrccagccctcccacccgatcrccccattgccccatctcctctctccccaaccatgcctctcctgccccattctgcgtgtgtcactccagccccgccctctgaccaggtcgccccgtctcgccccacccaggccacagcacagatggagggccgtctgcaggagttcctgacggcctacgcgcccggcgcccggctggcgctggctgatggcgtcttgggcttcatccaccaccagatcgtcgagctggcccgagactgcttggccaagtctggcgagaacctcgtcacctcccgctacttcctagagatgcaggagaagctggagcggcttctgcaggatgtgcgtggtttttcgcatgttgaggttttgcatgcagtgggacgtggagtgaggggggtccccaggccagacggtgctgaggacctgtgggtgatgccacgacccacctcccccaggcccatgagcgttcggacagtgaggaggtcagcttcatcgtccagcttgtccggaaactgctgatcatcatctcacggccagctcggctgctggagtgtctggtaagtttctctttctacggccagcttggggtccaggcagaactgagattgggaccacaacagtcctgccaagatacaggtgacagttcccatcgtgtagggctttgagaggaacacagggtgctattgggctagcgtgggcttccctaaggaggcagcgggagtggagacccagkgggtgagctgggaagggtgctccaggcagagggaacagcatgtgcagaggcctgcaggtggaaccaagcccygggtgaccagccctcctgtgcccctaggagtttgaccctgaggaattttaccacctgctggaggcggctgagggccatgcgcgggagggccaaggcattaagactgaccttccacagtacatcattgggcagctgggcctggccaaggaccccctggagggtaagccgggatgggaagaggaaaccaaggctgggaaaggccggatggaggccaggcacggtggctcacacctttaatascagcactttgggaagctaaggcgggcagatcacttgaggccaggagttcgagaccagyctggccaacatggtggaaacccccccccytactaaaaatacaaarattagctaagtgtggtggcgcatgcctgtaatcccagctactcaggaggctgaggcacaagaattgcttgaactcaggagatggaggttgcagtgagctgagatcgcgccactgcrctccaacctgggcgacagagcgagaccctgtctcaaaaaaacaaaaaaagaaagggcagatgaagccaggattcaarcccaggcccatccgattccagaaccaccgcactgttctttgtctctctgtggccttgctcttaggtcacctgtgggaattatgctgagaccctctgatcttttggggcccaggggcctcagtgtcctcaaatgccacgttaagatggtcaggaagcctggggaccagtgttagcagtggccttccctttgtcctgcaaattcacaaatgactttaccaatttctgtggcctttactgtggcccagaaagtgaacttggagtcaaacaggacaacccgtaggtaagaagacggtcaaaaactcccacagccggccgggtgcggtggctcacgcctgtaatcccagcacttttgggaggccgaggtgggtggatcacaaggtcaggagttcaagaccagccaggacaacatggtgaaaccccatctctactaaagatacaaaaattarccgggtgtggtggcgtgtgcctgtaatcccagctactcgggaggctgaggcaggagaatcatttgaaccctggaggcggaggttgcagtgagccgagatcacaccacttcattccagcctgggcaacagggcaagactctgtctcaaaaaaaaaaacaaacaactcccacagccagccaggtgcagtggctcacgcctgtaatcccataatcccagcactttgtgagactgaggcgggtggatcacttraggtcaggaattcaagactagcctggccaatatgcagaaactccatctctactaaaaacaaatattagccgggtgtggtggcatgtgcctgtagatcccagctacttgggaggctgaggcaggagaatcgcttgaactcaggaggcagaggttgcagtgagccgagatcacgccactgtgctctagcctgggtgaaagagtgagcctacatttcaaaaaaaaaaagatgtagctgggtgtagtagtgygcgcctgtagtcccagctactcaggaggctaaggtgggaagatcgcttgagcttggcaggttgagactgcagtgagctatgatcacaccactgtcctccagcctgggtgacaaagccagaccctgtctcaaaaagagaaaaaaaaaaaatttccacaaatagccaggataagaggaactgaaagctggagcattgaacttggacctagcctggtccagcagtagccagggggaggctctgggaggaggcagtgttcaaactgaggcctggagggcaggaggtgaccaggttgcagatccaaaggaaagagtgaaacaggcagcataggcatagaccctaaggwtggaccatacctggagtgggactgacctgccactgtccccattgaaagctggggaggcccggcatggtagctcacacttgtaatcccagcactgtgggaggccaaggcaggaggatcacttgaagccaggagtttgagaccagcttgggcaacatactgagatctcgtctctattaaaaaaacaattagccaggcatgatsgcacatgcctatagtcctagctacttgcggggctgaagtgggaagactgcttgagcccaggggtttgaggctgcagtgagctatggtcgcacaactgcactccagcctgggygacatagcaagacyccatctctacaaaaagtaatttttttttttcttttttgagacagagtctcgctctctcgcccaggctggagtgcagtggcrcgatcttggctcactgcaagctcygcctcctgggttcacgccattctcctgcctcagcctcccgagtagctgggactacaggygcccgccaccacgcccggctaattttttgtatttttagtagaggcggggtttcactgtgttagccaggatggtctcgatctcctgacctcatgatccgcccgcctctgcctcccaaagtgctgggattacaggcgtgagccaccgcrcctggcctacaaaaagtatttttaaaaattagccaggcgtggcggtgaatgcctgtagtcccacctacttgagaggctgaggtgggaggattgcttgagtttaggagactgaagctgcagtgagccatgatggcaccactgcactccagcctrggtgacagagcaagagcctgtctctgaaataatcatacttggccgggtgcggtggctcacgcctgtaatcccagcactttgggaggccaaggcgggcagatcacctgaggtcaggagtttgagacgagcctggccaacatggtgaaaccctgtctctrctaaaaatacaaaaattaggctgggcgtagtggcttatacctgtaatcccagcactttgggaggccgaggcaggcggattacctgaggtcaggagttcaagaccagcctggccaatgtggtgaaaccccatctctactaaaaatacaaaagttagccaggtgtggtggcaggcgcctgtaatcccagccactcgggaggctgaggcaggagaatctcttcaactcaggtggtggaggttgcagtgagccaagatctcgccactgcactccagcctgggcracagagtgagactgcgtctcaaaaaataaaaatacaaatacaaaaattagctgggcatggtggcacacgcctgtaatcccgtctacttgggaggctgagacaggagaagcacttgaacccaagaggtggaggttgcagtgagctgagatcacaccactgcactccagcctgggtgacagagcgagcgactccatgtcaaataaataaattaaataatcatactaataaaaaataaagctgaggaaactgaggctccaggcagataaggctgagcagggaatcaaacccaggtgtacctaaggccagatcacatgtggtctgtggctggmccatgtttgccaggcattcgctaggggctgcccctctgccaaggcctggggcaagaacatattggaccctccacctgggctgcaccctgagctgaggaagatgttaggagctgacacccagggggcctgtgtctcatcccgtcttcacaggctcaaggctcagagcctaagtttgatcatgactgagcacttcagagccagggcagcccactggcccttctagaaggttcctaagtcattgcttcatccagcctcccggatgtggcttcatgacagtgtcatgagagctggtcaggggaggcactgcatccccagcctggggtgagaactctagaggcctcaggaaattgctgggtgatgcagggtgaggcagggaggctccagctgagcctcctccctcatcttgcagagatggtgccactgagtcacctcgaagaagaacagcccccagcacctgagtccccagaggtgagtagcagaggctgggggacccccgctcatcttgttctttccagagtggaccaggcacccgcagaaagggctgggtttgccgaggtcttgcatgtagcttaattagcatcggtgactttggaggcaaggtgacggcacgtgggactgccctgccttggaagtcgggtgggggcagtgctggaggggcactggacaggtgagttttgcaggacgtgtaagaatttcccaggaggagggcacagctgtgagcaaaaaagtacagaaagtcagaagctgagttggagaagtttggacaggggaggaggtagcatcgggcaccaggaccagtggtttgggcttgggggcaggagaagccttcccagctctgcagcggggcaggaccctaagcccttcccatcccctagagccgcgccctggtcggccagtcacggaggaagccatgcgaaagcgactttgagaccatcaaactcattagcaacggagcctatgggtgagtccctgagtcctgcatagacccatttcacagatgcctgaggggatggttgaggcccaggcagctcctgcatccccctcctaccccagcagggctcacacattcatccttgaatgggcagagaaggcacctgaggactggagggggaagtggagacacgccatagcgaggttacagcctcatgtgtgctctgtccacgagccaggcctttacctgccccaggtgtagggcgttctaggggcttgggggctgatcaaggaaatagatgcccacccagtgggagtagcacgcagtgagctttatttaggtgctgctttgaatggcaggcttgcatacaagggaagtccctcatagcataagccytttggaggctgaggttccaggagtcaccatcaagagggagaggccggcaagggaactccccgggcagagggggatcagagagggggcttacatgtctaggtgatgttgttcaacagcatgggcactcaatctctgggtcagagactccctgcagggtggtagcagcttagrgtcttgaaatccacaaagttcatcttatccatggctcagagatggtgcagtttcacgagtctgcaaagcagacaggctctcagtggctaaaattttgcttacttggtctgtgtgtaaaacaaacggatgtgtaaaactttgagtttggygctagcggtcttttaaaagagctagaccaggtgcggaggcactttgggaggccaaggtaggaggatcgcttgaggccaggagttcgagaccagcctgggcaacatggcaaaactccatcaatactaaaaatagaataattaactgggcgtaatggcacatgcctgtaattccagctacttgggaggctgaagttggaggatcacctgaacccaggaggcagaggttgcagtgagccgagatcaccccactgcactccagcctgggtgacacagtgagaccatctcaaaaaaaaaaaaaaarrgaaagaaagaaagaaagaaatacacaagcagccaggtgcagtggctctcgcctataatcccagcactttgggagcccgaagtgggagggtcacttgaggccaggagtttgagactagcctccacaacatagcgagaccccatctctacaaaaaatttaaacattagccaggttctgttgtgggaggatcatttgagccgggggggtggtaaagactatagtgagccgtgatctcatgactgtgctccagcctgggcaacagagtgaggcgctatctcaaaaaacataagataaaataaaaataaaagaaacatacaacctagaggccaatatacaagggccatgtgcagcccatttatatggcccccagccatggtggcttaaacccaaaggtggctgctctgggagggggaacaggtaaggagaatgggtggcccaggtggagggcacagcacaggcaaaggccaggcaggttgggatctgggctcaagttgagctgtagtgcctgctggggcctcgatctccggtcccagcaagcctggccctctgtccccagggccgtctacctggtgcggcaccgtgacacacggcagcgctttgccatcaagaagatcaacaaacagaacttgatcctgcgtaaccagatccagcaggtctttgtggagcgtgacattctcacctttgccgagaacccctttgtggtcagcatgttctgctcctttgagacccggcgccacctatgtatggtcatggaatacgtggaaggtacgctcactggggcttgcatgcctccagcgatggggagctcacccctccacgcctgggagaaaatttttagaccaagttgaggtctgttctgtcctccatgaggtctcaccctgctttggggaaccctcaggaaccccagtctggggtagggagcccagccatgggggtttagggctggaggagcccagacagragtgtgtgaggatgggaccctggaggcaagaggagggtggccatcctaggtggggggaactgatgggcagaggcctggagaccagaagtgaaggcagggagatgtatggttcaggcaggtaaagtactattaccaaagtactgccaggygagagagcgaacatgcacttaggagacaccagctgtatacrgcactaattgctgccctgtcggggagaatcagaaggcagggtctcagcttggcgcgctggctcacgcctgtagtcccagcactttgggaggccgaagtgggctgatcgcttgaggtcaggacttcgagaccagcctaagcaacatggcgaaacccccattcacgcctatagtcccagctactcgggaggctgaagcaggagattcgcttgaactctagaggcggagcttgcagtgagccgagactgcgccactgcactctagcctgggcaacagagcgggcaacagagtgagactctgtctcaaaaaaataawtaaaaatttaaaaaataggccaggcgcggtggccaacgcctgtaatctcagcactttgggaggccaaggctggtggatcacgaggtcaagagatcgagaccatcctgaccaacatagtgaagccccatctctactaagaatacaaaaattagctgggtgtggtggtgtgcgcctgtaatcccagctactckggaggctgrrgcaggagaytcgcttgaacccgggaggcggagsttgcagtgagccgagayygcgccactgcactcyagcctggcgacagagcgagactctctctcaaaaagaagaaaaaattaaaaaattaaaaataaatgaaggtagggtccgccccttccctctcccccgaccctccccgctgagatagaacaaactggggaccttttgcaggaggtaaagcgaggaggatgcataggcattgggcataacctaaggggcgggcsgggggygggggtgccccgggcctcatgactacatccgcccttctcccaggcggcgactgcgccacgctcctgaagaacatgggcccgctgcccgtggacatggcccgcctgtacttcgccgagacggtgttggcgctggagtacctgcataactatggcatcgtgcaccgtgacctcaaaccagacaagtgagctgagctagcatgagcggggcctcgcggagggcggggccagagaggatcaggggcggggccaaagaggatcagggcagagyctctgaggtgcatcccgggacccttcaggagccccatctgtctgagctctgttggtacctcctgacaggaaggcagggaatgagcgcatggtgaacatcttgtgtgtacagaggagaggagagcagacacttaataggcgtctgctgtatgcaggggaaggccggtgcacttatggaggtgctgccaatccaggggagaggatgtgcacttaggatgcacacactgtatacaggagaaggggctgcgcacccagagctgctgctgcacaaggggagagaacatgcacttataagacaccaactacacacacagaacaggattatgcaatttgcgagaccttacatgtaaagacagtgaccgtgcatgtcttgagcacctgctgtatattagtgcaggaaagcaaggaagagaacgtgtttactgagagccttaggatgtttattttattctggtaggtggtaagcacctactgcatgccagaccctctgtgggcaactgggagacacagggccacctgctttgaaacccctgtattattttctcctctgcatttattgagcgcctgctgtgtgcagggaaaaaggaatgcctgtttgtcaggtgtcctcgagatacgaggcaagaactgacatttctcacatacatgtgtggagatgtgaacatgagtgttaagagccttgcatgtaggccaggcttggtggctcacacctgtaatcccagcactttgggaggccaaggcgggcggatcacctgaggtcaggagttcaagcccagcctggccaacatagtgaaaccttgtctctactaaaaatacaaaaatcagctgggagtggtagcgcgcacttgtagtcccagctactcaggaggctgaggcaggagaatctcttgaacccggcggaggttgcaatgagccaagatcgtgccactgcacccaagcctgggcgacagagcgagactccatcttaaaaaaaaaaaaaagcgcctcgcatgttttcagggcattttgcagttggcaagtggcttagaaaacagacatgtatgtggcacctgctgtatacttgggcctgtgctcgatgctctaaggaactcagaagcatgaataactccttacacactaacgttgggtttctatatcacattttcttggttggcatgtacttgttaggcaccaggtgtatacaaaataggcagaagaacagttattaggcaatgactgtgtacctggcccagaacactttatctttatttatttatttattttttgagacagggacagtctttgtckccygggctggagtacagtggcgcagtcttggctcactgcaacctccgcctaccgggttcaagcaatattcctgcctcagcttcccgagtagctgggattacaggcatgcgccaccactacgcccagctaatttttttttttttttttttttttttgagacggggtctcactctgtcgccaggctggagtgcagtggtgcgatctcggctcactgcaacctcagagtccctggttcaagcgattctcctgcctcagccttccaattagctgggattacaggcatgcgccaccacgcccagataatttttgtatttttagtagagacggggtttcaccatgttggtcaggctggttttgaactcccgacctcaggtgatctgccggcttcggcctcccaaagtgctgggattacagttgtgagccactgcgcccggcaaatgaactcatttttaaaactctcacrcaagtacagtatatactgctgtttaggttttcctatggacttaaatatataaatgttttgctacatcatagtgtcttatgcaccagctgtatgaagtcgcatttccgtgcaccttctgggtgcatctgccacttaaaaatacattccagagaattcactgtgtataaccatcatttaatgaactatgtagtcagtacctcctgtttgctccagctctgtaaagaaacaattctgtgccggcactttgggaggccgaggcagrtgaactacctgagatcaggagttcaagaccagcctgaccaacacggcaaaaccccgtctctactaaaagtacactaaaaaaatatatatatatatacacacacacacatatacgcacacacagtagagaccaggcatgctggctcacacctgtcatgccagcactttcaaaggtgggaggattgcttgaggccagcaattcaagaccagcctgggcaacatagcaagaccttatgtctacaaaaaaaaccttagctgggtgtggtggtgtgcacctgtagttccagctacttgggaggctgagcaggaggatcgctagggcccaggagttggaggcagagctctgcccatctcaggcggagccaaggtctagggcagaaggggaggccaggcaccccagccccccagctctgagcacactcctaacctgcccacagtctgctcatcacctcgcttggccacatcaagctcacggacttcggcctgtccaagatcggcctcatgagcatggccaccaacctctatgagggccacatcgagaaggacgcccgagagttcatygacaagcaggtgggcgggcaggtgggtgggcagccccgggatgcctcctcctctctcctgggacctctcttgggctgggggctggcctcagtttccccgttctccctggcccaggtgtgtgggacgccggagtacatagcccccgaggtgatcttccgccagggctatgggaagccagtggactggtgggccatgggcgtcgtcctctatgagtttctggtgggctgcgtgcctttctttggagatacccccgaggaactcttcggtcaggtggtcagcggtgcgtttcctccaygggccygggtttgagctgcagccccaccagagctctgggcagcggtcctccacccgcatgtcagggagagaagcaggaagaggggagggagttggatgccaggtggggaggcggtggggtgctgagtgaggcgggtggctggattaattatagggtcacagaggcttcactgaagtgacttgtgaggctgggcacagtggcaaacacctgtaattccagcactttgggaggctgaggcgggaggatcatataaggtcaggagtttaagaccagcctggacaacatggtgaaaccccatctctactaaaaatacaaaaattagccgagcatggtggcgggcacctgtaatcccagctacttgggaggctgaggcaagagaatcacttgaacccaggaggcagaggttgcagtgagctgagattgtgccactgcactccagcctgrgtgacagagcgagactccatctcaaaaaataaaaaaaagaagtgacatgtgagcagagacctgcaagaacctgagaatgagagaaagccatagagacagaaaagagaaaggtggctctgagcatagggcacagctgtggsaaaggctgtcagtgggtaccaagcctgccacgttgcaggggcagaggaggccagtggcttggagtacagtgaagtgaggggaaatggtggatggtactagaaaggggtaccctgccttctccctccctccctcattttacctccctccctcattttagatgagatcatgtggccagagggagatgaggcccttccagcagacgcccaggacctcatcaccaggttgctccggcagagcccgctggaccgtctgggcactggtatgtagtgtgggggagaacccaggtgggtggctccttcaggccctgggacccagggaatggagggatagcgcccggggtagacaagagttctacttgggaagctgcatggaggagggggtttgcagctagggttttgaaggatgcacaggagttctccaggaactatcacaagaccttggaaagaatagaaagtagctgggtctggtgcccatatggagcactgagcctgaataagtrtgtgaggctgtaaagtcaccaggacctgtgtcaaaggcccagcccagaagatcccactgtcccagttttcccagccacctggttaatcattaagggaccgtttgagactcatgcagccacccatcacgtggccactatggctcctgttcatgactgaggctttgctatgggagacggttgggtccaaggtcggggatcatcacctgctctgtggagcagaagtgggagaagcccgggaaggaggccctcgtaaggctctgggctttctctaggcggtgtggtcccagatggcagcagagagaagggcagaatctttggaacctgggcagcctgggtgcttttttwtttttttgagattagatctcactctgtcactcaggctggagtgsagtwgcacaatcttggctcactgmaacctcygcctcccaggctcaagcgatcctcccacctcagcctcccgagtagccggaaccacaggcatgtgccatcatgcccggctaatttttatacttttggtagagacgaaattgagacgaaatttcaccatgttgcccaggctggtctcaaactcctgacctcaagtgatctgcccgcctcagcctcccaaagtgctggcattacaggcatgagccaccatgcctggctgctggcctgggtttgaatcctggcttcgtccctctccaggctcctaaatgacagcggatttttgttcccatttttctggttctttgttgttgttgttgttgttgttttttgagacagagtcttgctttgttgcccaggttggagtgcagtggtgctatctcagctcactgctgcaatctccacctcccaggttcgagcgattctcttgcctcagcctcccgagtagctgggaatacaggcaccagccaccacacccggctaatttttgtgtttttagaagagatggggttttgccatgctggccagactggtctygaactcctgacctcaggtgatcctcccttcttggcctcccaaagtgctgggattacaggtgtgagccactgcgcccggcccatttttctggttctgtgttgtccctactatgtgtccagcatgggcagtgggggtaggggggcatcctgtggcgggtgaggtgaggacctgcagggctcagcggggcatatctgcaggtggcacccacgaagtgaagcagcacccctttttcctggccctggactgggcagggcttctccgacacaaagccgagttcgtgccccagctcgaagcygaggatgataccagctactttgacagtaaggagggatccccctggagggggggcggggggtgctctgccatccctcagtccctgggggcagagggctgtgtgccaggcattccacccgagcttggcacctcaccttaggcctggagcttccgacttcctgagccttccaagaatctagggcgtgtgtcggccgccccctggctggatttcctgtgtgtctgggctcaggaggccacagcatccctcaggcttcagaaggagaaaccraggcaccaagtgtggcagacccttgtctggggttccccagcaagttgggcctcctgggtgtccgtccctgaccaggcatggggccccatctgttacccaggagggtagggcgcctagtgcagcttttttggaggcgtccctgcaggggcactgtaggtgagctctgaggaatgactctctctctccccacttggggttcctgcccttcagtgtccagcacctccttcagaacttgcttcatgtcagaggtcttctctgagcttctgtttcctcttctgtaaaatgaggaacatcctttatgttggagatgcacaattttggccaggcgcagtggctcaagcctttaatcccagaactttgggaggctgaggtgggcagatcacctgaggtcaggagttcgagaccaggctgcctgaccaacatggagaaaccccatctctactaaaaatacaaaaaattaggcaggcatggtggtacatgcctgtaatcccagctatttgggaggctgaggcacgagaattgcttgaacccaggaggtggaggttgcagtgagctgagatggcactaytgcactccagcttgcgcaacaagagcaaaactgcctgaaaaaaaaaaaaagatgcgcaattttacctaattctgtgtgacccatttcaaggaatcactgaagctcagaaataggaattcccgcccctggtcccacaacctgttttttttttttgagacggagtctcactctgtcgcccaggctggagtgcagtggcgcgatctcggcttactggaacttctacctcccggtttcaagcaattatctgcctcagcctcccgagtagtcgggattacaggtgcctgccaccatgcttggctaattggtcccacaactttttaattatttattttttgagatggagtcttgctctgtcacccaggctggagtgcagtggtgcgatttcgactcaccacaacctctgcctcccgggttcaagcgattctcctgcctcagcctcccaagtagctgggattacaggygcttaccactactgcccagctaatatttgtatttgtagtagagatggggtttcaccatgttggccaggctggtctcaaactcctgacctcaagtgagccacccaccttggcctctcaaagtgctgggattacaggcgtgagccaccgcacccggccccacaactttttagggacacagctggtgttgatccccagatatctgctctrccgcccaagcctcccgtggtccttaaacacaccaggcactgtcccacctcagagcctttgccctggcagtgaccctatcctgagatgccctccccgtattgccacaccgcccttgagatcatctctgggcatcaggcgtgctgcatgtgcctctccctcccacagcacgttcggaacgttaccgccatctgggctccgaggacgacgagaccaatgatgaagaatcgtccacagagatcccccagttctcctcctgctcccaccggttcagcaaggtgggcccgggtcccgaggggagccactgctcagaaaacattgcatgatgtctgtttgctttcgtatctgttttttgattttgctttgttttgttctgtagagatgaggtcttgctatgctgcccaggctggtctccaactcctgaactcaagtgatcctcccacctcagcctcccaaagtgctaggaattgtattggttttttgttttgttttgtttgagatggagtctcrctctgttgcccaggctggagtgcaatggcgcagtctcggctcaccgcaacctctgccttccaggttcaagcgattctcctgcctcagcctgccgagtagctgggattacaggcgcatgccgtcacgcccagctaatttttgtatttttaatagagatggggtttcaccatgttggccaggctggtctcaaactcctgacctcaggctatcctcctgcctcagcctcccaaagtgctgggattacaggcatgagccaccacacctggtcaaatttttttgtattttcagtagagatggtgtttcaccatgttggccaggctggtctcaaactcttgacctcatgatctgcccgcctcggcctcctaaagcgctgggattacagrcatgagccatcgcacccggccttgtatttttttattttgttttgttgttttaatttgcttttgttttagccattttkttttttyttttttttttttttgagacagagtctcgctctttygcccaggctggagtgcagtggcgygatctctgctcactgcaagctccgcctcccgggttcacgccattctcctgcctcagcctcccaagtagctgggattacaggtgcccgccaccacgcccggctaattttttgtattttcagtagagacggggtttcaccgtgttagccaggatggtctcgatctcctgacctcgtgatccacctgcctcggcctcccaaagtgctgggattacaggcgtgagccaccgygcccggcctgttttagccattttaaggcaatttccgaggcaggcggatcacttgaggtcaggagttcaagaccagcctgactaacatggtgaagccctgtctctactaaaaatacaaaaattagccaggcggtggtgggtgcctgtaaccccagctactcgggaggctgaggcaagagtattgcctgaaccccagaggtggaggctgcagtaagctgagatcacagcgctgcactccagcctgggcgacagagcgagactctgtctcaaaaaataatgataataataaagtgtacaatttcgtggcattcagcacattcataatgttgtgcaaccatcacctctatctagctctcaaatgtttgattcccccaaaaatttgtacccattagcaaccactccccatttgtcctccttcagcttccatctttatggatttgcctgttctgggcatttcatatcaatgcaattcacactatgtggccttttgggtctggcttctcttactcagcatcacgtactcaaggctcatccctactgcagtgtggaccagtgcttgcttcctttttatggctgagtaatattccatcatatggatggaacacattgtttatccacccatctttgatgcacatttgggtctattccaccttgtgaatacaggtaccattttagtttatttacttatttatttatttattgagatggagtcttgctctgttgccsaggctggagtgcartagtgcaatctcagctcactgcaacctccaccttctgggttcaagcgattctcctgcctcagcctcccgagtagctgggattacaggtgcgygccaccacacccggctaatttttgtatttttagtagcgaccaggtttcaccatgttgcccaggctggtctcaaactcctgtcctcaagcgatccgcctgcctcagcctcccaaagtcctgggattaaaggcatgaaccaccgcacctggccctggatgttattttataacctcacgagcttaacttacattccctactttttttatgatctgatcaaaaaatgctccactctgctttaggcctgggccccaggcaggactttctagtcaacagcaaaaacgcagcttggtagcctggcccctgagcctcagtttttccatctgtacaatgggctaaagtctatgctcttttagggatgtggggagtgaggatttagagaagtgactcatactgaagcaactggtacataggaatcactggactaagccagctttcttttttttttttttttttttttgaaacagagtctcgctctgtctcctaggctggagtgcagtggcacaatctcggctcactgcaacctccgccttctgggttcaagccattctyctgcctcagccttccaagtagctgggactacaggcatgtgccaccacrcccagctaatttttgtatttttagtagagacgggttttcaccatgttgaccaggctggtcttgaacgcctgacctcaagtgatccgcccacctcagcctcccagagtggtgggattacaggcataagtcaccaggcctggtctaagccagctttcttgccacctttgttactggtttttttgtttgggtttctttttttttctttttttgagacagggttttgctatgttgcccaggctggtctcaaactcctgggctcaagtgatcctcccagctgggcctctgaaagtgctgggattacaggcatgagccaccgcacccggcttaccattcttttgtcttgcctcccaggtctacagcagctctgagttcctggccgtccagcccactcctaccttcgctgaaaggagcttcagtgaagaccgggaggaggggtgggagcgcagcgaagtggactatggccgccggctgagtgctgacatccggtargtggcctggggaagtgtaggcagatccagcttccaagcctgctgggaggtagagacacaaaatctgatgcaaagggagcttcctagtggccaagtagaaaagggtcaaacatattgaccagcctatcaggtccctggcaaccttgctccctttggctctgtgttcctcaccatgcaaacataaaacagctgtgtaccatcatgctgctaggcacacttttccttctgtccagaatgccctttgcttactaactcctgttcatccttcaaagctcagacccaacagaaacagtcaatgtctgctagaggatgggtgttggaagctggccttttttttttttttttttttttgagacrgagtctcgctctgtcgcacaggctggagtgcagtggcgcaatctcggctcactgcaagctccgcctcccgggttcacgccattctcctgcctcagcctcccgagtagctgggactacaggcacctgccaccacacccggctaatttttatatttttagtagagacggggttttgccatgttagccaggatggtctcggtctcctgacctcgtgatccgccctcctcaacctcccaaagtgctaggattacaggcgtgagccaatgtgcccggccttttttttttttctttttttaagagactggttctcactctgtctcccagactggagtgcagtggcacgatcatagctcacttcagcctcagactcctgggctcaagagatcctctcaagtagctgggactacaggcgtgcaccacggcacccggctaattttttaagcaattttttgtaggccaggtgcagtgacttacacctgtaatcccaacactttgggaagccgaggcaggtggattacctgaggtcaggagttcaagaccagcctggtcaacatggcaaaaccccatctctactaaaactccaaaaatttagccgggcatagtggtgcacgcctgtaatcccagctacttgggaggcttaggcacgagaattgcttgaccctgggaggyggaggttacagtgagccaagatcgtgccactgcactccggccggggtgacagagcgagactctgtctcaaaaaaaaaaacaaaacaaaaaacaaaaaattgcagagatggggtctccttatgttgcccrccctggtctcgaactcctggcctcaaacaatcctcctgtctcagcctcccaaagtgctggaattataggtgtcagccactgcacccagcctggaagctgggttttaaaagttgaataggaagccgggtgcagtggctcacgcctgtaatcccagcactttgggaccccaaggcaggcaggtcacttgagctcaggaattcaagaccagtctggccaacatggtgtaaccccgtctctactaaaaatacaaaaattagcccagtgtggcggcaggcacccataatcccagctacttgggaggctgaggcaggagactcacttgagccctggaggcagtggttgtagtgagctgagattgcaccactgcacttcagcctgggtgacagagtgagaccctgtctttaaaaaaaaaggtgaataagcggtctccaggtggacagagaggacagtgcagacagaaggaactcgtcctgtctatgcaaattacccttgactgcagactgagagttaagatgtggccatgaaggtggctgagtatcctggggtgcaggtgcctggcaggggtgatgcaggctcttcctccctgcaggctgaggtcctggacatcctctggatcctcctgtcagtcatcttcgtcccagcccgagcggggtcccagcccatctctcctgaatacyatcagcctggacacaatgcccaagtttgccttctcatcagaggatgagggggtaggcccaggccctgcaggccccaagaggcccgtcttcattctaggggagcctgaccccccaccagcggccaccccagtgatgcccaagccctcgagcctttctggtaagtggggccctgagtaagagggatgatgtcatggaagtttcccagaggaggggctrtttgagatgggttttcaaggatgagtaggagttctccagagccaacaaaggctttaagagaggagaagccagggtcccagagagacccccagcccccaaggaaccccagtctagggtaaatgcccccagcttcatagagtcaggatgggacccctagctcccaagatgggggaactaagggtctaaatgggtgtggaggaaggcttcctggaggaggggacttgaagacttttgcatagagaataatttgggaagggagtgcaggaagagggaactgcatgagcaaaggccaggaggctggactgtgtaaatagtgaccagggaggaagggccttaaggtccctttaggaccacatggtgagtttgaggggcacccagctgaccctgctgaccctctagccgacacagctgctctcagccacgcccgcctacggagcaatagcatcggcgcccgacactccacaccaaggcctctggatgccrgccggggccgccgccttgggggcccaagagacccagcccctgagaagtccagagcctcctccagcggtggcagtggtggcggcagtgggggccgcgtgcccaagtcagcctctgtctctgccctgtccctcatcatcacggcaggtaatgcccaaggcccctctcacctttgtctgtctgcacccattttcaccaacagggtgggggcccttcctgagttggggaggctggggrtgagccccagaagaggggaggaggagtaggacacatggagagctggggagatggtgttcccagtagagggcactgcacgtgcaaaggcctggtggggtgaccatgcttgggacattgaagcaacagcaaagtggccagggtggtcgttgtggtgggaaagagggggccccaggggagacctgtgagggagtgagtgaccccctccctaaccccctgcagatgatggcagcggcggccccctcatgagccccctttccccgcgctctctgtcctcgaacccgtcgtcccgtgaytcttcgccgagccgagacccgtcccccgtgtgtggcagcctgcggccccccatcgttatccacagctctggcaagaagtacggcttcagcctgcgggcgatccgcgtctacatgggtgatagcgacgtctacactgtgcaccacgtcgtctgggtgagtgccgagtgggaatggcagggacccgggttctagtttgactctgcccggtcatgtcccttctcagagctgcattttggagcctggcagggttaggtagatagagctggtgccaccgagttcatctcggtccctgtcatttggcagggaggaggtcagatgagagagacaaggatggatggatggaagctcacagatcccaagtggcattaacctcccagctccatatggggacgcactgggcatgttatcctccctctcccagcccaagggcgtcgaggcatgccctccctattggttgctccctgaacagacacagaaggctttctggagaagggggcgtaggagctggggctttgatgggtgagtaggagttccccaggatcagggaaactgagacagcacaagaggcagcagcttgctggggtcccacagcagacccagcctgggctggggtccccagatgtggggcccaggccattgaccccaccgttctcgtctgcccccagagtgtggaggacggaagccccgcccaggaggcgggcctgcgggctggggacctcatcacccacatcaacggggagtcagtgctggggctggtgcacatggacgtcgtggagctgctgctgaaggtgcggcacccccactgcccaccctcagggctccccagcaccccttggccgcagctcccggttccccgtggttctccgcgtccagacacacaaccccacattcaatgtcaactccaggcctggcacatccacttccttcggcccagaatacatgtccttcttcagcccccaacatcaccccttagagctgctcctccaggaagccctcccttctccctgggcaccctcacatctgttcctccctctggcctgaggcctggaggtaggagatgggctcaagacaggaggaagggccgggcgcggtggcacacgcctgtaatcccagcactttgggaggccgaggcaggatgatcacctgagctcaggactttgagaccagcctgggcaacagagcgagacccccatctctgcaaaaaattaaaaaataaaattagctaggcatggtggcatgcgcctatagtcctaggtacttaggagtctgaggtgagaggatcgcttgggccgaggaggttgaggccatagtgagctgtgatcgtgccatactgcactccagcctgggacacagagtgagaccctccctggttctaaaaaaatagagggctctcatgtgggcagctgcatgggtggttcattgaatagctggacactgggtaggtgtctttggcctaatgactcatgggccattaggtgagtgattgggggatggggagatgttggggtgattaatgggtggataccagataggtgggtgacagaccccgggagggtggagagtgaagagggcaggcctcgatcggcgttgaccgcagagggaaggatcttagcaggaggggtggtgctccctgggctattgtttgaccggatatattgggtaggtcactggttgtgtggatgaatggatgctggggtggtgggtcccagctggtgcccggagtgaaggggacatagcagctgcctggcaagtgctgggccctgtgagaggcacagaggcaacccctcaccatccctcccgcagagcggcaacaagatatccctgcggaccacagccctggagaacacctccatcaaggtgggycccgcccggaagaatgtggccaagggccgcatggcacgcaggagcaagaggagccgtcggcgggagacccaggatcggtgcgcggcagtgaccaccagggagcggtacacagggggcggggccayggggactggggttctttttttcttttctttttcctttttttttttttttttttgagacagagtcttgctctgttgcccaggctggagtgcagtggctcaatctcggctcmctgcaacctccacctcccgggttcaagcgactgtcctgcctcagccccctaagtaactgggactacggcgtgcaccatcatgcccagctaatttttatattttcagtagagacagggtttcgccatgttggccaggctggtctcgaactcctgaccttaaatgatccatctgcctcggcctctgaaagtgctgggattacaggtgtgagccaccatgcctggccaggagcaggggttctgaagcctccggttttcttaccccaggcggaagtcacttttcaagaagatctccaagcagacctccgtgctgcacaccagccgcagcttctcctccggactccaccactcactgtcatccagtgagagcctccccggctcgcccacccacagcctctcccccagccccaccactccctgccgaagcccagcccctgatgtcccagcaggtgggtgcaccccgaccccccaccrccccggctaccctgggagcaagggctggtgggccccaggagggaggaaggagytcaggggatggaatgacacgatgtagggaaaaagatgaccgggatcctggtgtctagcagggaacctgggagtacttagagacgartgcaggtgccagggaaggatgcacccagcagaggaaacatcatggacaaatggggctagacaggagggtgggaaaactgagaagaggccaggcrcggaggctyacgcctgtaatcccaacactttgggagcccgaggcaggaggatcactgagcccaggagtttgagaccagcctgggcaacacagggagaccccatctgtacaaaacataaaaaaattaggtgggtgtgaggccgggcatggaggctcacacctgtaatcccagcactttgggaggccgaggcaggtggatcacctgaggtcgggagttcaagaccagcctggccaacatggagaaaccccgtctgtactaaaaatacaaaatcagccaggtgtggtggcacatgcctgtagtcccagctactagggaggctgaggcaggagaatcgcttgaacccaggaggtggaggttgcggtgagccgagattgagccattgcactccagcctgggcaacaagagcaaaactccatctcaaaaaaaaaaattaggtggttgtggtggtgcacacatgtggtcccagctactctggaggctgagatgggaggctcacttgagcccaggaggtcaaggctgcagtgagccatgattgcaccactgcactccagcctaggcaacagagtgagaccccatctcaaaaaacaaaagggaaaaaaaaaaagaaaacagaagtgatacagagaaggctttctggaggagggggagtaggagctggggctttgatgggtgagtgggagttcaccagagctaggccaaggaaacaaccctgagcaggaggcagaaaagtctggcatgaaccaggcatgatggctcatgcctgtaatcccagcactttgggaggccaaagcaggcggatcacttgaggtcaggagtttgagaccagcctggccaacatggtgaaaccccaactctactaaaaatacaaaaattagccagrtgtggtggcacatgcctgtagtcccagttacttagggggccgaggcacgagaatcatttcaacctgggaggtgaaggttgcagtgagccaagatcatgccactgcactccagcctgggtgacagagcgagactctattgaaaaaaaaaaaaattagccagccatggtgacgtgcacctgttgtcccagctactcaggaggctgagttgtgaggatcacttcagcccaggaggttgaggctatgattgagccagtgcactacagtctgggcaacagagcaagaccctgtctcaaaaacaaaaacaaccaggcatgatgggtggccacatggaaggatgtgggctttagcagtttttgtcagtcccacagctccacttctgggctggggacattgaggccagcagccctgacctacgcttatcacccacagataccactgcatccccacccagcgcatccccgagctccagcagccccgcctccccagctgctgctggccacacccgccccagctccctgcacggcctggctgccaagcttgggccaccccgccccaagactggccgccgcaagtccaccagcagcatcccgccctccccgctggcctgcccgcccatctccgcgcccccaccccgctcgccctcgcccctgcccgggcacccgcccgcacctgcccgatccccgcggctgcgccggggccagtcagctgacaagctgggcacaggggagcggctggatggggaggcggggcggcgcactcgtgggccagaggccgagctcgtggtcatgcggcggctgcacctgtccgagcgccgagactccttcaagaagcaggaggccgtgcaggaggttagcttcgatgagccgcaggaggaggccactgggctgcccacctcagtgccacagatcgccgtggagggcgaggaagccgtgccagtagctctcgggcccaccggaagagactgatcccctgccaggtctctccctggcatcaaagttacgcgttttcttgtgcaatgttttttccgtaaagtcatgcctggatggggactgagccaccagcctgacacccagaaggcgagaagccatctcggtccttgctggaaggtggagacatcgcttgtgttctggtgtcaatcagggggctggatggggcaagaatgggggacaagggtggctttgtaaatagcagcaaatccctgcaactaatttattactttttyttttttttttttttttttgagacagagtctcactctgttgcccgggctggagtgcagcggcgtgatctcagctcactgcaacctccgcctcccaagttcaagcgattgtcctgcctcagcttcccaagtggctgggattacaggcgcccaccactatgcccagctaattttttgtatttttagtacagacggggtttcaccatgttggtcaggctggtctcgaactcctgacctcatgatttgcctgcctttgcctcccaaagtgctgggattacaggcgtgagccactgggcccagcctaatttattactttttataagcgatagccgtactgagccgccccctgaaggcggctgccaggtcttgccccaggcacctgggactctgtttgcaggccctgccctctgggctgagaaggatgcactttggacaagtcatctgtgtttgtgttttccagtttttctgtactttttaagtgttttgtgttacctggtctcattcccctccccacacctacccatttgaggggatggagttgaagtcacctggtcacctgtaccggcccagttcggctacaacctggagtgtccgtaaacaattcctctcacccacaaaacaatgtaatcccagcgatggactggattctgaaggccacttcccaccatcatagctgccatgcccaggcagtgcctgctctatatatagagtctgcctccaatcctgctggcttcagcctggagaagggatatgggagctggagctttgatggatgaataggtgttcaccggatctgggcagaggggtcatccgctccccaggtgggcactgataaaggaaggtacaggcctcacctggaactgccaaggcagcctccagaaatgctcggctgtctcggggcacgctccagtatgccagtcctgcgggattacgtccagctacttccagaaacactcagtgtcccctcccctcaggctctgccttggcctggccttgtccagtctaccctggacaagatgccgtgtgtttgaggcccagcagagtaagcccttggccgtgatgtgtctgaaacacctgttaggggttccctccatatgtcagagcctctctgggatgaagttcaagccagaaaacccagtcgaggctcaagtttgaatttcagcttcactgtgtggctctgggaaaatggctttcccactctgtgcctcagtttccttgtgtttacaagactaatcccattgactgtttattaagcacctactgtgtgccaagcgcttttacgtggcttctccctcagccagccttgagaaggctggaggtggtgtcatcacctccattttacagacaaagcagctgagaccccagcgaggggcggagacctgtcccacgatcacccagcaggagtcgtggcagaacggagcatcagccagaccctgttgtgggcgttgtcatcaagggagcttgaatggagggtctggtgtcagatacagccgactccagccccagctcatcccccatgatgctgtgtgacccactgggcactctggtgagggagctttccagacatcaacagcccactctgcttccctttytgagtcccctgtccagcactgcctagtgttggagggtagaccaaggctgtgcatgattcaccccctccttccatcctggagctggcagtgaataaaagcccgtatttacaaagatgagctccaacgtctggatttgtgaggggctgagaaaggaggaagggaagagtggggaggggagcggagtgaaatagacccatggctcaaagtcattgcaagtgggttttgaggactgcatagcagttcgctgttgagattcttcctgatgccatcgctggtaccagcctsctgctaccctctccctgcgagtactccatcatagccctgcctttaaaagcttcctccagacatctgggccctgagctatgttttttatttttatgtttttgagacaaggtctcgctctgtaacccaggttggagtacagtggcgcaatcacggcacattgcagcctcgacctcctgggcgccctgggctatgttaataaaataaataagcggcggggcgcggtggctcacgcctgtaatcccagcactttggaaggccaaggcgggcggatctcctgaggtcgggagttccaaaccaccctgaccaacatggagaaaccccgtctctactaaaaatacaaaattagccgggcgtggtggcgcatgcctgtaatcccagctgctcgggaggctgaggcaggagaatcgcttgaactcgggaggtggaggttgcggcgagccgagatagcgccattgcactccagcctgggcaacaagagcgaaactccgtctcaaaaaataataayaaaataagcaatcgtcgcgtcctttctatcctggtcttagcttgcgctctgccataaaactccctctagccgaacccggcccagccctagagcaatccgttacttccggggcgctcagccggcatgcaaacactcttggctacagccccatctccgagtgcgttcggctatttccggaaaccgtcggcatctaggctcaagtccgctaaattctagtgcccgtaggggtcgagatcgttggctgtttccggacgctctgggttgccatggaaactccttcaaccctggctttctccgacttctgctttttgcggcaggccctttccccactctactgccccctgtttgctgagcttgagaacgcctcatttgtcccctggaaccatctatgcttcagtaattcccataagctggcggtcgcctctgggtctaaactcccaaggcctccattgggcactgagcacattcggttatttccagaaacgctccgcggtcttggggatcagcctcagttgtgccagtgcggcsgtagagagtgttcggccatttccgaaagcgctcgggcgtctctaagcccagccgagcccagtctcggatccctcgccgacccgattgcactcggctacctctggaaacgctcggctgtctcgggggcaccctctagtccaccagtcccgcgggattacgttcggctayttccggaaacactcgggtgcccccttacctcaggctccgcctcggcctcggttcatccgcccggctcgaatgcgctcgggcatttccgccgggggcgggccaggccgctcggaaccgtggcggcggcggaggcggggatcccgcggctgcggcgacggtggccgcggtggagccacggggcgggcttggcttggtgtgacggcggctgcggcggcggtggcggccgcgaccaggtgagtcctgactggccctcgtggcgggggcggctgggagtgtgcttaaatgcggggcgcccgggggcagtgccgggccccggtggaagccagaacgcaagcgccaggctgcgtcgggccccgcgggaactgggggggccgcaggcaagggggggcctcgggctcggctccgcagcggtgcagcctccttgggacggtcggggcagaatggggagagactccccgcgtccaagataccggactggagccgaggccccaaatgaagggaggccctgcctggaatggggcttcgaatagtaccgaggggcgcccaggcattgtgcggggcagaatggggtgcgggagggccgggggtygaacccacttccggtcccctagccgggtggccgggtccacgcagacccaagtgcgcgtctgtgtgagcgctcaggccctgccttcacccgcggagcccccagccctgcctgccccgcccctcccgcctcccggattcggggagcgctgctcccggggcgcgcacaccggggcgtgggggcgggctggcaggcagatccaggcggttttctgggcatcccctctcggggcctcagtttccccacctgtagaatgagggtaacagaggcctaggaatgggtaaattgggcacccgagaatgtggcgcccctccgccctgctcggacacctcttggggttccccgtgactgaaggatgctcagagcctccacctgacactcgggcctcttggtggatagcacctatccttatagccaccctgaatccttgacaagcaacttaacccactgccaaggctttgcatgtgccgttccgtctgcctrtcgcgccttcctatccgctgtgatgatccattctctagaacagcacgtccatcccccgaccctagccctgtccatcacagggcgtctgaacccgcagggctaggctgggaatgtgtgcctatctccgcctccccaggctgggactcctggggaataatcaatgccctgctgccggcagcctcccctcctcctcagctgcagtacccccaccttctcctggctccctgtccctgcctggggctaaggttccttctaagcacctccccatctgcattttgtgcctactctgggccccaggctggagctacctgccagcccactcactcctcctctgcagagactggaggtccatttgcttggactcacctcgaggcctttgcttgtgtagaggcctcttcctggactttgttccctacctcttagttcagctggcctgacccctctatggagctcccaaagcacccggagtggcctccattgcgtcctccctgccctaggtatctggccacctggctgctgccccctcatgtccaactgggccaagtcggcagatctaggtgtaagtcctggcttcctcctggcctactgcacggccctagatacctccctgctctgagcctcagtttccccatctgtaacaggggtgatgaaaagcctgtttactggccgggcgcggtggctcacacctgtaatcccaacactttggaaggcagaggcrggaggactgcttcagcccaggagtttgsgaccaacctgggcaacatagcaagaccccacctytattggaaaaaaaaaaaaaaaggctgggcaaggtggctcatgcctgtaatcccagcaytttgggaggccaaggcgagcagatcacttgaggtcaggagttcaagaccagcctggccaacatggtgaaacctcgtctctactaaaaatacaaaaattagctgggtgtggtggcctgctactcgggaggctgaggcaggagaattgcttgaacctgggagacaggttgcagtgagctgagatcacaccactgcactccagcctgggtgacagagcaagactctatctcaaaaaaaaaaaaaaaaaaaaactgatttactgagcatgtagtatacctggggcaggttcttgggaactctactcccagcagctccaagggaaggctgtcagtatacccattttacagatagagaagctgaggccctgagagggaccggccccaaggtcacccagtgattcagggaattccaaatcaggatttgggcccatctccgtgttgggggtgagaggagttggcctggctaacgctgccctatccctgtctccctaggtcggcgtcctcagctggccgagcatggtggcagcctgcacccttggctcccttgtctggtgcagccagcagagccgccagccttgggcgcccatggccctccrtgtgagggcgtgagcggcctgccccagcctcacctgctgatggaggactcaatggcccagtgacctgacaccacaccaccaactccctcccaccagctgacgaatggtggacccagtgacragtggcccttgtaagggtcatggaataatttgaagcgaggcatgagcggcccctgtggtcgcctgtgactgctrgagatagaggtcccagcaccccaagccaacccagcggaccctcccagccctgcttcaaccaatggggccagtggggctccaagcagccacctaaccatccagaccccaccccactcacgcggccatggcgggccctgagggcttccagtaccgcgctctgtacccgttccgccgggagcggccggaggacctggagctgctgcccggcgacgtgctggtagtgagccgggcggccttgcakgcgctgggcgtggccgagggtggcgagcgctgcccacagagcgtgggctggatgcccggcctcaacgagcgcacacggcagcgaggtgacttccctggcacctatgtggagttcctggggcccgtggccctggcccggcccggccctcgcccacggggcccccgcccactgcccgccaggccccgtgatggggcccctgagccaggtgagcagcaagcaggggccctggaaaggggggtggtcccctcagacccttggtctcctcttctgtccagtgaggcaatgggatctccaaggaaggaggaaaaaggacatttggtcatttgacaagtgtcttcagtgctaggctcagcagtggacacaaggcctgttcctgccctcatgagcttctggttcaagaagggatgagagtgggttcaggaggtgacacatgccatgaggaagggggcttgcgtgggaagatgcgagggtggaagctcaaggcagtgggggcagcgagggcagaggctgtggagtagaactctaatggcgggaacggccagcaggaggaccagagggaggaaggggagggcaatgtgcgctggcatggaggacttagtgggattgattttgaggacaatggagagtgttcagtaggattcagaggctcagcctagcttcatcctgccttttgcagacagggtcccttgaagaacccctttggagaccctgatttccaaaatgaagccacaaggagggtrggatgtgggctgctcagctgaggccacacagcacagtgggatatgaggaccccacatccctcttcaaagacccttggccatcaccacttgccaggggtgtgccaggtgtagagaatcgggggcaccgagcccmctcagtgactgctgtttgatgggcagggagtgtgggctctggccggggaaactgtggcccaggttgcaaggaggaggctaagaggtgctgcatgctcggcatggtctgctccgaccctcccagcagcccagcaaaaggccctgtgtgcagaccgggaggcctgagtgcaaggccgtcaaatgccgtacttgaaaccagttggtcacccagggaggccaaagccccgggaggtgccaggcctgctttgtgccagggtgacattgcccaaaggcaaaccagagtcccccagcgcagggcggaatagggggtgctgaggtggtgcgacgctggccccagcctccaggcatctggtatctccagggcccaggcctgcgtcctgcctcggcctgaaggagcaggaggyggccccgtctgggctcccagccagaatctgcctctccccctggtaacagccacctccctcctctgcctggcctctgtccagccaccatacacggccccacgtggggcggctgcccagccccaccctctgaatcttccagggttatgtgacctcggccagaacccgccccctcgaggcctcagtttcctcatctggaaacaacagggttggtccctggggatgctgggacccaacccctcggaaatgtgctgaagtcacctgagccccacctggctgtgcacccacgggggaggttgcagcccctctgacccacaattcctcacctgcaaagtcggggtgatgcagttctgatgggaaccccctccccattctgcagattgatcccaggccactctcagggttgagtttccc

SEQ ID NO: 10019 - DNA, 14926 bp, Homo sapiens
gacaggaacacaggctcatctcccgcactaaccaacccctgggatggctcacagccctgctcccagtgctgtgtcatgacctgaaatttaggggacaccaacayccaaggccagacccaaatggaaagcaaaagaggatgcaaggctatattaacccagtggaacacttagtgactatcacagccgaggccgggagtcagaaattcaggagccagtgagccaagcgccacagccagcaaagacaggtggggtcatcacggaaacagaacagccagtggttcacctgtgctctcacaagtagccatttgaaggtggataagccagccaagtttaaaggacccagggccggctgacactgtccctacacccccatgactgattcatagcttgaccattcctgagcacagcttcmccgcactacatcttgggcaggcctttagaacctcagtcttgccatcggtacaatgggaattggatcaatcagggtcctagcagaaaacagatggcacattcaaaccaagtaactttaaagggagtttcctagagagactgttttcaaaggtatggctactgcagcaccctggggctagtaccagggtaacaatggacaggatgcatccaatgccagcaaccaagtaaatcccccaacttcactctcccatctgctcgcctgccagtggctcccactgacctaacccaaccggaagtcagagggcaagtcagcctcccagtgtacagggcagggtggagagtagacctgagggacacagggaatayggtcagcatgacacccagttgttcctacacagaggatttttgtagaggtagaaggagacactgcaggtaaaacattagcacagcactaatgtatctgataaattcccaggtatgactgtgctcaggagagtctctgcctgatgcactggaggtcagcctctgcttgggctggagggttgcaaaggtctcagggaggggtggtcgccacctacttgccracatgcattccarcatcttcctgggtggttctggctgcctggccaagggtggcttggaggtcagagtaaccagagaacatcactggctattcctgcagagaattaacgctcagcaaggactgagcttctagtcctggccccttttctccaggctgtgggccaggaccatggaggaggggacattccagccctgcacagcctgcctttggcctggagctgttctgagcagtgcagttcactgatctcatcyagtatgtattgggtgactactattcaccaccaagagccagggcacattaagtcaccacaaggtggccctcacgtccccttgacgttctcagggtacgttcctctacctccgccttccccacccatgaggattcactgcaaactccctccaatcatgcatatgagattaggatttcatatagtcttcaaatccacatctactgtgtaaggtcacagccaccctgcagcccaagataaacaggacattcctttgtattcattcaccctggtccaagtccccatatggactgaatgtttgtgtcttcccaaaattcatatgctgaagctctaccccccagtgtgatggtattaggaggtggggccttcagggatcattaagtcatgggatggagccctcctgaatgggattagtgcccttataagaagagataagaacgagatgatctctctctctctcctccatgtgaggatacaaagagaaaatggccctcaccaagaacttgaccatgctggcacctggatctcggacttctgtgctccccagctgtgagaaatgaatgtttgttgtttaaactactcagtcttacagcagcccaaactgacaaatctctccccgggatgactgcttccatcttctcgcttcctgcccctgactctgggaagtggactctgaggaagggctaagtgggtacattggggagtgaytcctataagtgtaaaaggggaggaagcaggattgagcaacaagatgtgtcccagggagctcagaagcagagactgtccatgcgggcagctctgcaccggacagcaatggcgaggccttgaccaccccctggttcagtcatggcctgaggccaccccaagaagaacatggccacttagacagcagaagcacacctggaagtgctgataggtgaaggcagtcagctggccagtctccacaccgctacacagcaagtcctacattgaagggggatgtctgtctgtcacccacccctgtagtctattcccagcacagcagctggggtgatcctgtcaaaacctaagtcaggccatgtcactcctctgtcccaaacctccaaagacatcttacacaggccttcaagggcccgcaagatctgccccatccgcatctcgcctgttgcctttctaaactcacttcgctttsctcacctgctgcaaccacactgatctcctgctgtcccccaagccaggaaacaccaggcacactccttccccagggcctttgcatcctaggttccctctgtctgaaatgctgtgcccccagatagccacggggcttcctccctgccttcagggcttgcatcaaatgtcagctgcttagtgaggcgttctctcctctcctactagaaattgagkccggccacagtgactcacgcttataatcccagcactttgggaggccraggcgggtggatcatgaggtcaagagatcgagaccatcctggccaacacagtgaaaccccgtctctactaaaaatacaaaaattagctgggcgtggtggcatgcgcctgtagtcccagctacttgagaggctgaggcaggagaatcgcttgaacctgggaggtggaggttgcagtgagttaagatcgcaccactgcactccagcctgggcaacagagcaagactccatctcaaaaaaaaaaaaaaacaaaagaaactgaaacttgccacccctgcactctcactcctccctacttcatttcccccagagcattcatcaccgtctaacatgttctacattttgctagaatgtaaaacctccgaggacagggatttttttgttgttgttccctggttatctccactgtctaggatggcatcacagcacataggaggtgcttagtaactattgcttttaatagcaaaaaccacaattacttttgcaccaaactaaatacttgttaaattaacaaatttatatacagatctggtgccctgctaggtggtggagatataaagacccagctgcctgccctcaaagggctcacagtctaatggaggaggggaataaagataagtagaccatgcaccaaggaatggggaaaggggagtggtttactagagacagagtttcagttttgcaagatggcaaagttctggagatctgttgcaaaacaacgtgaatatactcaacactactgaactgtacacttaaaatccttaagatgatacattttatggtagctgctttttaacataattaaaaatttttaaataacaaaaacaaagcaccatgggtagtagctgagctgctgaragcacaaaggtacacctagcacagagggagccagcaaggggacttctgggagaaggcaacaactgagaaaagtcctgattcacagcgttcagcacgtgagggtgctccatgcagagggaacagcagggacaaaggcaagagcgcacagagaaccccatcagtgagacctggttgggtcacagcgagaagggtgaggggtaaggctggagaagtggccagggactggaggttggggagcctagggcttacccagaaggtgayagggagccatagatgacttttcagcagggcgatgttggtcagatttctagggaagtgtggaggctgagttggaagggtggggctagaggtcaagagaccagctgggaggccactgaggtggcagcagcctgaacaggaccagggcaaagggaatgcagggaagcatgtggttccagggacatttccaggtggaatgaccaggttgtggtaactgttgtcttagttgatcccagcttcttcatcctctggggaggaggccgagttattcaaacctccaaagcccttgaggaaggagtcagagcagggtgagggcagccttgacgtcactccccagccctccactggctcttccctctttcccagtatactgaatcagaaaggctttgggagagctgggcccagccccaagagaggaaaactcggtagtgagcagaggctgcagtgggggcgtggtgagaaccagcctccaggggcctcggttctcatgccctcaagggtcagaattaagtggggcagttgttagcttcagaaatccaggagactcagttcagcctggccctgagggagaggcctagaggggaagccagcccagccggatccctcagggcagctagccctgaagttctcaggtctgcgtgtccccaaagatgtcctcctgctggtcctgaagacagaaccctcagggacccggccctggrgcccagggaatccaaggactaaatcttgctgtggaggaacagggacttctgtgccaccagccccaggcctcaacagccccctgccaccttccctttcctcagctgcgccagcccctaccaccctctaagaacaacccacagaccctttttgttacagtatcacaatgtttttagccaccactcacttgaaaaactttatgtaccactattacactatgtgctttgatcacactgtatgccatcaaccccacaaagtagatactatcactattctcattctgtagaggaagaaattgaggcacagggatttgagtaacttgcctaagggtacrggagtcaacagcaaagtctcagctcctgggctcagccaccaacaacrtctcagcactccgagggcagtggccacagtctcagaaccccacagctccaggccctcgagccacactcatgccgcccctctacctagaatgctcttcccttccacttggctaatggagggggaaaagcatttcctctcctccaggaaatgttcctaaccaagtcccctgggaatcacccagtacctctcaggagaactttccacatttattatcttaccgttatccaagggctgatatgctcaatccctgcaccagccagtgagggaggaggccagagaccaagtttggctggttcctcagggtatccccaggtccccaagcagcgtctgcagcacagcagatgctcactgatgctcatccacctgtgatgcctgaatgcatgaaggcaggctccgcatagccctttcattcctatggatgtcccccacaccacccagccaccatttagaggcataagaacggggtccaagctaaaggtcaggtggttcccccacccccagtctcaaggagtccatgggaattgcttaatggcctctgattgtgtagcctgcccagacatggggatgtttgagaattctggaagaacgtgggctgggcgtggatagagacgcctgctccaccatgtatgctggaggtgtggattacaacccctgtcccccattggagcttcccgcgccgtaattagccttgatcgcctcatcctggcacactagggccagccacctagcaaatgagtggtccccacactccatccccatccgcccacccctcacagccccgcaggccagttgcccagatccacagcccttactgcaaccccttcaaatccagccaccctgagagatcctggcctgggagaactctccttccctggccaaagaaacgacaggagagtttactgtctggaatacctggtggagagagaacagaggagaggaagggtaggtcagcccctcttgcccctccccaccgcaaatcacacaggcccacctccccggagtgggtttagggagtctgcacctcccagtccccgcccccgccctctctccagcgcccgccgccctccccgtcgcgtttcctgcccccaccccgcccctctgcgctatttaaggcgcccccgccgctcgtgcggtccagcagggctcccgcgggcgtcactccggccatcgtccccacctccacctgggccgcccggcaggcaggcggtgagwcgggggctaggaagggaccaggggcgccacctgctcgcgggaggccgggaggagtcttgggtcctccgatgccgggacgggggttgctgcggaacgcccgccgcgacagagccgcgctcacccaggtggccttggccaggctcccaccctctttccatggaatccttgtaacaacccgaggcgggaggaatactattgtttccactctatcgtggaggagactgaggggcccagaggttgttccttatccaaggggccgcagttactaaaaggcaagatttgaacccagggccgcttccagagcctggctctaaacagctttgcacttgggaagaggcacctcccccttgggaactttgtggcctgtgcctcaccctgcaatgacaattcctttcaagagtctagaatttgccagcatcagctttggaggtggaagggggtgggagtrgaggtggaggaagaagacaggaccaartgtccctcctcaagtggcaggtggtcattattgctgaccggwggagctaaaggatgatgctgccttcagctcctaaaaccccttccrctacccagcccctgcaggctcaaagattagagtgaagccagctgggtaagatatgaggcggggagcagggacctgaggctttgagccccctaagaagcagaakataacacctctaccatcatcactagctcccactgtctgggggtagccagccttgggcaaaagggaggaagggcttagcccagctgcacaactttggataagttcctcaaattctgttcccataggcaaaggagcctcaactccacccagatttccttggcctgtgtccatcctggggcagtggctcggggacaagagggacatagatgtctgattaggcagggaccttagccaaagcagaatgagaccatacaaagaggtgggcagccatcatccaaaaatctgggttgggtcctgcctgcactgctgagtgggagcctccaggccagtccttccccttcctgagcctgggtttctttgtaggtagaacgggcgtggcagacctccctgcaggcttgttgctgggcgaacgagaaggatgccatgctgacacactgacgtgctctgtctccttgcagacrgaggcccgggagccatgggtgactggggcttcctggagaagttgctggaccaggtccaggagcactcgaccgtggtgggtaagatctggctgacggtgctcttcatcttccgcatcctcatcctgggcctggccggcgagtcagtrtggggtgacgagcartcagatttcgagtgtaacacggcccagccaggctgcaccaacgtctgctatgaccaggccttccccatctcccacatccgctactgggtgctgcagttcctcttcgtcagcacacccaccctggtctacctgggccatgtcatttacctgtctcggcgagaagagcggctgcggcagaaggagggggagctgcgggcactgccggccaaggacccacaggtggagcgggcgctggcggccrtagagcktcagatggccaagatctcrgtggyagaagatggtcgcctgcgcatccgcggagcactgatgggcacctatgtcgccagtgtgctctgcaagagtgtgctagaggcaggcttcctctatggccagtggcgcctgtacggctggaccatggagcccgtgtttgtgtgccagcgagcaccctgcccctacctcgtggactgctttgtctctcgccccacggagaagaccatcttcatcatcttcatgttggtggttggactcatctccctggtgcttaacctgctggagttggtgcacctgctgtgtcgctgcctcagccgggggatgagggcacggcaaggccaagacgcacccccgacccagggcacctcctcagacccttacacggaccaggtcttcttctacctccccgtgggccagrggccctcatccccaccatgccccacctacaatgggctctcatccagtgagcagaactgggccaacctgaccacagaggagaggctggcgtcttccaggccccctctcttcctggacccaccccctcagaatggccaaaaayccccaagtcgtcccagcagctctgcttctaagaagcagtatgtatagaggcctgtggcttatgtcacccaacagaggggtcctgagaagtctggctgcctgggatgccccctgccccctcctggaaggctctgcagagatgactgggctggggaagcagrtgcttgctggccatggagcctcattgcaagttgttcttgaacacctgaggccttcctggtgcccaccaggcactacggcttcctctccagaatgtggctttgcctgagcacagacagagtcagcatggaatgctcttggccaagggtactgggggccctctggccttttgcagctgatccagaggaacccagagccaacttaccccaacctcaccctatggaacagtcacctgtgcrcaggttgtcctcaaaccctctcctcacaggaaaaggcggattgaggctgctgggtcagccttgatsgcacagacagagcttgtgccggatttggccctgtcaaggggactggtgccttgttttcatcactccttcctagttctactgttcaagcttctgaaataaacaggacttgatcacaagtaggtgtgtattgatgctatcatgatgtgctgggggttgggggatagagttatttkgcccaggcttcctttacttcttggtcctgtataatctctttggtctctataacccccgattccagccaacaccttgaaccctcaaactcataccttctgcctccaacagccctgatttctaaatgctctgccttttgaaatgcctcagacactatcttcttttcatccccactgctccagcgcattaatcagtggtcaaagcataaacgtccttgccctccctcccccatgcccatcgtcgccctggccacactgccccctgcaaagtgcttccttactggatggtttgctctccaagcgtgcctgccagccaagcccttcgcagtccagttcagatgggccctgcactcatcccacctcatcctcatccttggtatttgggaagggaggtttaggtcactagtccttcctaccttggccctttctagtctgcccaccaggagaagcaactgaaggatttgcttcatatctgctctccatgcacccagacctcagtgaggacaatggcaatgtacagaagtggaagagactgaatcttgccaatgagccacaaaggctgcagaaasaaaatgaacaattgaactgggtcttgactaggagttcactggggagggaaagagaacactgagmattcaagcggagaaaactgtttgtgcaaagtcagaggagggattgacargctgagggggcatttaggtcctgatgagccacctagatacaggaggcgtggctgaggatgggcccactgctggcagaattgacctatgtggaggcgacccaggtaggggagagcactaggtagtgaccctcagaggcaagctggttgtcctcccttcccagggacatctggggctagggttgaagaaggaaagggggtctctctgatgtggccacatgcttctccttgagagccacaatgccttcacagcaggttggcaagttggcccctctcccatcaggatgggtgttgaaaacaccagctctgtacccctcatccagagctcattcgctcactcgctgctyacccagcgagtctgaatgctcagcctaataaattacgaccctcttccttttccagctgtggttcccattgttccctctgaatcgctgaaatcgatcaggccagcttcctcatggctcccagattcacccagtatgttcccaccctgcccctgtgtcagcatgcagcgtccctgccccccacacttcgaaactccacaaatcctttaaatactactggaccctggaaaagggcttggtgcggaagagtgagatgagcttatcaccagagggccctgaatttaaatgctgtggtctggagtcaatcatttcgcttctctgagtctcagttttctaacctctaaaatgcaaataacatcacctgcctcacaactgactggaaaccaaataagtgaaagtatgtgactgtgcctggctcagtagtcatgcagtaaaattaagctcacacctttcagccagactaacataggctcttcctccaggaagcgctctctgacttctccagctagtctccggcaatgacctctacctctcagggatctgaaccactgcttgattgagtgaggctgggctcaatcctgaaagcctcaaaaaggaggctgttcacatactggaagtccatgaccactggaagttgaggtccctgtctaagagattctcctccagccagggtgagaggccagaggctgcaggttagaagccagcgttagagccagcattacctgaggggcttsagagccctggtttggtgtttctgttatccccaacctttcctactttggaaaggtaggagaagaaaggtttcagtgagcagaaatggcatccttcccctccctcaaagctcacccactctgagcttggtgtcagagccggggtcaggctggggctcwggaacttggacctttggcaagacaagttgggtcctaractggcggccacacaaacacaagcacatatgggctgggggtttaagagtgaggacagtgtcatggggctgggatcacaccatttgggttgrgggtatggtgaagactttatggagagaagagtggctgtaagccccatcccacctgtattcccttgccaaggctactgtaccaaagtaccacagactgcacggcttaagcaacagaaactgattctcagttctgaaggccagaagtctgagatcgagatatccgaagggctggttccttccgagggctgtgagggagactgttccaggcctctctcccagctctggtgttttgctggcaatctttggcactccttggcttttagacgcatcactcccatctctgccttcatcttcacctggtgttctccctttacctgtgtctctgtgtctaaatttcccctctttataaggacatcactcatattggattaggacccaccctaatgactttgatctaacttgattacctctgaaaagaccttatttccacataaggttacattctgaggyattaggggttaaaacttcaatatatctggcaggaggcaccattcaacccataccaccaccctcgtggccccacctcacctccaagcactggtcaggcacggggctctggagaatgctaggtttgttggacgcaggcatctccttggtgatgtcactaggatgaaacacrgcaggttcacacctttcttttcctttgtttccttcttcctctcaccagcctatcccttgctgccaccaaccaaaatctaagttgacagctagtggctctcagttagagaaagagccatcgtttggagttaggagacttggctcctacctcacacctctcatacgcacttgactatggctctttcccttctctaggcctcaatttccccattgtgaaatgaaagggttggatgagaaacacgtatgtgacaattaggtatgaggagcrttgcgtgtggtaacctgtcactgatcattgatctgaaactcatgagtgatgtgctatttcgcatgaatcagaaaaaagtcaaggttgtttctacaataagattaattccagtcgcttaaattcacattgccttcctaagtaggaaagacagggatggggttatgtggagtgcactgggaattttgcataacccaaggtcatcttatctatgacggatgggagcatgagaacatcacrggctgcacataaacaaggctgtcaagctgggtgatgtcaaaacttcttcccagtctaacatgctggctcactggccactggcttgccagcctcatggttctatcacctccagttccttgactggggattcttcgttttcacaccaacctcagcatgactattgacgtttgcaggaagaggtatccatcacaggattgtcagaacatctctctccacctttaagaatctctctccagacttggctctgatcccagagccacaggacacccagttctgtccttcccaaacagtactgcagccacatacagacagccaccaggttcagcctgagcctgctctcctcctattcctccagataatcctgatttccagaagtctctggccaacctgcaatttgtttactttcctctytttttttttttttttttttttttttgagacgaagtctccctctgttgcccaggctggagtgcagtggcaggatcttggctcactgtaatctctgcctcctgggttcaagcaattcttgtgcctcagcctccccagtagctaggattacaggtgtgaaccaccacgcctggctaatttttgtatttttagtagagatggggtttcaccatgttgactaggctggtctcaaactcctgacctcaggtgatccacctgcctcggcctcccaaagtgctgggattacaggcgtgagccaccatgcctggcctaatttcctcttaacatrtgccaccctccctgtatgctggataygacactccagttggtccgaatccagattattgcctctcttgccccaaaacttctacctctcttaatgcaacctaagattataattttttttattttctcctcctttacatatatataaattcttttgaattataaagataatgcatgatcattgtagacagtgaatgagatcctaccatccagaggcaacaactgttaatattcagaagtaattccctccagccttcttccatgcatattttaaaataaaatcttagtaaagatatacctacaattttatattatgcttttttcattttatgataaatcattagttttttcccatgtcgttaagaacatatttttggaaataccacttaaaggctttatcagtgcctacttaaaccatgaccctgatattggatttttaggatgtttgcaactaatcatcctctactataaatkgtactgtgatgcagatgtctgtacctaaatgttttccaaatttctatttccttaaaagaaaaagatattccaagaagtaaaattactgggtcacaaagtaggaaatyttaaataaagaaaatttaggggcttttatctgattgtgaaagtgattcattgtgggtgactcagaaacacagaaaagcacaaattacaagaaatgaaagcacaaactgcctctgagtgggaattggggtggagctgaaaacaggagagttcattgaaagcacctcggcctggggattccatccctgcactgagcagctaggtgaccacatcttcccaactctgtgaagaggtggaggtttattctctggagaggataaaacagagaaatgcagccrggtgcagtggctcacgcctgtaatcccaggcgggaggcggaggcgggcggatgtcttgaggtcaggagttcgagaccagcctggccaacatggcgaaaccccatctccactaaaaatagaaaaactagccaggtgtggtggtgtgcacctgtattcccagctactcgcactccagcctgggtaacagagcgagaccctgtctcaaaaaaaaaaaaaaaaaatcgagaaatgccaggcataattgagggtaggagcaccataaataaaacagaggaattaagtggaagtttacatactgaacagtgggtccttctgccttctcccmaaaattggcttccaaaacactggctgatggatcaggytttgaaaaaaaaaaagagagagagaatctgatctagcctgaggtcatagaagcctgcctgcaggaggtgggcttcagaaagcctaaaacgtgagaaggaatgagctaggaagagatggggaagagcattccaggtagacggaatagcactttcaaggctctgaagaaggaggaaggggcttgatatatttgttgttcagggttgtttttgatacagactgccaagctgctttccagaaaaaaaaattacttattcgttcaatagcattgtatgaaagtgctcatttcaaggtatgcatacaagcattattgtaatttttaaattgctttgcctattattaattattaaacagggaaaaaatggtatcacgtttcatgagggaggcctgattactagtgagtgtagacttctatgtgtgtgwrtgtgtgtggcaggtcttactctgtttcccagaytggagtgcmgtggtacaatctcaactcactacaacctccatctcccaggcttaagcaattcttgtgcctcagcatccctagtagctgggattacaggtgcgtgccaccatgccgggctaatttttgcattttcttgtagagatggggtttcaccatgtagcctaggctggtctcaaactcctggactcaagcaatccacccgcctcggcctcccaaagtgctgggattacaggcataagccaccatgcctggctagtgagggtagattttttaacgtatacttcttcagcacttatgtttgttctatgaatgttttttgcccatttttctatcaggttttactattttctgatcaacttgtataaactctttataggtagaggatatcaacccttcatctggcatatgttataaaaatttttctgtattattttgttcctttgtctgcagatatttttaatttctatgtagtcaaatttatggatttttttcctttccagtaactttaggcttacactgttatccccttttcaatattatttttaattttata

SEQ ID NO: 10020 - DNA, 67126 bp, Homo sapiens
aggcaggtggatcacttgagtccaggagtttgagaccaccctgggcaacatggcgaaaccccgtctttactaaaaatacacaaattagccaggcatggtggagtgtgcctatgatcccagctacttgggatgctgaagcacaagaatcacttgaacccaggaggcagagtttacagtgagccaagatcacaccactgcactctagcctgggtgacacagtgagactcagtctcaaaaaaaaaaagtagaaaactcatcaagctgtacagctaagttctgtatacctcatatatgaatattrtatcttaattaaaaggaaaagtctattaacaaaaagagttctcaaaaatgctcaacctgaacctccttagggggttggcagaagcattaactaaagctctcctrtatttcaccaaaatgtgttggcaattcgtagcctgcyggaggaagggaggtgtgagctgttccctgtgttcagctggacagcctcccactctctataggcgcttcttttagagccagctccactgctggtcctggaggttttttggggaaggcgatcaaaaaatttacaatgtccatgactactatagggaatagttctacgatgctggctgcgaaaaccagatcaacttattaggcacagtagacacagtgataattttactgtcccatgaaaatgttttaattttaatttcttttgaaatcagaacaaaaataagaatactgtaataatgagcatataataatgaattcagccagcgttatatgtgtctttataatgcaattggaaactctcattttaaatttttttttttgaaggaaaaaggggtccttaaaggcaaaggtgcctggggcccacacaagtcataatgcagccctgagtaaaaggaaaggtgctagggactgaattgtgctcccccaaatgtcttgtgttgaagccctaaccccccaaggtgactgtatttgaagataaggcttttaggaggtaattaaggttaaataaagtcataagggaggggccttaattcaataggattgttgaagaagaggaagagagagagaaatctttctccctgaaagcacacacttaaggaaacaccatctggggacacagggagaaggtgctgtctacaagccaggaagagagccctcaccaggaaccaaataagctccccatgctgawcttgaactctctaacctctagaactgtaacagataaattcctattgtttaagtcacaccagtctttggtattttgtgcaatggcctcagaygtcactaaatgacattgattacattctattaccccaaaaccctagttctatcttcattttctgttattgaactttaggcttcaggttaggaactaggcaagcttgcaatttgttaggtargtaggmattctttttttctctgcctatttgaaggactacctactttgaaggttgcagatcagcagcagaaaaaawttttttaaaaagctttttaaaaaaattttagaagaaatcaaaggtttttttggtaataaaattttattggcttggcatgrtggttcatamctattatccagcactttggaggctgaggcaggaggatcactttagccagggaggtcaaggctgcagtgagctgtgatcatgccactagactacaacctgggtgacasagtgagactctgtctcaaaagaaaaaagaaaaaagcacagaaaaataaataaaattacttataaatgtgtgaaaagatttttaatctcacttataattaaagaaatacaaatcaaagcatcctaattttattttatttatttttttttttgagacggagtcttgctctgtcgcccaggctggagtgcaatggcgtgatctcggccactgaaacctccacctcccgggttcaaacaattctcctgcctcagcctcttgagtagctaggattacaggtgtgtgccaccacgcccagctaattttttttttttttttttgagacggagtctcgctctgtagccaggctgcagtgcggtggggcgacctcggctcactgcaacctccaactccctggttcaagtgattatctcacctcagcctcccgactagctgggattacaggcatgcaccaccacccccggctaatttttgtatttttagtagagacggggtttcactatgttggctaggatggtctcgatctcctgacctcatgatccacccacctcagcctcccaaagtgctgagattacaggtgtgagccatcacgcccagcctaatttcttgttgcccagactgcagtgcaatggcgcaatctcagctccctgcaacctccgcctcccaggttcaagagattctcctgcctcagcctcctgagtagctggaattacaggcatccaccaccatgcctggctaattttttgtatttttagtagagatggagtttcaccatgttggccaggctggtcttgaactcctgacctcaggtgatccacttgcctcggctcccagagtgctggaattgcaggcatgaaccaccgcgcctggccaatttttgtatttttaattgagacggagtttcagcatgttggccaggctggtctcgaactcctgacctcaggtgatccacctgccccggcttcccaaactgctgaaataataggcgtgagccaccgtgcccagccycaatattttttaaaataagaaacaaaataaataaaatcacagattgcatttaggtacttccatacattgctggctgcaatttctttggagggcaatttgacaacaatcaaaacttaaatacscatttcctttgatccaacaatataaaagtatttccaacagttctatttgcgcatgattgcaaagatttacatccaagaatgggccaggagtgstggctcacgcctgtaatcccagcactttagsaggctgaggcaggcagattgcttgagcccagcagttcaagaccaatctgggcaacatggtgaaaccccgtctctacaaaaaatacaaaaattagccaggagtggtggtgcacaggtgrgaggatcgcttgagcccaggaggtagaggctgcagcgagccatgatcatgccactgcacgccagacttggcaacagagtgagactctgtcccagaaaaaaacatttttaaaagatacaaggatgttcattgcatcatttccagtaacaagtgacaagctaaatgcccaagaagagactgattaaataagttacatagtggatcaaaaattattaacgtaagtatttctagccttcccctaccatctgccagctacagataatttagtcttgggtcaactttctcctctccctctacaagggaaatgttcaaaagtgtttagactttggtgatgcagcatgattgggaaagyagagggcacagaaagatgccaggctttgtggtctccaggcaagctcaggaatgtgacaaagcataccgaaaagaaaagcgggctgggagcagtggctcacgcctgtaatcccagcgcttcaggagtctgaggctggtggattgctggaggccaagagttaaagaccagccaggccaacatggtgaaaccccatctctaatgaaatccaaaaaaaaattagctgggcgtggtagcgcacacctgtaatcccagctactcgggaagctgaggcatgagaatctttggagccggggatgtggaggttgcagtgagctgagatcatgtcactgcactccagcctgggmgacagagcaagactctgtctcaaaaaaraaaaaaaraaaaaaggaaaaggaaagataaatttataatgtattgccaggaccacacaaacccttcatatgtaccaggaatgcaagtagaggaattgagttattttgaaatacttgttggctggtgatttatatttcattgatttagacactgctctgagtatggcttcagaagtgttacatacgcakaataaaatcctttacagctattaaaaggagtgaggtaggaaagcatactgctaaaagcaaagaagccagatgagaactgtgtactgtacatccccacttgtttaaaacgtttgtatattatattcacatatgtatgctttccactacatagaagttttctggaaggtatttctgcacatttataaagatgcacrtctaataatttcatttccccccattttctacttattgctctgaggtcaacactgaatagtccttatgaagatggtattgaatattctttcaacaaaaaagtctccggatctcaactactggagctcagaaaacgataccccaaagtaggaggctttggcatgctaagtactttgaactaaaggagattaggtctcagtagcagcctcagaaacaaagtctacccatgactttctcctgccctcctgtctccagcggtcttgcacccctgaagtaagtcacaggaaccagaattcttcttccccaaggagggttatggaaacttagaaccttcaaagtaatttataaacttggaaatcttactgtaacattttcttctacctctctctgtctttgagacagggtcttgctctatcacccaggctggagtgcagcagcatgatcatagacaactgtagcctcctgggctcaagcaatcctcctgcctcagcctccttagtagctgagactacaggtgtgtgccactatgcccagctaacttaaaaaaawttttttttttgtatagagggagtcttgctacattgccctggctgagaatttacatttctaacaagttccaaggagatgctcctgctgctggtctggggatggccgtttgaggatccctgcatgaaggcatacacaggacttgatcctcagtgggggcaccaggagctggagcctggggagtgggaagcgagagcacagagctgactgaggaccacgaggtcgtcgtggaggacctaggctgaaggtccygaagaaatccccatagtttcactgccaggccagccaggtggacatctcagggctgaggaggtgagaaggcaagacagaaagtgaaacagcactttataggatagggatgggaaggtcatctgcatcatgggactccttggggaggggttcggtcattgcbccagatgaaggtttagtcttttcatcgtaaatttgctttcactgttgggaaagagatcttcacctccattttcttaacttcaaaatggaaatgacagatgcttttgagtggtctgaatacttgaaatttgagggaaaaygttaccagaaacacatacaactagagttaaagataaatacatatatcaaacgcatggctcaaaaatgacaacgcgtcttctttatctgccttcacgtagaacttaaaacagaccctggtccccacctcgggrtttcctcgcgcccacgggctgcgctgcgcagctgggccagcaggtggcgaggctcccgcactttttttcccgggcctggccgcaccgccaccgcccaccccgcgctccgccccgccccgccccgccgcactcgcggatcgtcacacggtcaggccaccgcgcgtcaccgccccgggctctgctagaaagtgccggggtccagattyctttcaggtgactgggttgggaggagaagtcgctcagcgtaattgtcggagccgaaataaacaragactccgcggccgggcgggaccttacccggaagtcccccagaacagcactacccttcgctgaaacctcgcccgccccctccaacccagagacgaaaagggaaagcatcacggccagaaaccgttggcacaactccacagatactctcccgggccgagccagactccataagtcccgcgcctggcccccggggattgcaggggctgaggagaagggcaacacggggaccttgaagcggggtcgcggsggcgccccagcccgggccagggagtcccggcagcggcacctcccagaaagggcggagcygacgacgccttcttccttcctgaccggcgcgcgcagcctgctgccgcggtcagcgcctgctcctgctcctccgctcctcctgcgcggggtgctgaaacagcccggggaagtagagccgcctccggggagcccaaccagccgaacgccgccggcgtcmgcagccttgcgcggccacagcatgaccgctcgcggcctggcccttggcctcctcctgctgctactgtgtccagcgcaggtgagcggtcgccggccaccgggacgccctgtggggacgtggcggggccgagagccggggaaggcgacgggcccagcgacggctcaggcccgggtcctggggaagttggtctggcgatggagagctcggaggttcctcacttgtcctgtttctgtctccggccacgctctctttcctgtggtctggaagagggtggcagtgggggcttgggtgacctgttctgagcttgttccatctgtggtcacctaatttctctgtgtaggatgtggcaccagaagaagggaggaaagtgggtagagtgggatagggacactacttgctttttaaaaaattctgctacatgcgcacgaactccaaaatttaggagctctaaccactttatttcctcttctcatcacctgaggatggaggtggaagcagaggtaaagagacacaaacttcctcaagcacccggtgaaactgccttgagtacttgacataagtcagcttggtcttctaaagagggcaggttacttttcatcaactcctttttacacctcaggacactgagactcacagggcggtattgaatttccccttgtcactattagccagcgacaggatggggcctggaactcggtgtcctgctgactccttctgggggcttttgcttggtttaatagctttgggaaagagcacctcagtatttgtgtgtctgtagtttcctcttttaaaactggagtggggcagtgtcacgctgtgactcgttaaaccaaatcaggatgagagtgcctccggggaattgtgtccttgtgcacattaacgcccctcacataggtgtggcgtcaataggaagtggtgartcaggggagagggggttccgtggactagaaaaaactctccttcgacttctatttagttctcagaaggggataggtgatgttgatccaataatggactaagagccaggagaagggctccgcgggaggatctcttgagctcagcagttcaagaccagccggggcaacatggtgaaacaccgtcttaaaaacattttgtttttcttttcattgttgaggttgaggctgctgtgagctgtgatcacgccrgtgtactccagcctgggcaacagagcaagaccctgtgtcaaaacaaaaaagagagagaaataaataatagcaattatgtgccktagagaaaatgtggctattctgtttccctagagttttttaaaatttatttttaaaatttatttattttagagacaggttcttgctstgttgcccaggcgtgggggcagtgtcgccatcatagctcactgcagcctggaactcctggcctcaagcagtccttccaccttggcctcccaaagcactgggattattgtgagcaccactcctggcccctcctagagttttagatcaggaccttaaataggcttcccttttttttggagacagagtctctgttgcccagtctggagtgtagtggcgcaatctcggctcactgcaacctctgcctcctggattcaagcaattctggtgcctcagcctcccaggtagctaggattacaggtgcccaccaccacgcccagctaatttttgtattttccgtggagatggggtttcaccgtgttggtcaggctggtctcgaaatcctgacctctagcgatccgccctcctcttttggggattacaggtgtgagccacctcgcccagccaggcttcacattattaagtagccatctcttaagtattttttaaatctcaagtacccaaggctgatggccaatgagtgcttcttttatgacatttgggataggtcagaggtttgttgtaagtctcttgcaaaaatgcctggaggccttttcaaggtctgtaaaccttaactggaaataatcctattattattttaaaaattcctcatgtctgaaagctttcagtgcacctgaacagattggggtggagccatgaagccaaacagattgggagagagagtgtgtctgcttttagaattcgtaccgatgatagcagctcattagcttcagtctgagcgctagtagagttctatcatggaattatggactagttgtcctgtgtaagatctgaaatacatgttggggggatttttgctttttcttaatgttcaatatgtacagatgatgtaataacattactagactgccttgtttttaaaaccctgtagtcatctaaaaactatatgcagttttgagacatagcctttatttttcccggctgtaattttggtaagctttatcttgagggacttggaacatagagaagcctgggtagaaattaagcattaaaatggcttttcctcagaagactgggaatggttaatcttttgacctgtgagtgattaagaacaaccatctgaaattggaatgactgtgggaaatctttccccatctttcccactccttgactgatgctgtgatcagaaattttactaacataagtaatcaaggggaaaatgagatttttttaaatttgagccagtgggcagagggaaaaggactcgctgaataggcctttgtattcctccagtgtttgttatattacccagaacaaagaatcactctggtcatgaagacagtgtgctctctctttcctgggtaaccctccactcctaaaagggatgcagtattctaagcatggcagattacctacagcggaagcctggatcagtcatctctgatctcgggtgcccctttctgscctttgacctccagctctgtgaagggcatcagctctccagtcaaattgaactgcttgctagcaaaatcctgcccatcttccagggccccatttcacatgctamattatctacgacatycttgtcctgttsccctaactagaatgccttccctctgaagttctgaatctttatttaaactgctgcaacagcatttgctgcctcattaaaagaccttggtgtgggtcttgactcttctctgttcccaagagtgatcttgggtaagccagttatcctctggagcctcagtttcctcctctgtaaaattggattaactgtgccaactatgcttgtgaaagacaaatatttcctaattgaactaccgaattgcaggctccttaagagcaataactgttgctctccaatatcatctacaaatgtggccaggacacttgacttgggactctttttttttttttttttttttgaaacagggtcttgcactgtcccccaggctgaagtgtagtggtttgattgtggctcactgaagtgttgaccctgggctcaagctatccttccacctcagcctcccacgtagctgggrctgcaggtgcatgccaccatgcccaactaatttttaaattttttgtagacacaaggtcttgctgtgttgcccaaggtggtcttgaattcctgggctggagatcctcccaccttggcctcccaaagtgctgggattacaagcatgagccaccgtgctggccctggaatcttttttttttttttcaagaccaggtcttactttggttgcccaggctggagcgcagtggcaygatcttggctcactacagcctcgacctcccgggctcaggtgattctcccacatcaagcctcccgagtagctgggactataggtgtgcaccatcatgccctgctaattttttgtatttttagtagagaaggggttttgccagcttgcccaggctggtctcgaactcctgagctcaagtgataccatccacctccgcctcccaaagtgctgggattacaggtgtgagccaccatgcctggcccactgggattctttgatcataagatatttgggccttgaaatggattttggggagagacttagaaactagtggcaatcaaaattggatttgcagttggtttctaggtgatggcagtgatcagctgcggccagccaggtttttcttcatctggactgtgcctctcactttcaaatttttggaacatttgctttggcarcaaaactttyaaaaaaccaactctctctggtgcaggtgttctgttggaggatttgagagaagctttaaaattttatcttattactgtcccttgcttaggtcacaagaggagctcaaaataatttcataaacatgaattggctkccctagacacaacaaaggataagatcaaaagaattaacccatttaaaaaaatcagtctaggctggtcctaaggtagtgtgttatcaattgatcaaagtcagttacagatcgaactccttgatctactctttcctcctgctcactactgcacttgactagtccaaaacaataagtaagtagtaaaaaaaagaaaaaaagtccgtctatacactgtaaagtgctgtgtaaatgttcataattactatcactgtcttcttcatagttgatggrgggaaggctggatacataaaaaaatggtaatacagtaagaagtgctcagataagaataaagataaaatgttatggagagtccatttttgagctgagctatggaggatgaattaatgtatcaggtggacaagaggaaaactagagaaaatagtcgggagagttgcctaattgttgccctaaactattgaactgttcacttgaaaagggtgaattttatggtatgtaaattacatgagtaaagctcttaaaaaaatttgcagggtgctatatactagattacataagactagagacaaaagctacccaaattttgcatagtactccattgctatcacatccgatcttgttttatcctcacagagcccctttaaggtaggtgtaatgctgtttttcctattttatagatgcagacatcaagggtcaaatttgtcccaaggtcacatagctagtagatggcacattgggtgcttcaactgccatcttctgacttctgtgccctagttttttgaaattcaaggctagattattggtgtttagcaagcttaattgaatgggtgttcagcagatattccacttggttagtagagcagtctcattcaaggcctggttccgtccccagtgtggctcttccagtagtccgtaatagatcaggaatgggtttagcctgctggcctgacccctgattcagtcaccacactgtgaacattccatagggaaaaaactgcagacagtgtatactgrcacccactttcatagttttgttttagttttgtggctcctaaatgtctaagactaactagtaatatgaccttgggtgagtcacataaaaaaccagaagctaaaggggttatctgtaaaacgaagagttggactagctgagcacacctagcactcaaaatatatgacttaaacacccacatgcaggcaggcctggtgcacacacaaattatcctttgttatgtagatacgttcatgccaggttggctataaaacacttccagagatttccgtcaatagaagtcagaccagcccggcagcctccaccctaaatgccctgccatatttgtttggtctgcctccctgactccaaagaagcagcaggcagcttaatctctggacaggattcttcatgccactccctccactccagcctgtgttgtcctgactggccaggccagcctctgctctctggagaagcaatgaggtagggaagttaaccagcaagcccctctcctccatcgcctcactggagcttgagctgggtatctctccatgttttgccattagctttacccatccaggacaggggcacaagtgttggtgccaagccctgcactcccagctctggtggatggccaagtcctaccctggggttgaggactgtcagtgatactgagtaagggagtcattgcttgacaactgcctagagagatactttaaaagataggaatgggaggcattatttctacaagtgaacaagtttatattgaaggaacacttgtataggatcatcatggatgggacagttcatctccagtgcattctccaattctgaggatacatcactgcacaaactggactagagtttaaatggtacagaagctgggggtaggggaggcaggaggacaagggggatgggtggagaatgcttaacttggtgttcaaaatcatgttatttatgagccatgtgacctcagagtatctttgagcctgagttcacttacctgtaaaattctgctgtgctactgcatagagtatctgagaaaatgaggcatgcagtcgatgtttggtatttttgtttcatttatttattttactgccatgcctcgagaacaatagatgttcaktaagtatttgaatatgttagttaatgctttaggatttcctaaaggcagtggaatagaattctcactgagttcagagcttttctgataataatgtgtgcttatggagctcctgaatggggtccaatttagcagttgctatagttgctgagatatagcacaaggggcatttttttttttttttagatggagtctctctctgttacccaggctggagtgcagcggtgcgatctcagcttactgcaacctccgcctcccgggttcacgccattctcctgtctcagcctgtagctgggactacaggcacctgccaccatgcccggctaattttttgtatttttagtagagacggggtttcactgtgttaggcaggatggtctcgatctcctgacctcgtgatcygcccacctcggcctcccaaagtgctgggattacaggcatgagccactgcacctggcctagaaggggcttttttttaacctttcctgaactgttcctrtcgttgaaagaagcttccctatccagtcattttcttagtaattaaactctagagcatgttgtgaaatatccatatgatctaacctttaaaaatagaaactctttagctgtgtaactactaaattctgggtagaagccaaaacaatcagcacttctcatttctgaacttagataatccarttgtactccctcagctcattgtgagttttgacaagttctgcatccatgaacaccagatgtaatacaatagggaatttcaaaggaaggattacacacctaggctctgccctctaggattttaccgtcttacaagggagttgagacaaaagtgagaaaatactctggcaacttctcccaacatcacaactttgcaattctcataaattttgcttgatcctagggcatgaccaaggcagaggcaggcaggtcctacttcatgtgggagagaaggaaggaagggtaggcagttagagtgataggtttggaatactgtagaaaggagagtgggcagagccagagtgaggtgtctgaagcttgtcgcacaggcagtgggaagggtgggttggaggtttctgagcaccagaaaactttgagcattgttccggaagaggcaagcggcaggcatctgcaccagagacactgccgggtccgagtgagggcaggaggctgcacgagggagcctccctgggagtgagcgataggttcgctatgggaggtgggttygaaaggtgcctgagattttcatttgaaactctgttgaagaggaattggcaatagaggaggaaatacaaatagaggaaagattggtttcgtcttaagcactgaggctgttgggcagctagtggaaagtgctgctggagagaagctggagatcactgaagctgagagaggggtttgtggatataattagagcagtgtttctagggaggtgcaggtgaagggactgagagagagatgaggttaaaaacacagaagagaaagagatggaggtgtggaggcccctgaggtggagcagctgcagaggcaggcctgggggccaggaggctggctctccactttcagctgttggtgagaagggagtgaaggctgagcagctcccattgtgcagctgttgagtgcacaggtgctcgtgctcttgcacacggtggggtttggggagggtgtgatgctacagggaggactttcatgatgcagctgattctcttttattgagagtctgtttctggagtcacctgctctgttttgaatcctggctttgccactgtgaccttggacaagttgtttagcctcagtgccttcgtttctgcatctgtaaaaggggtataataacgcctccctcatcaaactgttgtaggattaattgggttaacatattgagaggtgacagcgtgctggcagtcctcagagcccttgcttgctctcggcacctcccctgcctgggctcccactttggtggcatttgaggagcccttcagtcccccactgcactgtgggagcccctttctgggctggccaaggccggagcccactccctcagcttgcagggaggtgtggagggagagacacgagcaggaaccggggctgtgtgcggcacttgcgggccagctggagttccgggtgggcgtgggcttggtgggccccacactcggagcagccagccagccctgctggccccgggcaatgggggacttagcacccgggccagtggctgcagagggtgtactgggtccccccagcagtgccggcccaccggcgctgcgctcgatttctcgctgggccttggctgccttcccacggggcagggctcgggacctgcagcccgccatgccagagcctcccaccccctccgtggcctcctgtgcagcctgagcctccccgacgagcgccaccccctgctccacggcgcccagtcccatcgaccacccaagggctgaggaatgcaggcgcacggcgcaggactggcaggcagctccacctgcagccccggtgcgggatccactaggtgaagccagctgggcttctgagtctggtggggacgtggagagtctttatatctagctcagggattgtaaatacaccaatcagcaccctgtgtttagctcaaggtttgtgagtgcaccaatcaacactctgtatctagctgctctggtgaggacgtggagaacctttatgtctagctcaaggattgtaaatacaccaatcggcagtctatctagctcaaggwttgtaaayacaccaatcagcaccctgtgtttagctcaaggtttgtgagtgcwccaatcracactctgtatctagctgctctggtgaggacgtggagaacctttatgtctagctcaaggwttgtaaayacaccaatcagcaccctgtgtttagctcaaggtttgtgagtgcaccaatcgacactctagctgctctggtgaggacgtggagaacctttatgtctagctcaaggattgtaaatacaccaatcggcactctgtatctagctcaaggtttgtaaacacaccaatcagcaccctgtgtttagctcaaggtttgtgagtgcaccartcgacactctgtatctagctgctctggtggggccttggagaacctgtgtgtggaaactctgtatctaactaatctgatggggacgtggagaacctttgtatctagctcagggattataaacgcaccaatcagcaccctgacaaaacaggccactcggctctaccaatcagcaggatgtgggtggggccagataaaagaataaaagcaggctgcccaagccagcattagcaacccgcccgggtcctcttccatgctgtggaagcgttgttctttcgctctttgcaataaatcttgctactgctcactctttgggtccacactgcttttatgagctgtaacactcaccgcgaagatctgcagcttcactcctgagcccagcgagaccacgagcccactgggaggaacgaacaactccagacrcgctgccttaagagctgtaacactcaccgcgaaggtctgcagcttcactcctgagccagcgagatcacgaacccaccagaaggaagaaactccgaaaacatctgaacatcagaagggacagattcyagacgcgccaccttaagagctgtaacgctcaccgccagggtccgcggcttcattcttgaagtcagtgagaccaagaacccaccaattccggacacaatgtgaagagcatttaaaatagtgcctaagcctaggacaccgccagtgctttgtaagtctttgggtcctgctggcttaggttgcttctttcggcaggatgactttttttttgagaccagttttcactttgttgtccaggctggagtgcagaggtgctatctcagctcactgcagcctcaacctcctgggttcaagctgatcttcccagctcagcctccggagtagctgggactatgggcatgtgccactaggctcggctaatttttggctgttgttgtttttgtttgttttgtttttttgtttgttttttgagacagtttagctcttgttgcccaggctggagtgtaatggcacaatcttggctcaccacaacctccgcctctcgggttcaagcaattctcttgcctcagcctcctaagtagctgggattacaggcatgcaccccccacacctggctaattttgtattttcagtagagacagggtttctccatgtcggtcaggctggtctcgaactcctgacctcaggygattcacctgcctcagcctcccaaagtgctgggattacaggtgtgagccaccgtgcccggcctgttgttgttgttgtttttaagagacagggtttcactgtgttgcccaggctggtctcaaactcctgggctcaagcgacccacctgccttggcttcccaaagtgctgggattataggcgtgagccaccacttccagccaggatgacttttttttttttttttttttttttttggtcttctcwgctgtgtctctagaagatgaccttttgagaagcaaacctgaatgttgattcaagcccaaatttcctgggctcaggtgttaattttttaagtctttggaacctctttgccgaggtctcaagcaggtagaagacattaataataattccttatatttgattgcgtggtgctctgtagtttactgagtacttactatatatgtacagataggcccttatttgatcttcacaggaacctgtgaggtaggcagagcttatgagcttcatttcccaggtaggaaaactcctacgtggttacgtaacctgctccaggtgtgatcccaggtgcaatccagctcaacaagcacactgagcctcaggagctcttgggatcagaacccaggactcgatcccactccgtgcygccttctcacccacccctcttccaccaagtgggtggaaatagcacttgctttgaaataagtaacgaatgatctttgtgaaaaggaacctaaacagcagtgggccatctttattcacatctatagtaccaagtgctgagtaaggggattttagactccagacacccgtcctgtttgtcaggccagagctgcagtgtgttgactgcacatctgtctcttgtcactcctgctcctgtgggtaaccagccagagtgcccctgaggcagagacaggccaatccctggagagttctgcgaggtctagggaagagttctttgtatttaaaatttcatgtgaacttcagcagtttcctctgcctctgtagtcagcttttgccttttcaaactttagttagatggataatgacttttactcattaggacttttttccattagttggaaacccagagttgcaatacgtttcttttttccttagaatcaccgggtttatgggaataacaattgggattctctttatataaaaatagtggtggaatcttggcacagggttcatatgtggctttgttgaaggcttgttgtcacttccttatttgtataatttccctcctttgtggcctaaacatgactttcaaagagtcaagaggagttaagtcctaatttttattttagaacatctgaaaaatgaattcagagaaaagtgatattgatgccttggatttccccacacatacaaatcccaatctcctgctgactttttctcatgtttttgggcttcagggactgttgtgggatttgtattttgatactgaaggaccaacacagactgacttagcttcttgcctgtgtgcaggtcatgtgccactgtcactggagagaatttcatgttgtgacttctgttcagatttgttttttttttatggctttcccatcagggttcttgggagccatggctgcttcttgatatcttctgtttccctgtagaacagacgattgcaggcccggggccctggcaagctgggccctctgtggctttctgagtccattgtgaggcagaggatcaggtgcgttttgggcagcagccttcagagcaaggcactgacctgatgattcacactgacccctcccctccgctgaattttctgacaaccttgtgactctcacatgggaaatgtgagtggtttttgagaaatctttacataagaggttttaaaattttcttttgagattgcctcggtgtttttccttaaagttagcacattctttgctttctacttcagcctcaaggacaggaagttcattctygctctttacattggggtgttgatgtttgtggttttgttgttttgttcttcatgttactcatgatgtattgatattaattaamctaaatacatatggaaatattctttcattacttagagcttatatagttcctggtgcagatgtgcaaaaatagtgctttagtaattgctaagtcactatcttgcttttctctctactgtgattgagtatttcttacatggaactatagcttcctcttatcaacaaataagcaggaaatagaaattatgtaaataagcaatttccattacctacttcactgacttgacaaataggcatttggtctgctttaattaatatttttcaaaatgttaagtgcctgttgctgttacttaattttgcaggtagcattggaagtttctgtgattgtacttgagtgggcacttcttgttgaaatttaccattgagaccctggtaacactgaagtttgtgttgactttctgtaggtgttttcacagtcctgtgtttggtatggagagtgtggaattgcatatggggacaagaggtacaattgcgaatattctggcccaccaaaaccattgccaaaggatggatatgacttagtgcaggtaagttcattatcttaggcactgggaacacaaaatgctgatcacaagatcctctgtaattattccttaaatgttattgcagggtggaggtggagatgagactaacaggcttaagtcttatcccggactctcaaactctaacctgtrgcatacagtgcagagaaagaacaccgtaactccaaaggcttaatttttcaggggctgactttatacctctcataaagtttcccaatagcaggttgctatttagagactgaccttggtacttcgtatgttgcccttgcagcatctgcaaaatatattagaagttagctggttttgattcctagatttcaggactcaaatggactctgttgctaagtggctttgacgtccttgtcccctggtcatttcagtgttttctctgtgttccactgagagcctgtgaattttggctgctaccaggattctgattcctgttctttttttaccatcctgtgatacacagggatattagaactggaaaaatcatgtgaaaagcctggttttagaggcttaaagtaatcaaaagtcaagtcgacatgataacagagttcctaggctcacttgttcgtttcttttctgtttttgagacagaaggagccttgctcttttatcctggctgaaggctagagtgcagtggcacaatcacggctcactgtgtcctcgacctcctgagctcaagcaatctctcaactcagcgtcccaagtagctgggactacaggcacatgccacaacccctggctaattttttaaaaatttgtttggggagatggggcttcaccatgttgcctagcctggtctcaaactcctaggctcaagcaatccaccctcctcagccttcctaagtactgggagtacaggcatgagccacrgtacctgtcctcacttgctgctttcatcataattattaaaggtttcaactttccctggaattactaatagaaatagtaagtagcactctggttgaattgaatcaaacaaacaaaaaaccctaagaagacataaaatgattgtcaggagaggagagaaagcttccaaataaaaagaaaattagaaacatctctacttgtgaataaatagtaaatgtgtagccttttaaaataattctataataactttgcaaatacaggatgtgtcttacccttttgtacttcaaaaggattacrtgaatgaatgtgtcttagttcactgaggaatgttgaccttactctaactgttgcctactcccgtgtctgtgctctttcacctgaaaggaactcygtccaggattcttctttggcaatgtcagtctctgttgtgatgttcggcagcttcagacactaaaagacaacctgcagctgcctctacrgtttctgtccaggtaggttctgctggggaaacagaacaactgggctgtagatacttgtgaactggtaatgctcagctttccatttattctttgtttacatatttttatttattatatgtctatattatatgtatattatatatttatacatatatgtatacatgtaaagtaggtgaatatatatttatgtattaaaaatacatgtatgtataatgtgtatgcatgcgtgtgtgtataatagagacagagtctcactctgctgcccaggctagagtgcagtggtttgtggtgtgatcacagctcactgcagcttaaacttcctaggctccagtgattgttctaccttagcctcctgagtagctaggactacaggcatgcactaccatgtctagctaattttatttatgtttttctttatttttttttttttgagacagactcttgctctgtcaccgaggctggagtacagtggcatgatctcagcttactgcaacctcctcccgggttcaagcgattctcctgcctcagcctscccagtagctgggactgcaggcacatgccaccacacctagctaagttttatatttttagtagaggtggggtttcaccatgttggccaggctggtctcaaactcctgacctcaagtcatctacccrcctcagcctggttattacaggctgggattacaggcatgagccactgcacctagcctaatttttatttttttctagagatgagggtctcactatgttggccaggcctggtctcaaatgatcctcccaccttagcctcccagagtgctggattataggtgtgaaccacagttcccagccagttttttttttttttaaagtcagtttttgttttgttttaagaaagcactcttacaatttgtcagaaataaagagaaaaacaataattaccagacttggttcacttcccagttgcattcagagttgatgcttggtttcctctgcgatgttctcaccctgcagggtgtctgcactgcggccaggctcctttcaaacttgagctgtgcactgtggggaagagaggttcctaggggtcctgctcaggtgcctggcctgagactctcatcatgcagtccttcctctccccccatgctttgctttgcacatcattcttgtccctccctctggtgaagggttgtgatagagtcaggtcctcagtagagcyggcctcggggagctgttaaaaattttgttctgctgtagctggctggttttgtcaaacttagttttttatctgttctgttggctatgaccctgagcagtgaaaaagggcttggtaatagatgttcttctctaggcctagccagcaattctcaaatatgcaaaagagcaagctggtagtggtctttagaacagcagattgtggtatctttctaaatttttcagacttcagcacactgataaagatgtttgggaagcaaatattaaaaagggaaaatgcttctctgcacaaatatcactgcaggtggtgatagggcacaagttggcttccagtgaagaaattctgcttcttaccaaaagttaacaatagagaatggaaaaccaccactaaattgttttttcagaacaacaaaagttgaggctgtaattgggccagcatatcctatgaaaggcttgtgaacattgatggaaccaaattggagccttgtacactcagtcaaaacacatttatttaggatccaccgtaggtgaggcattatggacatacggacataaacataaaaagatagccaacctttctccatattatcagaggtaccaaagcttgatttataatagcaaacaggagaaacaacctgatatttggaaaaatatacagctgtcaaaattagtgattgtgggcattaaatgtagtaacatggaaaaggtttgaaaactgtgtaccccaagagtgattcctattagaataatacaattgtggtttctggctttgttgcagtaaagcagtggggctcctgaaagaaagagagtctgtgcttctctgtctccttcactagaacagagactcttgaaggccaggacacacttttttcattctttgtcttacatggtcactgggactgaatcggagtctaaagtaatcttgattgcaagaatgcaagtctaatgaaacagcttttgcaagtaacagtggaccaaagggaaaagagagctcttttatcatgtaacaagtcaacattaggagcttaaactttgaacctgaaggatagcaggcagcttatggttcttgtgcagttgtgtgctcctgaagtgcatgcagccagagaacaacattgctgttctctatctttacaaaccatggggatttctccttgtgtttcaggagggcctagtgattttccggggcttgaaagaaaacctttcaataggttataagatgaagattctcataattctcattattttattttcttcttaatcaaaactgtcagctggtgcagcgctcatgtcgataatcccagcactttggaaggccaaggcaggagggttgcttgagtttaggagtttgagaccatcctgggcaacacagacccacatctctacaaaaacattttaaaaattagccaggtgtggtggtgtgcacctgtagtcctagctacttgggaggctgaggtgggaggattgcttgagcctaggagctcaaggttacagtgagctgtgatcacaccactgcactcagcctgggcgacaaagtgagaccctttctcaaaaaataataataattgtcttcctgatgctccaaagtccctttactctaggtcagagaatgtatgtctctaaattataaagtgcagaattcagagaagcatctctctctttttgaaattataattggacacaataaatgcagaaagtaattagggcattttttaaaggtgtgcctttattttaacatgaagttttaagtttagaattgctggtttttaatatgttctcttggtaatttgtcactttacagtaagtttaaaatattctttgtctatttaaaatcgttcttgctggccctattatgtgtgagatcatgcagaatataatttacttttcctttagatgtccatcctgtttttataacctactgaacctgttttgtgagctgacaygtagccctygacagagtcagtttttgaatgttacagctactgaagattaygttgatcctgttacaaaccagaygaaaacaaatgtgaaagagttacaatactacgtcggacagagttttgccaatggtaagtaaacttttaattattcctcttttacagctggcatcaggacagcagagcaaattgttccttttagttgtcctgtcaactctggaaaatcacaattttcagttccattggccaggaaataagagttgttgctttgcttgtatcctaggacttgaactgcaacgaatataaaaatctccttaaagcgcttgctttaactccccctaactttaacttcccacatggaaaattttagtatgtgcaagtttgcatccatacacttcagtaaccattggatctttgactctaacagacatgagttgtgtaatgtcataaattactgcaagactgagaagatagaactgttaatagttggcagagaagaggtcatgacttgcaagaatcagatcaccataaaggaaagtcagcaggtctaacagatagcagaaatgatcccccagcattgaccaacatacaacatttaattataatgacaaagtaaaaaggtaacaaaaaaattccatagaaaaaaggtctcattcacaaaagcaacaaaaaataaggcacttaggaatccaaaagatgtgacatacaaggcaacctgactgaatggagagaggtcattttgtccagaaacagaagcctgcatgtatggaaagtggatgtgtaacacgtgtgtcattacaaatcattgagagaaaaggtgggctagttgataaatgagatgagaaaatagattatatttatctaattttaatttttacagaaaataaaaaaatcaattgtgtagattaaaaatcccaattggaaagttttagaagtaaatatggaaagatttctagacaggagaggaaaagcagaaaccataagaaaaatatttatgaatataaacaactgttatctagagcagacagcgaaatgcaaatttgaacagtaaactaccatttcacacctcatcagcttggcacaaattaaaaagttggtcaatttcaactgtgggtgaaaatgtgaagcaataggaatactaatgtactccaccacttacaaccataatttggtacaatcgtttcaaaactacttgaaaaacaactttgcagtacgtagtaagttgaagctaaccctcctcccagaaatttsacttatagatgcctgccttagagaaactctaaatgcatataaacctggagacccatataagaacacccactgtaacactattgtgattgtgaaaaattgaagacctcaagaacgagaagacaagacacagactgggagaaagtatttgcaaaagacatrttagtaaggactgttattcaaaatatacaaataactcctaaaactcaataagaaagcaaacagcccaattgaaaaatggacaaaacaacctgaacagatacctcaccaaagaaggcatacagtggtaaataagtacatgagaagagatgctcaacattatgtcattagagaattacaaattaaaacaacgagataccactacacatctattagaatggcaaaaattcaagacgctttcaacaccaaatgctggcaatgagctctcattcattgatggtgggagtacaaaacggtacagccaccttggaagataatttagcggtttcttacaaaactaatcatactccttggtatttacccaaatgagttaaaaatgtgtctaccccaaaacctgcacgtggatatttgtagcagctttgtccataagtgccaaaacttgtaagccaccaagatttctctcagtaggtgaatgggtaaataaactgctacatccacacagtggaatattatttggtgctaaaaagccatgaaaattcagtgctatcaagccatgaaagtacatggatgaaccttaaatcctattactaagcaaagccaatctgaaaagactactcactatgattccactatatgacgttctacaaaaggcaaaaccgtggagacagtaaaaagtcagtgattgccatgggttaggagagaggaaggcataagtagagcacagaagatttttaggtggtgaaaatactctatatgatactataatggtggttacatgtttatatgacattttgaaacaaaagtactacatacttaaaacaagtacacaaacatgcatgggaaggataaacatcaaattcaggattgtgtttaccttagggaaggggctactgtcagggaggggtaattggggagcttcaactgaatctatagagtgtgtgtgtgtgtgtaagtatttttttawtttttkgaagagacgggcctcactgtgttggtgaggctggtcttgaactcctggccttaagtgatcctcctgcctyggcctgccaaagtgttgggactgtaggtgtgagccaccacacctggcctatagtgsattattatttttatttagtttttaaattatgccatagccagttgttytgaatagtgcagtactacaaaacagagtcaaggtctcatgctgtcacccaggctggaatacagtgatgcaatcatggctcactgcagcctcaacctcctaggttcaagtagtccccctgggtagttggaaccacaggcatatgctaccacacctagctaattaaaaacaaatttttttttgtagagatagggtcttgcttttttgcccaggctggcctcaaactcctggcctcaggagatcttcccacagtgctgggattacaggtgtgagtcactgcacctggccragtccattatttttttaatgttgaggcaaatgttgtgaaatggtatgactgatagttaactgggtaatgaggaaatgagaattgtattattctccatgtgttttgtatgcttgaaacataaaataaaacctgaaaaccaaatggtgagctggaagatacgagggaattactcagaaaacagcatacagatacaaagacctataaatcattaaagaaatgacatataacatgagaagctccagagagttggggagagacaataataatcaaagggataatgaggattttccagagtggataagggatgaaccctgagaacttagagaaaattcagcatacaaaaatcagttgtatttctgtacacttgcaatggacaatctcaaagtgaaaataaaacaattccatttactttagtatgggaaatacttaggagtaactataacagaaggcaaaacactttaaagaacagccgggtgcagtggctcacacctgtaatccaagcactttggaaggccgaggcaggcagatcacaaggtcaagagattgagatcatcctggccaacatggtgaaaccccatctctactaaaaatataaaaattagctgggcgtggtggcgctcgcttgtaatgccagctacttgggaggctgaggcatgagaatcacttgaacctgggacgcggtggttgcaggagctgaaattgtgccactgcactccagcctggctgacagagcgagactccatctcaaaaaaagaaaaacagaaaaaacacactaaagaacattattcagcgaaattaacgaggatctaaataaatggaaagacattccatgtttatcaatcaaaagacttaatattgtttagatatcagtattctccaarttgttttatagattcagggcaatctctgttataatcccaactgacttctttgtggaaattgacaagctgattctgaaattcacatagaagtttgagggacttagaatagtaaaacaaccctgaaaaaagaacaaaataggaagactcacacttctcagtttcaaaactaagcaatggaaatcaagacagtggtactggaataaagatagacatatagatcaatggaatataactgagaataaataatatatctatggtcaactgatttttgacaagggtgccagggccattcaatgagaaaagaatactcttcatcaaatggtgctgcaataactggatacacacatgcaaaaataaataaataataatgaaattgggccctacttcacaccatatgttaaagaaattaactcaaagtggatcgaagacctaaatgtaagagctaaaaactataaaacaataaaacatagggattaatttgcatggcctcatatttggcacttgattcttaaatatgacaccaaaaacaagagcaataacagaagaaaagattaattggacttcattaaaataaaaaagtttgtatttcagaggacgccatcaagaaaagacaagaaggccgggcacagtgactcacacctgttatcccagcagttcgggtggctgaggcaggaggattgcttgagcccgggagttcaagaccagcctgggtgacaaagtgagaccctgtgtctacaaaaaataattagccaggcatggtggcatgtacctgtggtcccagccacatggttatctgaggcaggaagattgcttgagcctaaggaggctgcactaagtacctcgcactccagcctgggtgacagagtgagactctgtctcaaaaaaaaggacaagaatatatttgcaaattgtatatttgataagggacttgtatctagaatacataaagaactcttggccgggcgctgtggctcatgcctgtaatcccagcactttggggggccaaggcgggtggatcacctgaggtcaggagttcgagaccagcctggccaacatggtgaaaccctgtctctactaaaatagaaaaattagccaggtgtggtgatgtgcgcctgtaatcccagctactcaggaggctgaggcaggagaattgcttcagcctgggaagtggaggttgcagtgagctgagatcacaccattggactccagcctgagggacagagactccatctccaaaaaaaaaaaaaaaaaaaaaactcttactactcaatgatarataaataacccaatttaaaatggcaaaagatctgaatagagtagacatttctctaaggaagatatacaaatgaccaacaagcacatgagagatgctcaatactatgagtcatcagggaaatacaaatcaaaaccacaatgagataccacttcacacccaccaggatggctagaatcaaagtcacataacaagmagtgttgacaaggctgtggaaaataggaacctttattaaaaagaaatccaaaaaccaaaaacagctgggcacagtggctcatgcctataatccagcacttcggacggccaaggcaggtggatcaccttagctcaggagtttgagaccagcctgggcagcatggtgaaactccatctctacaaaaacttagctgggtatggtggtgcacatctgtagtcccagctacttgagaggctgaagtgggaggatcacttgagcctgaggggcagaggttgccagtgagctgagatcacaccactgcactccaatctgtgtgacagagtgagaccccactttggaaaacagtttggcagttcctgaaacaaacatagaactaccatatgacccatcagttccactcacaagacgaaagtataggtcaacacaaaaacttatacacaaatgcttctagcagcattactgataatagccaaactgtggaaacaactcagatatttatcacctgatatatggataaacaaaacatatgtccttgcaatgaaatgttgttcggccrtaaaaagaaatgaagtattgatacatgccacaatatgcatgaaccttgagaacattatgctaaatgaaagaagccggtcatgaaagaccacatattatatgattggatttatgtgaactgtctgaaatagtcagataaatagagacagttcagtggttgcttagggcttagggaagtagggaggtagttgwgcatagctagaatacaggatttcttttgaggtgatgaaaatgttataaaattgactatggtgatagttgcatatatctatgaatatgctaaactccattaaattatatagtttaagggggtaaattgtaaattacatgtaattatattgtaaattatatagcgccaccacacctggctaatttttttttatttttttattttttgtagagacggggttttgccatattgcccaggctggtctggacctcctgagctcwggcagtccacccaccagggcctcccaaattactgggattaaaggtgtgcataaccacccctggcccaaagacaaatatcttaaaagcaaatagagacaagacacaaatcaccttaagacaatgataattggagattttcttaccagccatgatagagcctggaaggcaatggaataatctgttgagaattctgagggagatgactgtcaccctagttaacctgtctttccagaacaagggtaaaacaaaatgaatgtgtaagcatctccttgaagattagggaaagaagatcctgsgaagtttctagcaagcagagactggtaaatgagaatcgacagtacaggacccattccagctattttcttaggtgtaatacactgatactatccttatrtaatgtgttgtgtgtatgtgtaagaaaataaaatccaaaaagataacagtattaggggttttttttgttttttttttttgtttttttgtgatggagtcttgctctgtcacccacgctggagtgcagtggcgcaatcttggctcacttcaagctctgcctcccgggttcatgccattctcccgcctcagcctcccgagtagctgggactacaggcgtccgccaccacgcccggctaattttttgtattttcagtagagatggggtttcactgtgttagccaggttggtctccatctcctgacctggtggtccgcccacctcggcctcccagagtgctggaattacaggtgtgagccaccgtgcccggccaacagtattaggtttattgacacgtgacctctgctctaaaaccagttttccaagtaagttccataattctctggctgtgtagcttcctgcggcagaggttttctggaaccagctttgttaactgaagaagtactgaggctcttagctgcgtcttcctgggccttggtatactcttctatatagtggggatttgacttctccaagctgttgtgagagctatgagataacgtgtgcctttccctttcctgtctgttttttacttttaagttacttggaatcgggcctccatattatttgcagggtgataagccaatttaaagggaatctctgttcgtgcccttagttagtgtttgctgtccagcattccagcatggtgcatatggagttcgtgtttcccttcaagaggccttttgtaagatcttgcctcgtgaattacagcaagcatcttgtctcctttttcctttgggtttcctcttctagcaatgtacaatgcctgccgggatgtggaggccccctcaagtaatgacaaggccctgggactcctgkrtgggaaggacgctgacgcctgtaatgccaccaactggattgaatacatgttcaataaggacaatggacaggcaccttttaccatcactcctgtgttttmaggtaggtataaagattccaagtttggtgtgtttatgatattgttttaaagccaaggaactggctgggcacagtggctcaccagtgcttggggagactgaggcaagagaattgcttaagaccaggagttccagaccagcctgggcaatgtagtgaggccccatctctatgaaagaattaaacattagccaggtgtggtggcatgcatctgtagtcccagctacttgggaggctgaggcaggaggattgcgtgggtccaggagttcaaggctgcagtgagttacgatcatcccattgtactccaaccttggtgagggcaaagccctgtctctccatgaatgaatgaatgaatcttagttgaggaagcataatctacaataggaagataaacacattcaggtaactagttcatagtttctcccagtaagagaggtaactggtacatttatcctgctgtggctaatttagggggtgctgggagtgggaatggaggagsaaatgaattgccttcaggcattgctgtcataattgaaagaataagcagttaaaaagggggtgggaggcagcttttctagagctctgctatagtattagctcctgagaatggagatgggacatgattgaagggttgccttggtatgtggtgtacttggaggattcctctatcagtgacaaacccctacgcgcaagtttattgaggtaacttaaaattccataggacgaagcagcaaaacataatttaattaaactaaaacctccaattctttttcttctttcagttgttttatgtatttcagtgggcttttctttgagtttaagtataatacaaaattttggatgtttttaattgagatttgtactcaacacaattcctttctgtagattttccagtccrtgggatggagcccatgaacaatgccaccaaaggctgtgacgagtctgkggatgaggtcacagcaycatgtagctgccaasactgctctattgtctrtgkccccaagccccagcccccacctcctcctgctccctggacgatccttggcttggacgccatgtatgtcatcakgtggatcacctacatggcgtttttgcttgtgttttttggagcattttttgcagtgtggtgctacaggtaagcagttttgtttgtcatccagggcaaaaagagsaaaattgcccactggcactttgagctttcatttgtcagagcttggttacttaggacaagaaacaaatacctccatgaataccattgcatggattattgtgtcctacagctattctatagtaaaccatcaaagttctgtttaacactgcaacatctgaaatgaattttactgatttattcaaaatgatgtgtgatttaaagcactgtgcattagccactgattctttttttttttggagactgagtctcactcttgtcgcccaggctgaagtgcagtggtgtgatctcagctcactgcaacctccacctcccaggtttaagcaattcccctgcatcagcctcctgagtagctgggattacaggcatccgccaccatgcctgcatgcctgamtaatttttgtatttttagtagagacggggtttcaccgtgttggccaggctgatctccaactcctgacctcaggtgatctgmccgccttggcctcccagagtgctgggattacaggagtaagccaccgtgcccagccggccactcattctttagaaagtcagagtcaaggccaggctcagtggctcacacctgtaatcccagcactttaggaggccaaggcaggagaatcatgaggtcaggagtccattgcaaacagccctggcgacagtgcgagactgtgtctcmccaaaaaaaaaaaaaaaaaaaaaaaagtcagagtcaaatgagcgaaatcagattcaaatctaattaaatggagtactatagtccttttagatatttgcatcttaatttaggacagtactttttttactttttattttgaaataattgtagacttaaccaaaaagttgcaaaatggtagaatttatgtgtatccttaacccagtttccccgatgatacaacttacataactcatagtacatctagaactagaaataccatttgacccakccatcccattactgggtatatacccaaaggattataaatcatgctgctataaagacacatgcacacgtatgtttatagcggcactattcacaatagyaaagacttggaaccaacctaaatgtccaacaacgatagactggattaagaaaatgtggcacatacacaccatggaatactctgcagccataaaaaatgatgagttcatgtcctttgtagggacttggatgaaactggaaaccatcattctcagcaaaatatcgcaaggacaaaaaaccaaacaccgcatgttctcactcataggtgggaattgaacaatgagaacacatggacacaggaaggggaacgtcacrcaccggggactgttgtggggtgggggcctgggggagggatagcattaggagatatacctaatgctaaatgacgagttaatgggtacaacacatcaacatggcacacgtacacatacgtaacaaacctgcacgttgtgcacatgcaccctaaaacttaaagtataataataattaaaaaaaaaactcatagtacaatgatcaaaaccacgaccatgccattattattacattattattagctaaaccagagatcttaatcagatttcaccagctttttctctaatgcccttccctgtttcaaggycccatattacatttttgtgttttatgagtcccctctaatctgtgacagaaagttcctcagtctttccttttctggccttaacactcttgatgatactggtcaggtattttgtagcatgtccttccatttggctttatctggtattttctcatgatgagattgaaataaggtgttttgacaagtacatcacagaagycatgttatgtctttctcggtgcatcatgtcagggatccctgatgttgatgcgtctctttcctggtgatgttaaccttgatcacttgctcaaggtgatgtctgctggctatctccactgtgaagttactgcttttcccttcgtaattgataaatatcttgggggaagatgctttgagactatactaatattttgttcctcctgaaactcaaccactgattttagcattcattgttgggtcttgtctgcaacmgttataactaaggtgtttgcctgatagtgattttyttctctttccctctcttcctctgcatttactaacyggacttctgtacagaaagctatcccttctccctcatttatttactcagttatttacatcatggacttttaattctgtgggttgtatccaacactgtcatttatcttgttactcaaagttttccactttgggccattgggagtgccttctggctggcttctgtgttcttacatacacctcccatccccagctttatcttacatattccctgtccctgccctgcaaggagctctggttccttttattggagaatggtatgtagaaacgragatctgggcactaggtaygctcattgctgctggaaagagtagcatgtttttgtttgtttgtttgtttttttgagatggagtcttgctctgtcaccaggctggaatgcagtggcgcgatctcagctcactgcaaccaccgcctccctggttcaagcagttctcctgcctcagcctcccaaggcacgtgccaccacacccagctaacctttttgtatttttagtagagacagggtttcaccatgttggccaggttggtctcgatctcttgacctcgtgatcccgcccaccttggcctcccaaagtgctgggtttacaggcgtgagccaccgcgccyagcccagtagtgtgtttttaaaggacctaaaagttttaaataaaatgagggccacaaggtgaaattatcctttattaattgttctcttaacatcttcttaaattttctcctgagactggtgagcagagggacccagagcaaggggacttaggggaaagaaggcagtaattagggaggaggaggccaggaggaggaagaaagcatttcatgggattacaggaatgtcccaaaaacaacctcactgtgatgaagtccactaatgctatttcttcacttctgtttttcagaaaacggtattttgtctccgagtacactcccatcgatagcaatatagctttttctgttaatgcaagtgacaaaggtaggcatatttgtccatgaataaaagggttcagatgatgctgtctgtcatgagagcattcgtttcctcagtggggttgcagcagtgggtgaggtggtgtgccagtgccgaggacacggctgcgaccaaggcagacatggtccttgcctttgtggcccyaccatctagtcagggtggcacagcagaaccaagtaattaatcatagctggggaggcgcgaaagcagcaggacaagagtgggaatagcagggcagggttgaacctcacccttcagaggctcctgtgtcggcatctcctctgtggggtgggaatagcgctcattgagggcagccaacaaaggtggcttygctgagcagataggtagctgagggcaggggtctcatatgtgtccccaggtgggcttgattcctgccatgagatagcaactaatgctttccctgttcygactttcaggaacggcttggctcttaacctccaccttcccttcctctcccgttcttccaggagaggcgtcytgctgtgaccctgtcagcgcagcatttgagggctgcttgaggcggctgttcacacgctgggggtctttctgcgtccgaaaccctggctgtgtcattttcttctcrctggtcttcattactgcgtgttcgtcaggcctggtgtttgtccgggtcacaaccaatccagytgacytctggtcagcccccagcagccagsctygcctggaaaaagagtactttgaccagcactttgggmctttcttcyrgacggagcagctcatcatccgggcccctctcactgacaaacacatttacyagccatacccttcgggagctgatgtaccctttggacctycgcttgacatacagatactgcaccaggtaacctgctgtttgaagaaataagtcactctagatgaccttgtggtttgctggcttttacatgttkactactgctagatggggatttggggctgaatgtcatggtatatcttgaaaatcttagcgtataatggcaaagctgcctttaagttaggtttcaagaaagtgaatgatgttgaacttaatggaatatttatkgttgctcacttttgtatttacttcagatagtagaccttgcctttttcttgaaattgagatgagcagagaaagaagacttcagtggcgtttctctattgaggcaggatatatttattaggaagtcaccttaggaatttgtgaaatgttttctgttggtaactgaaagtaatatgcaaggacccagaggcatgaagcccttactgctgtcctgggggctgaggaaggagctgccagattaccatccctgatccaacctgtaggaatgaacttatcactcactgcctgaacatgggcacccagcctgtttttggtgagaggcgcatttggggcaagatccatcccattgctcctagaaaggcatgtaaaccttcccattgtccctgtcacacttgccttggagaactgtacctgtgcataaactgtaccggcttcttttttaatgaatgtataatcacatggtttttcctttaaacattgctcatgtctacaagaaagtctgcaatcttgaaaagcattaaaatggtcccaagacttgaatcttttctctacccagtgactgtctgttgctttttccagcttgttgctgaaggtgaacagcatagtcatttacctccaagatcatcttctctgttaggaaataaggggacatatataaatggctgtagtgcagagcaaggcaggaggttatgtgttactattgagaggagggtcagggagaccaggagtccccctccactctcccctctggcctgctggccaccactggagaacggtggaggggagatggttgtgtgtcctatgttgatagctgttctggtcatggtgttccccctacccctcgccgcctctgtggacgcctctaactagtttgctgttagagtgggcctgtggcctgaccagttttcttactgtattgcatcttaattctctccctcatcttaggaagtattttccccaaatactctttgtcttctgaccctcagggcaatgctgattaatcaagatctgagagaaatgtgacgtgtttctgggtttgcttatttttaaaatcttctttcaggttcttgacttacaaatagccatcgaaaacattactgcctcttatgacaatgagactgtgacacttcaagacatctgcttggcccctcttycacygtataacacgaactgcaccattttgagtgtgttaaattacttccagaacagccattccgtgctggaccacaagaaaggggacgacttctttgtgtatgccgattaccacaygcrctttctgtactgcgtayggtaagtggcaagagacaatcattggtagacaccattcttgggtctgacttagggtacatgggcaaaagcttgttttatgagcataacccagaggtgagcaaacaacaagaccttgccctgtgaagtttacatcatctttttttttttttttgagacagggtctcgctctgtcgcccaggctggagtgcagtggcgcaatcttggctcactgtaacctccggctcccaagttcaagcgattctcatacctcagcctcctgagtagctaggactacaggtgtgtgccaccacgcccagctaatttttgtattttcagtagagatggggtttcgccatgttggccaggctggtctcaatctcctgacctcaggcgatccgcccacctcggcctcccaaagtgctgggattacaggcgtgagcttccatgcccagctggaagcttacatcttaatggagggagacggttgatgaacacataacatrtgctatcgtgccagctagagattagtgctatgaggagaaaaataaggctggacagagtggggggtgcattgcttaagcgtgragatgtgcacaaagggagaggaaaggacagctgggcacatcacagggatgagagttcccggcagaaccagcagcaagtgcagagccctggcaggaagctctcgtggtgtgtgattgaggagtgcagctgcctctcaccctttacctcgtgcctgggtcgctaacacagtgtcatgtatcacaccccccacaagatttaaagatagaagagcctttggtgycttttgttctgtctcagatatatagcccagtcccctgtagtgccccagctatttgggaggcagcctccctctgaggagttgaggcagtataggtctgcagctccgcagctttagattggagggccctgcagctgcttcccttaggaggcatgtctagctgggcagggtgcgtttataattgggaatagtcaccccaggaagcggtgctttggtgacctgtaggggaatcttaaggcttctcccagtaggggaagagtagcatgatgccggatgggcctactctccctgaatgctagggacctggcctagggacatttgttcagccagttgagcaaccacagtggctatttcttcagcatgggaacagagaaattattcctttttgccyttaaggacactgctcagccgactacttctcaagagctaaggactctcacttctggttctaaagaactttgaccttgagttctgtttgtttgttactggagtaagactttttatgcagttgggctatatttactctgtttcaagaatatcacccctaaaaacatgagttatactcatgaaaacacaatagcttatgctccataccctaaaccggcattctccacagggtagacggtgcagacgagccatgggtaatttgaagaaacaaaaaacatttaatgttacataatttttataattggacaaccatttaatgttacataaattttatagtttactctctgtggcacaagataaaagtcaacaaaaatgatgggggacagaggtgcgtgagccttgtgtttcctcaaagcggacgtggttcccaccagtgtggaagcggtacagggagtggcaggctcctggyggcagggacctgaattggtttgtagttatgcttgtgcgcgtcctcataaccccagtctcgccctagcgctgtcccctttcctctccctccagcttttcctggactttttcacctgagggtcctgcagtaatggcaggtggcctgcccagaaccatgcccttacctgctkcttctccccattttgtttaaaggcagtgacagctaccagttactcaggcttgaggctttatccctgaattctgcctcgccctcgccttcctcatggggttcttacgggtctgagcctctggatgctctctcagatttctgctgtggatgaagggactcagctgctcgctgcaggtcacctgacctccctcatgccgtcacccatccactctgacgggtgggtcatatgcagaagcttctcagcacctggccaagttgtagctgatggtctgtccgaaaatgctggttcactctccactggccaactgtctgtctgcactgcactgccagttgcctcttgcctgsgccattgcgctaacatctccacttactgttccacctgcttcctgtttctttgccgtttccagaccttccactttgccacgcaagctatctttgtaaaacagctcatgacatttctttcccrgaaatctctaattgttccccagtgcctccagaataaaaatccaaactacttaactggcactgagtccttttattttgcatttgtctgtccattactcttcccagactggccccctccttcaggagcccccttggtgggcaccccatgctctaggacaggacatcttttcyttgaattattattattttttttttagagatgggatcttgctatgttgtccaggctggactcaaactcctgggttatagccatccttctgcctcagcttcctgagtacttgagattaggygtgccaccataccyggcatacaggacttgccaaaccaccatcttgctctcattccctctcactgttctctctccctccctttttcctcccacagttgtaattgtgtgagacacccttttgtcctccctctttggtgaaatccccctcatcctcggagctctgggtctgtacagtctcttcctcttggctataattttgccttttagtgtttgctccctcctctgtgcctgcrtagcgccatgcaccatgtgccattgatggcactgggctgtatttgcctgcctcttgcccagtgattctgagctcccaaaggtgagtgctgagctgtattactcaactgagaaacctcagggcccatgttgtccttagaatacagccagcctcatcaaatgttcactgtgtaaatgtttaggtccctgatgtcttgaggcccttctaactgggaggtgttttctaaactttttggcagggctcctkcctctctgaatgatacaagtttgctccatgacccttgtctgggtacgtttggtggaccagtgttcccgtggcttgtgttgggaggctatgatggtaagtaagagaagctttgacttttccttttagataaagtcatctcggttttgtcatyagcatcaagtggtaattatgaagatttcataaattgggcagttttgttaatttcttacctcttgaatcccagaatagtatctcctttggctttgggtttgggtttcattccagatttaaaagaagtggattgggttagccatttttaggtcacacatgcctttgagaagctgtcgaaggctaagtacctttycccagaataatgcaattgcaaacctctgcattgttgttcagcttgaaggtcatgggcctccgaagttcatttatagaccctctagggagctcatggacctcaggtaagagcctctgtgatagagaaaagatagtatgtgaggtatgtggaaaaagaaacaaagttgatggattttttttcttctaagccagtcagttgagtatttggacactcttacagtgtgaagagcagctggtttgctctttcctggttcctgtagcactttagaaccaattgtacttgacaaaatgaggtgattattcatgtgacacctttggcatcttaagccaaattacaggctcaacaggttttgcccaaccagttaagaatccagataggttttcttctcctcacttggtggcaggggagaagttgcaatctgtatttaaaatttactgtgcatcagagaggaaaatgccatttctaattgttggagaagggatggtgtcagcaactgactarccataggggaaacaattgactttgatctctgacttgttcatttcaccaaaataaattccagatggataaaagattgraatgtaagaactgggccaggcgtggtggctcacgcctgtaatcccagcactttcggaggccgaggcgggtggatcacaaggtcaggagatcgagaccatcctggctaacacagtgaaaccctatctctrctaaaaatattctttaaaaaattagctgggtgtggtggcaggtgcctgtggtcccagctactcgggaggctgaggcaggagagtggtgtgaacccgggaggcagagcttgcagtgagccaagatcaagtcactgcactccagcctgggcgacagagtgagactccatctcaaaaaaaaaaaagaaatgtaagaactggaagaaaattcaggaggcatttttaaaaataatttttaagtggaaaagatatttctaagcaagacacaaaactcagaagcccgaaaaggaaagactgatgaagttgagtacatgttcatttgtggagaacaaacatacagttaaaaaaacaaaactgggccgagagttattcatgcctgtaatcccagcaatttgggaggcagaggcgagcacatyacttgagctaggagtttgagaccagcctgagcaacatggagaaaccccgtctctgcaaaaaatacaaaaattagctgggcatggtggtgcatgcttgtagtcccagctactcgggaggctgaggtgggaggatcacttgagcccaggaggttgaggctgcagtaagcgagattgcaccacattccagcctgggtgacagagcgagaccttgccagaaaaaaaaaaaaactggacaaaaatattagtatgcatggcagtcagcattttcttaataaataaagatctcatctcagcctggccaaaatgtgaaaccctgtctctactgaaaatacaaaaaawattagccacacgtggtggtgtgtgcctgtagtcccagctactcgggagactgaggcaggagaatcacttgaatcctggaggtggagtttgcagtgagccaagatcattccattgcactccagcctgggcgacaagagcaagactccgtcttaaaaaaaaaaaaaaaaagttgtgaaaaaaagatcaacaacctgaaagaaaagtgggtgaggtcatgtgaaagataacaaaagaagaaatacaaaaaaaaaaggtttttattttatttttcagagacagagtcttgctctgttgtccaggctggagtgcggtggtgtgatctcggctcactgcaacccctgcctcccaggttcgagcaattcttctgcctccacctcctgagtagctgggattacaggcatgtatcaccaggcccagctaatttcttgtatttttagtagagacacggttttgccttgttgcccagactggtcttgaactcctgacctaaggtgatccacccaccttggcctcccaaagtgctgggatcataggcatgagccaccacgcccagcctcagtaaatattttcttgactaaagtaatgaaaagggaggccaaggcaggaggattgcttgagcctgagaagtcaaggcttcagtaaaccatgattgtgccactgcactccagccagggcaacagagtgagatcctgtctctaaaaaagaagaaaaaaaggaatgaaaaatagttaagcttctttggaaggcagtttgggagaatttatcaaaattggaaatatacatagtttttgattcattgattatgctttaagaattgattctagccaggtgcagtggctcatgcctataatcccagcactttgggagggcaaagcaggaggattgcttgagcccagtagttcaagtccagcctgggcaacatgacaaaatcccatctctacataaatacaaaaattagccagcaatggtggtgcacacctttagtcccagctactgggaggctgaggcaggaggattrattgagttcgggtggtcaaggccacaaaaagccgcgattgcaccactgtacttcagcctgggcaacagaacaagacactgtccccctgtcaggcccccaccccaaaaaaagaaaaaagatttatttctacaagtatgtgttttacacattaaaatatttataggctatttatagtaactttgtaatagaaaaaattgcaaaactactcatcagttgggggggattggctaaagtataccagaaaatactgtaggaaaagaataaggaaactctttatggagcagtctccaagatacaaaattttaaaatgtaatgtgcagaatagtattttactgtttgtgtggttaagagggaaaggggaagaatctgtgtgtttgcttgtgtgtgtgyggagtggctctggaaagattcgcagatggtcacagtatggggaggagaactaagacaatgaaacagatgttggagaaggagagaattttcgataaacacttttctgttctgtttgaaattgttaacatgcatgtactgtatcctttaaaaaaaaaaaaaaaaagagttactcttcctgaatgataaccatgcctacctcagataaaaaatcctttttattcattaactgaagtacataaagactatttcagcaaactcttgtttaattcttagagcccagagatacagtccatagctccagtgagaaatctgtgttgtgatttttcccctggtatgtgtctaattttctgcatgcttgtaatctgctttttgatgtcacatttttcctttctagatcaaaactacaataacgccactgcccttgtgattaccttccctgtcaataattactataatgatacagagaagctccagagggcccaggcctgggaaaaagagtgagtcactcatgggtgtgagcagactgtccttgcattgtgggaagctagacacttgcrgcaagcacttaaacttcattttctaaattaaccaatggcagatctgagttacgtagttttgttcacttggtactaatgatgctaagaagaaactgtaaacacatttacctttgagcaggtgctttaaacagctctccctccacaggaatgcaaaagtgtgcaaaaaaaggttccttgcattgtttttacttatttcatttattttttgagactgggttcacttttgcccaggctggggtgcagtgactgaatctcagctcactgcagcctcaacctcctaggctcaagtgatcctcccacctcagcctcctgagtagctgagactacacgtgcatgccatcacacccagctaatttttgtatttgtttgtagaaacagggttttgccatggtgcccaggctggtcttgacctactaacctcaggtgattcaccctcctcggcctcccaaagtgccgggattacaggtgtgagccactgcacccagccacctgcattgttttctaacagcaaaacttgggagcatgctgaatgtatttaataaggaatgaatacaatagaatattgtgctgtcataaaagacagtgaagtaaatggtccatgatgtatatttgtataaatatatattgtttatgctgctgtccatgcttagaaaaaaatatcaagcaaatgacctcagaaattaactgtgtttgtgacctctagagaatgggaagagaggacttaggaggccaggttgcactttatgccctccagtacttttaaaaaattgttttactgagatatggtatatgtatcatgcagttcacccacttaaagtatacagttcaggctgggaatggtggttcacacttgtagtcccagcactttgggaggcccagacgagaggctcacttgaggccgggagttcaagaccagcctaggcaatgtttgcatgtctctaaaaaaaagaaaaaagaraatttaaaaagaaaaaaaagcgtacaattcagtagctttactatattcacgtgtatgtgcagccatcaccacagtcaattttaggaacattttcattactccacaataaaactctgtaccctttaactaacaccctccatcttttcatcctcctatccacagccctaggcaaccactaaaatactgtctctggagattttcctattctggacttttatgtgcatagaataatatgtggacttttttgtctggctatcattgaacataatattctcaaggttcattcatgttgtggcatgtatcagtactccattccttttcattccattgtatggatataccacattgtgtgcatttatcaactgacaaacacttgggctgtttccattttggctattatgaataatgctgctatgaacacttgagtacaagttcttgtggatgtgagttttcatttcttttgggtacatacctagtagtagaattgctgagtcatagggtaagtccaccttgaatagtttgaagaactgccagactgttttccaaagtggctatagcgctttacgtcaccaccagcagtccatgaaacttccaattcgttcgcatcctcgtcagcactttttattatctgactttgtgattctagctatcttcatgggtgtgaagtggtatctcattgtggttttgatttagtagactgaatgcatttcttttttttttttttttttttttttttttgagacagagtcttgctgtgtcatccaggctggagtgcagtggcatgatctcagctcgctgcagcctctgccttccaggttcaagtgattctcgtgcctcagcctcccaagtagctgggattacaggcacctkccaccacgcctggctaatttttgtatttttagtagagacgggctttcaccatgttggccaggctagtctcgaactcttgacctcaggtgatctgccagcctcagcctcccaaagtgctggaattacaggcataagccaytgagcccagccctaaacttactttaattcagcatgtatggaaccttagctgtaatctgatagtctccagtgtggaagaccctaatgcagtggctgggcatggtgcctgtcatcccagcacttagggatgtggaggcaggaggaatgccttgaggccaggagtttgagaccagcttgcacaacatggcaaagaccccatctctacaaaaaatttttaaaattagccaggcatggggatacgtctctgtagtaccagctactcaagaggctaaggcaggaggatcccttmagctgaggagttcgaggctgcagtgagctgtaatagtgccactgtactccagccgaggcaacagagagagactctatttcaaaacaggaacaaaagcaaacaaaggatcctaatgcaggataaaggttaagaaaacatggcctttgagccgggcacagtggctcacgcctgtaatcccagcgctttggggaggctgaggcaggtggatcacttgaggtcaggagtttgagactagcctggccaacatggtgaaaccctgtctctactaaaaataccaaaattagccgggcctggtggcgcacgcctggagtcccagctactcrggaggctggggcaggagaagcactcaaacccgggaggtggagcttggagtgagctgagattgcgccattgcacttcagcctgggcgacagagcgagaatcagtctcaaaaccaaaaaaaagaaaacgtggcctttgtatcgtgaaagttagggagaagtttcttacttagctgtcagttagtttaactaaaaatataacattttgcttaccttttaggtttattaattttgtgaaaaactacaagaatcccaatctgaccatttccttcactgytgaaygaagtattgaagatgamctaaatygtgaaagtgacagtgatgtcttcaccgttgtaattagctatgccatcakgtttctatatatttccctagccttggggcacatsaaaagctgtcgcaggcttctggtaagccggggggkgggtggtgtatgttctagaggttaacagcagtgcacagtgtaacgtcatatttttgcctctttattcttattccatyatgtttaaaactgccataaattcccccatgttktaattgtatgtaacgtttctgttgcctacatctattttcttcattccaactttttgktttatcttaaagtttatttcacataatccagttttttcttatttgtccagtccatcacctaagaatgcaaactcataacatgtgttgccsgagcagacctagaaatgtttacaagtcctctctgaaacacagaattgtacattcaactctaggtttaatacagccctgtaaagtaaaaaggaggaccttttagtaacaagtgggacagacaaccctgtaactaattggtgattgtgtctgtcgcctctctcaggtggattsgaaggtctcactaggcatcgcgggcatcttgatcrtgctgagctcggtggcttgstccttggktgtcttcagctacattgggttgcccttgaccytcattgtgattgaagtcatccygttcctggtgstggctgttggagtggacaayatctycattctggtgcaggcctaccaggtatacttccatattctcacagggctcagcatctgttcaagtttcagggactgtgaatggctcctgggctccgcattcgtgagtgtgacctgtgagggtgttttgtttcctttccctgtgtggctcatcggtcgtcttgacttgctgtggacatcttaggaccaagaatttcacccctctttttggttgttgaaatagtagatataaagtaagaattgtgttttaaattgtatctttaaatagtgtcttttaatagtatcttttcattttaaatagtatcatgtgtacaagaagggctaacacacttttggaaaagattttgggtacgactgctgttaaaatgatgttcagcatagtatagaatgttagattcattttgcccaaaggtgccactaaaaaggcaaaaggtcaacacgtgtcccgctgctgtagaaggtggtctcagtcgtcctgtagacccgacgtgggyggagactcagtgcacgtgagagtgatgttcactggtccagtcccctgccgcctgtgttccgagtgttttcctgataatgtggctggctcagctttccctttagtttctcacttggtacctagctctgtagtgcagaaatactctgagaacattggagtcccccaccgaagtttatatgcttagaagacactgctaatcgtctactaatcatttatttttacccttgagttaacacaaggcagcaagaaatggcgttgttattgagaaattttaatgtcgcataatttttttttttttttttaagagagatgaacgtcttcaaggggaaaccctggatcagcagctgggcagggtcctaggagaagtggctcccaktatgttcctgtcatccttttctragactgtagmatttttyttaggtaattatgctttcaatcctaccagtcctgtagtctgctgagcctggagaaagaaggagctggctacctgaacatgtccctttgtgttgcttcctttttttttttttcttttttttttttttctctgagacggagtctcactctgccacccaggctggagtgcagtggtgcaatctcggctcactgcagcctccgcctcccgggttcaagcgattttcctgcctcagcctcccaaatagctgggattaaaggcacgtaccaccatgcccagttaattttttgcatttttaatagagatggggtttcaccatgttggccaggctggtctcgaactcctgacctcaggtgatgtacctgcctcggcctcccaaagtgctgagattacaggcgtgagcccccgtgcccagcccgtgttgtctcctttttttaagctttgttctgcactgggaaagtatcactggaccacagaaaaattggcagcagtaacttaggtgtgattttgcaagtggcttccttctcatttaactgtcaggacagcattgatgttggggttcagggtgaaagagacctagagttcgtcttgccactttccccttttagtagccactgggaatgttgatagttgaaaatggcatccttgagtagccactgaatccttctccacatgacactctaagcagcagctcccaaatccacaggcactcgcttacaaratgtttgccgttgttttcaaaggcagtctttctcttctgtgcacacaactcattggggaagcagccttgttaatgaccagaagctcttgactcaccacattacaaggagccagaataagctggaacaaagtcagcacttctgtgtttctttcacatagagaatcatcaaatagacccactagtggggckgtctgccccatgtctgaagtgtagtaagagcaaagtgactctgtccactataggggaggctggactggaatcactcagtccaaagaagaccatccacgggccacaaactgcaatgcctacatggctgggaggtcagcttaatcagggccattgtaaggtcattgtaggtggtagtctttcaccacagatacactgctagcttgttattcttcatctccacaaagccatgtgcttttgaaacctgtagccctgtagttccttttgacaaacacaggtgcagaaaaaaaaaaaaaaaagaaaaaactttctttttttcactactattataagaaaaccagtgcaagtgtgatgataatagcagcagagactgtgcctcaaggttggagtgaccttgggacagtaggagtgagtagggattgtggcaccccaactgcacgtgtcctatctaaaaagacagttatgtgtgtggccaacccagtgctacaaggtctgtgttgttgttgttgtttttcttccaagcaaagctgtgaatctagatttttgtgtaaaatgccattgttaaatattggcaacttataaaaaaaagttttttaatcttaagatgggttgatacagtgtgggctaaacaggaaccatctgattcatgggctgccagtttgcagtttccaagtcttaccctcatgcctttgatcctcactcgattgtagattacctcttaactaaactgggaggctagtagtgttgatgtaataaatggaaaatactgtccatttcttacagtgaagcacagaaagtactataagaaatggcctgtattagtggttctcaaattttaatgtgtgtgaatttgctgtgaacctgagtatagtagaattggggttgaattcctgtcataactaggatggggcttcccaaatggtctggtgctgagtgtgctttgaaaagcactggcttatcacctcctgtcccacttctggtgtaatgtccagccgcagcatgccttctcatgcgtttggcctgtgctggctccttgtatctgtacatgcacatgaacataagacctgcagagagcccccggctgtaaacagaagtgacgcagagcccttctctccccgacaggagcattgtccgtgatgccagccgtgcacaccttctctctctttgcgggattggyagtcttcattgactttcttctgcmgattacctgtttcgtgagtctcttggggttagacattaaasgtcaagaggtaagttggtgccaggattatagtctatttaatttgagtctagaatctagaggaagcagctagcgggtataacctttgtttccctctgtcccctcagaaaaatcggctagacatcttttgctgtgtcagaggtgctgaagatggaacaagcgtccaggcctsagagagctgtttgtttcgcttcttcaaaaactcctattctccacttctgctaaaggactrgatgagaccaattgtggtatgcgcttatctgtggtttttctctttcctctcactgaaacagattatcacatgccttctaagaagccagacagcctgggaaggagattcttaaagctgttaaaatgtatctaaaaaaaaagcaaaagcaaatgtggaacagtagataaaatgtttttccygtgagcttttatcagtccatataaacaagagttttmagttttttattttgaaatagtttcagattcacagaaagttgcaaagaaacttttatttttcctcttaataatgaggaaatagaagccaagagaggtgaagtggtttgccccaagtcactcagcccgtaagtggcagagtcaggatttgcacccaggaatttggactcctggtgctgtggtctcacccactgccctgtactccctattagcctgtcatttaagcttttccattttaaaaaatcctgctttttgtgtgtgcttaagattttatttctggtcgtaagcttatttactaagcagtctctgtcttatgattcatttgttgttccagatagcaatatttgtgggtgttctgtcattcagcatcgcagtcctgaacaaagtagatrttggattggatcagtctctttcgatgccagatgtaagatgacttccttttttttttttttttaacttctttagctgatgatgaatacatttttcaaaacatgcacgtaggtgtttcaagcaagtgcctgcttctaactgcaaatggtgacagggtttccagggttaggagaactgtcgcagtgcactgctggtgtgggctgtctggcattctgactgagcccctctgggcacagctgcagaacacgaataactagtcttatgaggttactttatgagatgctctcctgaytgtgggkctagcaggaggagcaccctggggccctggggggaagactggtggtgttaggaatcatgagtccagctggaggcatctcagccaggaacctcctggcaccctcttattctccrtgatcctcgccttgcttagttactatcagagtgttcacactctctcctattcttttatctttctttcaggactcctacatggtggwttatttcaaatccatcagtcagtacctgcatgcgggtccryctrtgtrstttgtcctggaggaagggcacgackacacttcttccaaggggcagaacatggtgtgcrgcrgcatgggctgcaacaatgattccctggtgcagcagatatttaacgcggygcmgcyggacaaytagtcagtaccaccttgtctygtacttcagaagcagcggaggaggctctcagccaggcagtcagctcaggcctgaaatgtctcactgaaaatagactttcttggaaaagttgtttttatgcaaaatgtatgttaaatctggctttaccttaaaaaacctttgaaaggactaatttaccacctaatactttgaaggcttttttcattaagtgctcatgtagtttttcttttgactgttagcagtataaaacgtagaaaaggaagttaggttttaagaaaaagtactgaaactaaagacttcctccctgtggagcaggtcagtaaccctgtctgtcctctctagtacccraataggcttcgccccctcgtcctggatcgacgattatttcractggrtgaagccacagtygtcttrctgtcgagtggacartatcactgacyagttctgcaatgcttcaggtaccttctcctttaccaaatctttccygttttgctgaaaaattttcaaattatcatttaaaaatcatttgcatcgtgcctcagtttatacctatttgtatatcaaagctgggtctccctgtgtcatcattcctttcctcagtcattcattctgaaattgtcatgttgttcctggctcagacagccaccctcggggctgcaagctgaacaaggtccacatgttcggagtgtggtttccacataaggtttctcatcctgttctaactccagcgattgcctctcaggattggtatctggccttagcttctcagaggagggcttttctttatcactttaccytgtggttttgtaggagcgtcgaggttgccctggaattttcttaataaaaacatagaagccccgggctctgaccagtcaaggccatacttgaaggaggagatctacttcagggcagaaaatgatgcatagtatgcctaagatgaaaatggtatttcagattcattaaactgtgaaagtgacatgtggctgaagcttttagataaggggaaagattatccctcactagtraggaaagtaatcgatagagaagaaagtaatrcccctcactgtcagtattttaaaatgttttacaaaaaatctggagacctattcttctaacagtcctccctgcatgtctccgccagtggttgaccctgccygcgttygctgcaggcctctgactccggaargcaaacagaggcctcagkggggagacttcakgagattcctgcccatgttcctttcggataaccctaaccccaagtgtgrcaaagggtaagtgctgctgccattgcagataagcatccactgcaactttaatttgcagtagaaaactaggagaggactgggctaagacagttgcatgggaacgtctcttctccgccccaccctgtcctggtcctttggtggaagcaggaaaaccgaaaacacctttttaagaaaatgcctcatagtgttcaactgattctgtcttagcgtgggcattcacatctcatgctctctctgtgtcctggccccctgggcatgagaatgaacgcagattcctgtgcacattccaagcggggctgagggagaggacggcctgctggtaatccaggcctgaaggaacttggcctrttcacttgtactgatggcagctggggcgtgatcttagctttagtaacattatcccacattaaggttgcgattcttttagcctcgtcatgctccttgccagcccatccatgtatagggttatgggctatctcactccccsatccagccaggcagccagttacccacggaagccagatatatggcccaaaaatagtgatgatgaccggaagtctctggccttgatttggaagctttkggaggtggaagatgagtatccccatgtatgttaggtaaaccctgaacttaggtttttcataagaacatacatctgaccagagtcatatcagtgaatcatttatatcatgcatgtgctttgagacctattcgaggtatcatgggatgactcctcctaaaagttaagtagaaatgaatcttgcagcttgatttactcactgactggatgctttggcctacgtaaaataagttgaagtagattcagtttttctgaaggcagtagccaccgttcctggggagcctccagggtgccagcgtcatgccaggcactccctgacattattccatttctcatcacgcagcctatgagtaggtggtgktatacccatttacagaagaggagactggggctcagaggtggtcattttgctcggggttacatgaccagtaagtggcagggctgaggttgttcccagggcccttgccctttcctgcttcctattacacaacaggactgagtaaaccctgtacmtttgattatacatgaaaccaggtggagaaacagcagctatgtaccaaagaacccagagcaatcgagaaaagcccatctggccaggcgaagtggctcacacctgtaatcccagtacttttggaggccgaggtgggcggatcacctgagatcacctcaggagttcaagactagccaggccaacatggcaaaaccctgtctctactaaaaaaatacaaaagttagttgagcgtggtggcaggtgcctgtaatcccagctattcgggaggctgaggcagggagaattgcttgaacccgggaggtggaggttgcagtgagccgagatcacgccactgcactccagcctgggctacagagcaagactctgtctcaaaataaaaaaaaaaagaagccagtctgggagagaacaagctaaacctttgsygttcccttatctgggggccttcttcatccctgaaatgtacagctgggtctgacctctgagtccagggtcaggtgattttgcttagcctcaagtgctcagattctgctgatattttgcaagacctggactctcttgacacccaggattctttcctcaggggacrtgctgcctatagttctgcagttaacatcctccttggccatggcaccagggtcggagycaygtacttcatgacctaccacaccgtgctgcagacctctgctgactttattgacrctctgaagaaagcccracttayagccagtaatgtcaccgaaaccatgggcattaacggcagtgcctaccgagtatttccttacaggtaaagcctgccctttttcaatggggtttacccagcaaagggcctacactgggtgggagtggggagggttcccttggcaagatgctgattttcaggttgggttctggcccctgctccattctgagcacagggcagtatatcaaaggaaatgggtgctgggcaaaggagttcagaatctaaagtctctgtgaaggcctgagggctagagacgcaaaacttgatctctgcgccactgcacagctgcaagagacacacactggaaaatggcttaaggcagggggcgcttggagagcaggcggctcagagcagggcccrgcccacattcttggccaacaatgaaccagaatccctaactgctggttatttgggatgctgcctgtatgtagactttttatattgttaggggttttttttcccaggaagaaaagtattatgtatgaactactgaatttagaaactgtagaaaggtaggagaaacaagtgatttatttttcctgcctccccatgatctcgcttaaagcaggaaggcctggatttgtttggaagaagttaagagccggttagctctggcagaaaataaatgaaagcatgttttcctcaggccttgcacggaccccgctgagcctgaggtagtgtctcaggatagatcaggattctttgtttttttgtgttttttcagaatgctgtggaatgctctctgtaaatgtctataaaatagcatagattgggcttataaacagaaactttatcaaaaatatacattttgcatcactgctgggcccttctctgggtggtcagtggccatgagaggtcaagtgagttgctttcggtgagtcttgtagacagccagcaaggttttctgcaagggatgtttcccaaaggagtytgaccacttggcagtggtgacaggatgaacacgcagtgttygggagtgagagcgagctttaatgagrcctcccctctcccctccagtgtgttttatgtcytctrcraacagtacctgaccatcattgacgacactatcttcaacctcggtgtgtccctgggcgcgatatttctggtgaccatgktcctcctgggctgtgagctctggtctgcagtcatcatgtgtgccaccatcgccatggtcttggtcawcatgtttgkagttaygtrgctctggggcatcagtctgaaygctgtatccttggtcarcctggtgatggtgagtcctcatacagtctcagtttgtccctagctcctgtttcacttgggggaattggctgtcttagattccatgtaaaccctaaagatggagtaagataccaagtctggcgcttgctcttggcacacatggagaggcaggatgagtgctggaggagtgctggatggtggtgggacagggcatagagggagcgagcattgagttggacatctgggagcataggcacattacaggcaatttctgttcaattttttctcttgtcccattccttgcggctatactagtatacctgatggtgcctctgaccatggaaatgtgatttcctggcctagttctgggctagtctgcctgtaatttgttattctttagagaytgcacaagcctgtagcctgatgacagcaggatgttcactttttacttagaaaattgcaccccrccccaggagctctccgaccagtgccttttgcctcctatgtggttatcaggtacttttaatcattaaagatgagagcactygagaaggtattcatggaaaatagaacagtgtatccgtactctcagatatgagccctgcttcagataggggagcactgaggtccaagaaaagaagttgtgacaatgcgccagctcggtgcgggtggggtgaccttaacgggttccagcaatttctcctggtcaacacaaacgtgccacagaaaaccaggcttttggctgtgtgtagagagggccccaraaagttcctggtacagtaagattggtgtgatggaggccttgtaagtccaatgggatgcttggcctcctctagcacccagggtgccctgggtaattagcacccatcctcagaacggggtggctgcctagggtcttcaacaggaagagagccatcctaaaggaagtgctttatttcagagctgtggcatctccrtggagttctgcagccacataaccagagcgttcacggtgagcrtgaaaggcagccgcgtggagcgcgcggaagaggcacttgcccacatgggcagctccgtgagtaccctgagcagggccacgccggcagagtcgcaccacaaagtaatcctcctcagtgrctgaagagtctggatcctgtacttacaaagcagcttctaaggattgcaagctttcaggcaattcatgaattagctgccacatcgtggacagaacggacgttctgtggaactgtacctgttggtacggctcctttttaggtggcagtgtgctgaagcaggaaaataacagacaagttaaacatgagacagctggcagtctttcycatttaaaatgcaggggagcccgggccagaacccagcgtgtgatgtgcggttggtgcctggagagtcgtcttggttcaactctacaccctggcttagcctatctctttaccactgtagaaaatacctggtaaagagtaaaaactaaaactttgtttcgtaacacttttaaatatttaagttttcacctgagaatataaagaaagataatcaattgggagacacgatgcagtgtctgtgcagaatacacagcttttaacttggtcatacctctcccccaggatcataaggcagcaaatagtgttaggtagtagatgatgctacctgggttcagttcccattgctttgaaccttgaatattaagaaatccccataagggctggccacggtggctcatgcctataaccccagcactttgggaggccaaggctggcggaccacttgcggccaggggttcgagaccatggccaacatggtgaaaccccatctctactaaaaacacaaaaattagccaggcatggtggcgtgcacctgtttaatcccagctactcaggaggctggggcaggagaatcacttgaacctgggagaaatcctygtaaggaagtgtttttgttcaattacaggttggtaaaagtggtttctaacacagtatctcttcttttaggtgttcrgtggaatcacacttavaaaatttggagggattgtggtgktsgcttttgccaaatctcaaattttccagatattctacttcaggatgtatttggccatggtcttactggragccactcayggattaatatttctycctgtcttactcrgttacataggtaagagttctcatcttaaaagggtggcacaatrgaaggacattactgaaagggaattctatcctgaggcattcttttcaagtatttgaactcatactaatggtcatttgataatgataaatgatactgagtaaaaaaatttcttctaaaagaaaaaacccatccaggggattcatgatggtgcagactactttattaggaagttgtcgatgttttttctggaggcctgatctgtctgcttcacaaaggcctggagccagtccttgaatggatctgagtgtcagcaggcagggcagctcctccctgccactgagatgaaggagtccatctggcagccagctctcacaccagcagtgctgcagaacagctttttatgtccctcatggatttcccgtttcttagcaaagtgcttgctgcctttcttcatctcgagactgtccttgatccttttacttctatggccacttcaccttgcacaaaaatgacccacggttgaaagarcaatactgatttgcttcatttatagctttgtcactaaattgaascactgaagtagaagattaagaaaatgaggggctttttatcatctccgggggatagaaagtagttctattacaatctaatatactagttccttttaagaaaaaaaaaaaaaaaaaagagatgagcactttggaaggctgagacaggagaatcgtttgagaccagcctaggcaacatagtgaggcctccatctctacaaaaataaaattagccaggtgaagtggtgtgcgtctgcagtcccacctacttgttaggctgaggcaggaagcttgcttgagcccagaagggtgggcttaggatgcagtgagtsgtgttcataccrctgcactgcagcctgaggaagaaagcaaagagcccatctccaaaagagagggagagagatgtggtctcactctgttgtccaggctggtctcaagcaattctcctgcctcagtcttccaaagtgggattacaggcgtgagccactatgcccagccaactagctccctttctcctgcagaaataagaaaaagtctctctctctcatagggccatcagtaaataaagccaaaagttgtgccactgaagagcratacaaaggaacagagcgcgaacggcttctaaatttctagccctctcgcagggcatcctgactgaactgtgtctaagggtcggtcggtttaccactggacgggtgctgcatcggcaaggccaagttgaacaccggatggtgccaaccatcggttgtttggcagcagctttgaacgtagcgcctgtgaactcaggaatgcacagytgacttgggaagcagtattactagatctggaggcaaccacaggacactaaacttctcccagcctcttcaggaaagaaacctcattctttggcaagcaggaggtgacactagatggctgtgaatgtgatccgctcactgacactctgtaaaggccaatcaatgcactgtctgtctctccttttaggagtaagccatcccacaagttctataccatatttttagtgacagttgaggttgtagatacactttataacattttatagtttaaagagctttattaatgcaataaattaactttgtacacatttttatataaaaaaacagcaagtgatttcagaatgttgtaggcctcattagagcttggtctccaaaaatctgtttgaaaaaagcaacatgttcttcacagtgttcccctagaaaggaagagatttaattgccagttagatgtggcatgaaatgagggacaaagaaagcatctcgtaggtgtgtctactgggttttaacttatttttctttaataaaatacattgttttcctaagttttggggttaccctatctgctttgagagacaaatacaaaagctaaatggaagagattctatctaacctgtccttatggtaactaaatgccgtcttacattgagctagaaatagacctagaagtttcattagacagccctgatccttccctatcctaaagatgatgtcttaggttgtataactatttggagatgagaatgatcaaccagggccaggtgcggtggctcaaacctgtaatcccagcactttgggaggctgaggcaggcggatcatgaggtcaggagtttgagaccagcctggacaatatagtaaaaccccatctctactaaaaatacaaaaatcagccgggtgtggtggcacgcacctgtagtcccaactactcaggaggctgaggcagaagaatcgcttgaacccagcggaggttgcagtgaaccgagatcacaccactgcactccagcctgggcaacggagcgagactctgtctcaaaaaaaaaatgagaatgatcaaccaatgtatacttcataaaactgaaaccttaataagccccagaccctttaaaacccttagccaccatttgccgtcttattcctggctttaagagatattccaagatctgctataagagatgggctgtgcctgatctgggtcctaaatgtgtcttgactcaaaacacacctcctcggtgagttccagagcataattcagattctgtcagtatactgaattcactctactacaaataatgggccaagggctaggtgggctgttatcaaattgtgttgtttacaaaaatgctaacccagggtcctcgcccaccagctgccagtgccctctgctactctttgaggctatggttaccccaagtcttttcattgcattctcacctggtgtgaaattggggctccctcgcaaacgctggtttcgctgttcaaaaaagcggaatattgtatagaaaagcatgttgtcttcagtctgctttgcagcatctaaaaattttcgtgcagaaatgttgtcatggccaccaatgccccggataaaccttaaggcagctaacacttggtgtttggaaaggagaacttctactatttcatcatttgctgttgaaagtcgctagcagtaagggagagaagtccaggtcagtgcaaacaacaggaacagagttagtttccatagtctaaaacctcacacatcagagttaccttcagcatgtccagagatagctgatgagcaggaggatagaaactctctagggataacagcagacaagcctgaaagacatttttagacccacttcagttggaaagataacggttaaaattttccatttttaaccacaatggaagtaaaaatctggcaatgcataccaaaggtttggagtcgctgaggacgtggtactgcaggaactgatgcagcatataaaagaggttgtgctggacaagggttttgataacaagttcatgtagrtaatgctgaggacaaaagtaaaaagtgaaagaacacttccaaatcattcagctacaacagactagaggctccccaaggactggctattctaaccaacacagtaaaagtctgtcattacaagaagtggtttcgtcatgcaggtaaagaccccaacttgaccktacacttcccattccaactaataatgtcaggagtcactcagcattctgagtcagggaggcagacctgtcttagcatatgagtcatcttctaagacagtgactgtgttttttttttaaattccttctgttttaacttgggcccagatgatttgaaggtacctgtactgcaatctgaaactggttaagagaacgaatgtattccatcagcacggctatcacaaatttatgaggcatctcctagggagaaaaaaatgtggtcttacaaataccaacgaggtgcaaaagaggctgcatataactcyctatccaacccccaccttgtttccatcttaaaatggcccagtgttcatctttcactggttttgcacamatcgctccagaaccacccgtcaacaattatgctttaggcctcagcattagaagccaaactaccagctctagggcctcacccaaggaaactccagtgattctaatcacttcaagtgactctaatcacatgaagtctcctcgttttcagcaacttccttgttttgagcattctcagtccagaagaggcggaaagctgcrgcccaccttcttttccacraaggctgacaggacatgggtgtacacatctgactggtccagcaccgcctgggtccgcaccggcctcttgaggagcgggctgcttcggytctgccctgcttccacygcctgaaagaaaaaaaccacaaactatgatcttcrgcatcttagaggaagggtgctgtttacagttcatccacaaggactgaattcttcgatgtggacccaggatatgagcggaaaacactttctctacttagatacaactttttcctgtgcgcatgcctgtaatcccagctactcaggaggctgaggcaggagaatcccttgaacccaggaggcagaggttgcggtgagccaagatctcaccattgcactccagcctgggcaataagaacaaaactccgtctcaaaaaaaaaaaagcagttcagatccgtgcagattatgcaatagctgtggggtgtagcctgagaacttgcatttccaagaaactccagatgctgctcatgtggctggtcagtggcccacactgctgagtcatgacggtttatggagcccagcagaccgtgtgggacggcacagaaactgccatttgggatcagacctactgattcccacagcccagaacacccacagcaatagagtccaaaaggactyrgccatccctcacgtctggcagcgtaggaatggacactgtcccagcaactggccctcttcagtgcctgtctcagacctcttacccttccatgaacagctaaaggggagtggagttctggggcttttgttggtttaaaaccattttcagcctaggactaatcagatcctggaattgaaataattcattctccttgtcctaaacttttcttctggcttcagaagatatgatgtacaagtaatacagcgggaattggtggcgataagccatggttattaccttgactacaaacacgcctgctaagtgctaacactgaatcgtcactatctcaacaggattctttcccaaaagggaagaaaggtgtggcaaatataaatatttctaatttaattttctaagtcctcactctggcataacagaaaaatatacaaaatattgcaaagcagagactgatttttctcatctataacagtagaccaaggatctacaggcaagatcaaacacagatgggaaaaacaaaaacagtgaaggtatgaagtgagatgcagccgccagctmgtgggatgcagggaccctgaatttactactcctccactatccmccactactgccaccttgccctatggcaggcggcaaatctcagcgaccttattctaatatataggaaacaattttgcatcataattacttagaaaatacccgggagggggtgggggaggaggaccctttgtcatactccatgtaactcaccatcgcataactctgstcggcatccaggtactttttatactcatggttgagtttatcaaaaacagtggctatcacgggcagcgatgctctgtctgactcacttaacactggaaaggcacaatgttcacacacggatcaaaccaacttcatgtcagcttcagaatttccacacgttgctatgataaaaactaatctcaaaaggttaccaatgcaaaagtacctttaaaggacactytaagaaatacaatactttaaagacctgacagctagatgtcattcgcaacccctttctggttacggttaaaaaaaaaaaaaaaaaaaaaagctatagcaggccaggctcagtggcacatgcctataatcccagcactttgggtaggccgaggcagaaggatcacttaacgctgggagtttgagaccagcctgggcaacaaggcaagaccccatctataccaaaacaaaaacaaacaccaacagcacatattggtaggggattattattattatttttttttggatacagggtcttgctctgtcgcccaggctggaggtacactgacacaaacggctcgctgcagcctcgtcctcccgggctcaaggaatcctccctcggcagcctctggagtagctggggccacaggtgtataccaccaaactcagctaattttttttttttttttttttttttttgkagagacagggttttgccatgttgtcgtccaggctggtctcgaactcctaggctcaggcaatcctcctgcttcagcctcccagagtgctgggattataagcatgagccaccatgcctggcctcagtaggggattcttaaagaagacacatatgcagtgagtggcttggattttgaaagaggtgtgtgtgaaggccaggggtggtggcccactcccctcctgtgtgcccactttcattcagaaccatcccatttattgttcttttctaccagtatctctacaaatcatctttccatttagcagcctttcctagggggtcacatagccacccctcacataaagaatgaggctgtgggtcacagacaagacacaacaatgtagcccacatcccgataaaaagtgttgggcagcacaggcctcacactggaatcagagcaagggggaaggattcaacttactctgtgaacagacagacaggatgaccatcttgcattcctttctctggaggagaaagtccatgagtcttcctttgtctggtaagagatttactatgggctcaagtttcacttggaggttccagaggtaacctggattttaagaggcagcaaataaaacagtatgatgcaaaccgtaacaaaagcccaaaagtggttcccctaaacatctgcggggcgggtggcaggtggtgataaaaagccgcaaagtacagtcagtgtagcttttccttcctaaccaaagcagagctgagccattcaggagcaattcaggagcgtgtctaccacaggaggatgacagcccaaccaccgcacacctggctgactcttttccaagtaacctctgcattcaggggcacatcaaaggtgtagctcctagtccttcattccaaacggggacttccctagacctagcccctcttttaacgtttaaaatagaaaaagatgtcaacacgtggcatcaacttcagtcctgtgctttggtttctcctacaacagctcattagtttaaaaggtaactccagaggctctcaatggaacatcataactcatccattcatcgacccataaatgtactgatcacccacactgccagcatctggtgtggcctttcccaattgggatgccacaggagaatgaagtgccacataaaaaatcatctgggtgacccccttttcagttggcccaaggcaggtacagagcagctgtacaggaaaacaccagcgagatgcacaggagagaaatgacttcattacatacatacagtggatgtcacatgaggctatgggttacagacaaggcacaacaatgcattacatacagtggatgcctacagcatcagggctaattctctcctcaagagttcttaggaattccagaggaaaggcaggaaaatacacagaggattaaagagtaacataggagattctctaataaccagcctggcgaggtattagagacacaggggcaacatggcaagaccctgtctctacaaaaaaaaaattataggccggctgtggtggctcacacctgtaatcccagcactttgggaggctgaggtgggcagatcacgaggtcaggagatcgagaccatcctggccaacatggtgaaaccccgtatctactaaaaatacaaaaattagctgggtgtggtggcgcatgcctgtaatcccagctactggggaggctgaggcaggagaatcgcttaaacccaggagtt

SEQ ID NO: 10021 - DNA, 22483 bp, Homo sapiens
tttcagctttcttgtcgatgcttgcacatctttagaagaacatattcataccgaagggctttttcggaaatcaggatctgtgattcgcctaaaagcactaaaggtgagcatattgttgaactataatttttcatttgagccattttctgatttggtttttaaaactgaaatatttagaactattaatatgaatagttgacagaaattgaatttgcatttttttcatggcagaagatttttttttttccaaaagaaatggtatattatttctatcgtgctttaaaaatttaatagggtacttttaaattcatggtccttatttctatcaagtattatgtaaaatgaaaaaatgtgttaagttatattgttgttagccttctagaaggagtgatatagctgagtgtggtggcacatgcttgtagtcccagctacttgggaggctaaggcaggaagattgcttgagcctgggagtttgaagccagcccaggccacatagtctgtgccacatttctataaaaataaaaataaattcaaaaatcattaaaaataaagtagtgacatatattaaaataagagttaagagaaatttattaaagaaaagtgtaattagagtataacaaaagatactttatttgcaataaactcttaagttgccaaaatactcaagattattatatttatttcagaataaagtggatcatggtgaaggttgcctatcttctgcacctccttgtgatattgcgggacttcttaagcagttttttagggaactgccagagcccattctcccagctgatttgcatgaagcacttttgaaagctcaacagttaggcacagaggaaaagaataaagctatactgttgctctcctgtcttctggctgaccacacagttcatgtattaagatacttctttaactttctcaggaatgtttctcttaggtaagtggtaattaaaactcttggcaaataatagttgaatttttcaactaacgttttatgcttgtagatatgtacaatttcatttggaatggaaatttttctttaaaaattccatatttcattactatgaggagtatactcyaatttaagaaacagcataccaaatgatttaatatttccttatcttaaagtcatcatcatgaatgccttaatggttcatcattggtgtttataagattcattgtccactgaaagcctttgtttactgggtttttaaaatatttctgttttgcttttcaaaatttccctctccctgctgtcagtgagcctgcttattctagacatacttgctgccttctgatacttccaactttttatgtgtaggtctgaaaatcagataaagatgttcaatttgtgtggaaaagcaaagtatgaactctaagattagcatggtttttagaatacayatttaaatatagagaggctatatatttctggttctttcttgtgttcaagccaatcatgtagatgaagggtaactattttgacttgtgtatgactgataataaagtcttcaaaatgtmctacatacgttattttaactcttctgtattttcacgtttggctccatctaataaagcgtttattcacttaagatccagtgagaataagatggatagcagcaatcttgcagtaatatttgcaccraatcttcttcagacaagtgaaggacatgaaaagatgtcttctaacrcagaaaagaaggtacgattacaggctgcagtagtacagactcttatcgattatgcatcagatattggtaagatgtagttgcattattaacagaatttgtttaaatgaggaaaatctctgtttctttcaaaggaactatgaaggcaactgttagaaagttggtatattactgacctcacccccaccctacagtaccggcccctcctgcaaagaaaaaaagaaaagaaattggtatattagtatctaaacatttttggggaagagtggaggaaggataataattgtcttacttgtgaacattttcatttagggcgtgtaccagactttatcctggaaaagataccagccatgttgggtattgatggtctctgtgctactccatcactggaaggctttgaagaaggtgaatatgaaactcctggtgaatataagagaaagagaagacaacgtgtaggaggtaagtggtggtcccattttatggaggtacagtgatttgctttaatcgaaagtacatttcacataaagaagcatgaactgtggtatgtgcctttttggtgcttaaagcacagctggaaagataggacgtatgcgtgtaaaaagttaaagcgatagtacaatctaatgttaagtgctacatctttagcacaaacataaaatgtgttaaaaggagaaaagttccctggattgtaattatcagggacttgtcaaagaggagccaaactgaaccttcttgaataatggatagaatttagtgggattgggtggaggatcagaatacttgtatcctattctagatgagaaggatgctatgaagaaaggtttgtgtagggaagaagtaacctatgtctaatgtagatagcgcagtatgacttgagtgaagtgttcagcataaggataaaggatggtattatggtaaacttaatgccaggctaaagaattagaatattaacctgggtgttggtgaatcattgaagatttatgatgtgaggcatgatatgatttaaaaattttagaaaattacctgatttgaagaattgagacttggaagtagggagaatggtcagcaatgtgtgtcagtagtccaggcatsagattattgtttgaacttgttagtgacatggattagttagttaggagtacgaactaaataatgaaggaaatattatcaaggaagaatcagaaagaccaaaagaccatcataagatggtagagttggtaataaaacttgcaatctccttgatcaagaaatcagaggccattattcttccaattactttaggaaatttattatcttttgaatatcagaaccaaatgttactaactatcccaatccctttttcatcttttggtttatttgttattgcatacttgtgtttcttctttacctcctttgtagataggataatactgatgacttatgtatgattttcctagggctactgtagcaaagtactacaaactaggtggcttaaaccaacagaaatttgtctcaccgttctggaggccagaagtctgaaatcaaggtgttggcagaatgcctgaaacctgcaggggagaatcctttcttgcctcttcctggctcctggtagtggctgtcagtccttagcattccttggcttgcagccgcgtcactccaatccctgcctatgtcatcccatggtgttgctctgtgtcagaacttccctcttacagggcacattggattagggcccacccaaatgacctcattttaactcgagtacatctgtaaagacacgaattccaagtatggtcaccttcataggaactgggggttaggacttaaacataggttttttggagaacacaatgcaacccataaaacttcctatcccaaatggagatatttctcagatgcagatcatctttattgccctctttcccagtcctgtagtttcagttatcaccagtcctgtagtttcagttatcacatctaaatagataaccaccacatctgtaccaccgttatcttgaaaatgtcagttccactttactaatggcttgctagggagacctcatcacatctgcttttcattggtgctttaagcttaacgttttgaaatgaccatctttatcctctttatcctggttctgtgtgaattccattttcttctaacagcaccactattccctagataactcaggctttaaccatgggttctacctcttcctctaccatctataatcagacagtttttgtgtcatataagattctatctccatagtgtttattgcattgttactgtaagaatcttcttggccgggtgcgatggcttacgcctgtaattccagcactctgggagaccaaggtgggcggatcatgaggtcaggagatcgagaccatcctggctaacacagtgaaaccccgtctctactaagaatataaaaaattagctgggcgtggtggcgggcgcctgtagtcccagctacttgggaggctgaggcaggagaatggtgtgaacctgggaggcggaggttgtcgttggctgagatcgggccactgcactccagcctgggcaacatagcgagactccgtctcaaaaataaaaattaaaaaaagaatcttcttggtctttatgcctcctccttgaatctaccctacatattgctattaaggctcactttttttttttttttttgagacggagtctgtctttgtcacccaggctggggtgcagtgatgctaccttggttcactgcaatctccacctcctgggttcaagcgattctcttgcctcagtctcccaagtagctgggattacaggtgcacgctaccacgcctggctaatttttgtatatttagtagaaagggggtttcactgtgttggccaggctggtctctaactcctgacatcaagtaatctgcttgccttggcctcccaaaatgctaggattacaggtgtgagccactgcacctggccaaggcttacattttaaatgtataactctactcaagtatctcacacacatacccttcagaaattttaattggtaatagggatatttatagcttggcattaaaggtctttcataggattgctctagcatacctgtctactatttcctgtctttgagcaactttagtcaaackatgttatttattttccagacacttttattcatttgcttacactatttattgatataatgtttttacttccatctctactgatcttttaaatacttttattcgtgcctccatttccatggttcttgcctcagttcagaccttcatcttttgccttaacatgtaatgatttctttttccctacccttactgtacattatatgtatttgtattacatttctttctgtattgtgtcttttttattttagggatatggaagtataagtggggaatggaataaaaatatatcctttagtatttttcctattttgaaataattcctcttaaataacttaaaatttataagccgatgtaaagttacatgttgaaagaagactgcaaatattaatatgaattattggtgaaagacaagtaaatgtgaagttgtaattgcttatgccttgcatttcagattttgttagtggagcactaaataaatttaaacctaacagaacaccttctattacacctcaagaagaaagaattggtaggtatttattatatgcatttatttaaattaaaatttgtatagtattctataaaatacaattacaataataattacctaacttagtaatcaaatttagtttaatcaaatcaaatattatttttaatagtcatactgtactatacacactatgttgtgacattgctaattacataggctataatgaacccaaaattgtaggcaaaaatttttttagtctcctatgtctttaatcttcttaatcatgcttttctgtttgtaatttagatgctattgaacgtgtgaaaatagttcaacctcatttttatcttaggactagaagttcattattgtatatttcaattttttatcctaatttgcttgtggctgaaattattcagccagtaagagtcaacatgatcttctgttttctagagtgaagaaatgaactggttaatactcacttatgatgaaaagcaaaaataatatttagattagtttttgtttcaactccttgattgtaatttcttccttacattaatattctttaatgtatatcatatgcatcttttagtctgttagatttaagtaactgctgtctcttaagagtcttgcctctgcgacttccttattttcatttaagtaattgcagagtgttttagttaaacaacatctacttaactgatgatgtaaatatattctcattttttgtttagctctaagtaatagctttataagaagaaattatgtaaagcttttatatgttgtcaactctgcagtagaagcaagaagttggttttgttttgatattttttcagcccagctatctgaatcaccagtgattcttacaccaaatgctaagtgtaaattgccatgccagtagattcttctcatggtttctcaagtaagaaaaggaagtccatcaagcacaattttaactttgagctgttgccaagtaatctcttcaatagcagttctataccagtatcaggtagcaaatagaatttatataaatggattgtaaagattaaaatgagtgcctattctgggcacagtgcaatttcatattaataataccacccttaggaactagaactttattctgttttatccaacctatgaatttttataaaaccccctgccttttaaaatagacagtgtttcaatatagaggtgtgtgtgtgtgtgtgtgtgtgtgtgtgtgtgtgtgttatgacaacatctattgaaagttgtgataacccagagtagtagtttgggcttctggtgatagcattgatgcttaggttttatgtgattagacatcctgaatcctgctatagttacatctgggtctatagctgtggctttattgctgtcatttgttgaattgaggttgccagatgtttgatcatgtctgattcccaagtgggagtgttactattgcaggttatggtttgaaaatgagggtatttttaaagttttagactcaagtaccttttgtaaaagctttagaactttgttgacgctgttccttgtgccatggcttccagatcccttaccagcccagccattttcttccatattaactacaagttctaatgtggccaaccagagccttcagagagtaatagagtatgatcatgctaatccggagattagtctgggtcttagattcaattggctcttttagcatatacagaattcaagttggctcatattaaccttacgatcaaccaaaaatgaaatgaaactctaagcccagggtcctccatctcatttatcttacatttagtcaaaatgtgagtgatctctgattattttagatttttattttgttggtttcagacaatgttaagtttcatttttgattcattatctgagttatatgagttccttcccaaagcctgtctcttttttctgttgtccaaaagggttcttatttgttttattgagaagttgaacagaatagcaacttgaggttttccagaaaaaaacactgcttcacaggttctctagggctcattgaaatgtgatgatagtaactctgaagcttatgtctgtagcttttgcagtgttcacaggttggagacttaaacttttttaagtaacatagttcagttgtttttttttttgaatatataaaagcctttgcagtttggaggactttttccaaatggcaaatgggagttgtagttctacctgcctttgcttattagcattacattttccccaaggaatgaacatactgattccttcttctcctcctccaagctcccaaaacagaggttaaacagtcttgtgctatttttagtttgagcttgcctaatcaatgaattttttaataaaaaaatttaaaagttcaacaatagtaatcgtattatttttacaccacttttctttgaccctactttctcagccacaattcaacaaattccatttgcaaaattgaaaatagattgatttctaagtttagattataaaaaatatgatgcttttaaaaatatataaagacaacattagtctgtagtccatagagtatctattcataattgtctcttttttttttttttgagacagagttttgctcttgttgcccaggctagagtgcaatggcacaatctcggctcactgcagccaccacctctcaggttcaagcgattttcctgcctcagcctcccaggtagctgggattataggtggccaccaccacacctggctaattttcttttgcatttttagtagagacggggtttcaccacgttggccaggctggtcttgaactcctgacatcagctgatcaacctgccttggtcttccaaagtgctgggattacaggtatgagccaccatgcctggccataattttcttacagatgtgataaatttgcattgttccatatattctgactgtgccttctgcgaccattgacgcatttttttatttttattttttgagacggagtctcgctctgtctcccaggctggagtacagtggcatgatcttggctcactacaacatccacctccgatgttcaagtgattcttgtgcctcagcctcctgagtagttgggattacaggcatgcaccaccacacccagctaatttttgtatttttagtagagatgggatttcaccatgttggccaggctggtttgaactcctggcctcaagcaatccgccctcctcagcctcccaaaatactgggattacagacgtgagccacggtgcctggctggacacatttttaaagtgactagactgcagccctagaataaagctacttatgacactttagatgtataatattggcttccaaaattttctttagctaaatgcacccaaaagtttctaaggtggttgtatttttttccgttttcataattgaaaaaatgtgaatgtctctgggaaactttgtgaattctttattaataactcagatgaattgagagggttcatgtttgttgaatgtgtcctgggcgtgattcaaacataaatgtatatggagcctttgttcataactattttacttctttcgtaattgtttactatagttgatttcataatataaatggtgttaaataattgagcttctgttgtaccagtaattatttgcatggaacacagcagcagccaagggattaggaatgtgttatagaataattagtttttgtttacttgccaaaaatattgaacaaattacattccggagtcaggtgggtagcagttggccagcaggtatatctcaaatactcagattccaacttgtttgccaatagcttattttttataataccattaattggtattatgtactagatactgactaaatattttatatagataacagtaatattcatcatagaagtccgttttcagagcctaaagccatttagtaagtgatggagcaaactcaagcctgtctccaaatcttgttctttttccagtctgcaatggtgcctatccctgccttgtattattaacagagtttaaagaaaagctctaatataaaagtaatgcttaagctgacctttaattggcaagtcaaaagtaaaaaatgaatgctttttcttagctgagttgggttatttgacacttgaagtttctaaccagaaattaagtgatttcggttgttgcttgggatagaaattaaggctttgaatctaattgctgctattactattttatactttaaaaggaaaatagatatgtgtggtatattacatgtggttatttttgtagttcacatcgatacaagctcagaagggtcatctcagagttcactctctcctgtactcattggtggaaaccatttgatcactgcaggtgtgccaagrcgaagtaaaagaattgcaggcaaaaaartttgcaggtackttatccaggacattttgttttcatcggataaatatttggtgtacacataattaataaaatgttttgtctttctgtcaagcatcatatttgagtcataattttttaaaatcccttctgcctttatagtcttattaatcaattgccttttcaatacccaccagagaaaaattactaatttgagtccgctttgcttgcttaaaatcctattttatgttgatggtgtaattttaaaatttcctgttagaggctgggcacggtggcttatgcctgtaatcctagcacttagggaggctgaggtgggtggagcacttgagctcaggagttcaagaccagcctgggcaacatggcaaaacctcatctctactaaaaagtacaaaaattagccaggcatggtgccacatgcctgtagtcccagctacctgggaggctgaggtgagaggatcatctgagcccagggatgtcaaggctacagtgagcwgtgattatgccattatactccagcctgggccgcagagtgagaccctgtctcaaaaaataaaaaacaaaraaaaaaattcctkttaggttaaaaagctagcctattctaacaattctgagttataactgactgactaacttttaagattagcagatcattttttatgcaaatgcagtgtgttcatgtatggtatcttaaagttgaactgtttttaaagaattattaatccatccaattattatcaatatgatttgctgtggactttatttcaamtttcgtatttyaagtatttctctggtgtttatactataaactgacatttttaattccacttcttctagagtggaatcaggaaaagcaggctgcttttctcctaaaatcagccataaagaaaaggttcgaagatctctgcgtttgaaattcaatctagggaaaaatggcagagaartagtaagtttcttaccattttattgatctttatattagcataacgctataaacttgatactaaaaaacactcatagccctaccttccttccagtgactgtctcattctgttctttttatccaaaactcttatacttgagttgatatcaaatttccttgcattggagtacccaaagcttagtccttggacttctcttttttctctccactcactcaaggtgatcatcagttttaaacattatatacaggttgagtagcacttatccagaatgcttgagaccagaagtatttcagattccccatttttgggggggattttggaatatttacattatttttactagttcagcatccctaatctgaaagtctggaatgctccagtgagcattttctttgaacatcatgtcaaatacttaaaagctttggatttttggagcatccagaactttggcttttcagatttggaatgcccaacctgtatttacttaaaacttccaagtttatgttctctagtcccaaatgctcttctgaatgactccgctgtctcttaacatctgcttttttgactctcctacttggatatctaatccaataggcatttcaaatgtaacctgtcccaagcagatggatttctttgctgctgctatgccctgcaccaaacaacacttttacctgtggttttccctatctcagttatggcaaatcgttcttccagtcacttaagccaaaaaccatggtcaaatccttgattcctcactttctctgagacaccatgtctaatccattagagaatcttgtctaacttctgcttttagagtatctccaaactgaccagttctcactattactacttttcccactttctctaagttctgtcatctctcagctggattactctagtaaactcctgttaatagttcttccttctcctacccttgctgcagttctgtagttgaaatttatcttttaaaatctgttaggttatgtagttttctgctcagaactctccagtgactcctcgtttcactctgaataaaagccagagttctcatgttgacctgcaaaggcctcacgtgatctgttctcaggctgcatttctgagctctcctccagtcccccttgctcactctgctccagtctcagagactgcactggcattctgctctttctgtagtgttcttcccccttaaatcttcatggctctcacctttgttttgttttactcacaaattatctyctcatcaccctattttaaactaaacctccattcttcaccactccatatcctttttactctgttttacttttctccgtagcacttttcaccttgtatattgtatttatgcaatataatttactgtttatcttaagtctaaatttccccatctaaatagaatgtaaattacataaggataagattttggtctaggtaccccactgccccaactatttgtgaacaggccctagcacagagtcagagcacacacagaaattattttaattaatatgtgagactgttttaaaaatagatcataaaatatcaactaatagcaaaatcaaatgattacagttttcattagcaggcaagaatgtttgtcattgttaagaattgtttctcaattatatatccctttttaaatcagctaaagattttgataactacaaaaaattattctgtctttatattttgaattaactaggcttatttcttaactaaaacttttttttttctgtacagaatggatgttctggtgtcaatagatatgaaagtgttggttggcgacttgcaaatcaacaaagtttaaaaaatcgaattgaatctgtaaaaacaggtttgctttttagcccagatgttgatgaaaagttaccaaagaaaggtacatttacatactactgttagagttttacctaaaaatcctgctttagttgcttttttaatggcaaaacatattaattaatttactgttctagagattaaaagttcatgtttgaatagtgaaaatattagaattggcaatgtatttttctatcaacaattgggaaatgcttatacatgtaaatatgaaaatgtttgacattcttatgttaaaaattatttcttgtaacacaaatactttattagaattaaatgcttagtgacttatttgccatgtgcttgggtattatttcaaaacaaggttaaatacaaaggattaagcactgaactgctttattttaggttcagaaaagatcagtaagtctgaggaaaccttactaactccagagcgactagttggaacaaattaccggatgtcttggacaggacctaataattcaagttttcaagaagtagatgcaaatgaagcttcttcaatggtggaaaatcttgaggtagaaaactctttggagcctgatattatggtagaaaagtcacctgctacttcatgtgaactcaccccttccaatttaaacaataagcataatagcaacataacaagtagccctcttagcggggatgaaaataacatgaccaaagagactttggtgaaagttcaaaaagcgttttctgaatctggaagtaatcttcacgcattgatgaatcagaggcagtcatcagtaactaatgtggggaaagtaaaattaactgaaccatcttatttagaagatagcccagaggaaaatctatttgaaactaatgatttgactatagtagaatcaaaggagaaatatgaacaccacactggtaaaggtgaaaaatgtttttcagagagggacttttcaccccttcaaactcaaacatttaatagagaaacaactataaaatgttattcaactcagatgaagatggaacatgaaaaagacattcattcaaatatgccaaaagattatttaagcaagcaagaattctccagtgatgaagaaataaagaaacagcagtccccaaaggataaactaaataataaattaaaagagaatgagaatatgatggaaggtaacttaccgaagtgtgcagcacatagcaaggacgaggctagatcctctttctcacagcagagtacatgtgttgtaacaaacttgtcaaaacctaggcctatgagaattgctaaacagcagtcattggaaacatgtgagaaaacagtttctgaaagttcacaaatgacagaacatagaaaggtttctgatcacatacagtggtttaacaagctttctttaaatgaaccaaatagaataaaagtcaagtcacctcttaagtttcagcgtactcctgttcgtcagtccgtcagaagaattaattctttgttggagtatagcagacarcctacagggcataagttggcgagtcttggtgatacagcttctcctttggtcaaatcagtgagctgtgacggtgctctttcctcttgtrtagaaagtgcatcaaaagattcctctgtttcatgtatcaaatcaggtcctaaagaacagaagtccatgtcatgtgaagagtcaaatattggtgcaatttcaaagtcaagcatggagttaccctcgaaatctttcttaaagatgaggaagcacccagattcagtgaatgcttctcttaggtctactacagtttataaacagaagatcttatytgatggccaagttaaggttcccttggatgatctgactaatcatgatatagtaaaaccagttgtaaataacaayatgggcatttcttctgggataaataacagggtccttaggagaccatcagaaagaggaagggcctggtacaaaggttctccaaaacatcctatcggaaaaactcaattactaccaacaagtaaacctgtagatttgtaattggtaaatgttatacttgtcattaatgtaaataaagtgagtaattggtatgacttgcaggatgatgtacatgttagtttgtagctcaggatgattgttaagcaatagatttgctctattgaaaatgtttcatttttttcactgtacaagcaacttagatttttatttgtacaaattacttctttgtttttcttaatgatggcaatttttaaactttaattttattgtgatctcttaaagcagaggttagactttacctttctgactctgtcgtccaggctggagtgcagtggcgcaatctcactgcaagctccacttcctgggttcatgccattttcctgcctcagcctcccgagtagctgggactacaggtgcccgccaccacgcccagctaattttttgtatttttagtagagacggtttcaccgtgttagccaggatggtctcgatctcctgacsttgtgatccgcccgcctcagcctcccaaagtgctgggattacaggcatgagccaccaygcccggctagactttacctttctaaagaaattgtttactggatttataagaagttaatttttgaaaatgacatatttttgtgtgatagaaagaatggagcaagttgtgcctatttcctccaagtcagataaggtttctaaaataaataaatttctagcatataaagggtagagataaactctgcaaatcttatgtctggaattatattaatgtttattgtccttgccaaaattcctagaaattaatttccttcaatagcatcctaaaactctatttttatttggggcagagtaatttcatttatagtgccagtaggtgtaccttgtgttcactcgaactaagaacaatggttaaggcagaataatgactaaaatatgttcatatattatgatgtggaaataattgataacttttaagccatactatgtttttaaagataatttgcacaaacacgtttgtgtctgttctgtccaatatagatttggcaattatttaaagagggataatcttgaaaaaaattaaccaaggtgatttcttatatgtagatgctcgattttggaatttgaaatagtagatgcacctctttaccttttttacttggataaaaacctatgatgattttgtcctgtgtgtaaatgttatttatttagcatagacattaaagataactctctggaaaatgacttgactaaggctctcatgaaattcaaagtgccatttagaacatgcaccaaattgtcaagtaaatctgtctaaatttatattttaaattattacaaattacacatctttgaggaaagagtattatgaacaatagaacatattctctaggttgtagaggaaggaataagcagacagaatcaaccactaaaggtagtttttcagattggttgttagaatgtcatgtttagatgttggagcagattagagcagcattcatgccactcggagcaaccagacttacagcataagtatgtacgaggaatttcaaatcatcagatgtttgcttggctaggttctactttgtttatttgatatcaaataggtttgtagatgtttatggcatttctaattgtaagtagagacaaaatattcatatagtcagatatatgttgtctgctttaaacaatttttaaattttaaaaatgcattaacgtctttttatatccatcaagggaaggatgaaatgttgaatttgaagactaattcagtaagaagtcctaggggtttaactgtacatactacctgaactggcttttctgagagatgaatcaataatgaaacatgtctgttttaaaaactaccacatgtgactcctatttttgttagctgaaagctgcwatacggagtattacaggaatgtgaaggtgactagcttgaaggtagggtaactagagagccagaaaagttttgttttaaacttgatttaatgcgtttttattttttcttatacaaaatagagataatgttgctaacttcatggaatatttgaggaaatgatatgaaagtgtctggacgtgcagtaacctcatggsttcttctcactgtcttataaatgtaaataaagatctaatattaatttggttatctaataacaacttaatacatagaacttagtagactgcatggccacattctataatatgatcactaagaacttaatgtaggattttaatagtcatgtttttcttaattgtggcagaatttaaaccttaattttgtgatcttttttagttagttttttgttttcttttctttttttttttttttttttttttgaggcggagtctcactctgtcgtccaggctggagtgcagtggcacaatctcagctcaccgcaacctccatctcccgagttcaagcgattcttctgcctcagcctcccaagtagttgggactacaggcatgcaccaccacgcccagctaatttttgtagttttagtagatacgggatttcaccatattggccaggctgatctcgaactcctgaccttgtgatcctcccaccttggcctcccaaagtgttgggattatgggcgtgagccactgcacctaacctctgtgatctcttaaatatatatgargttttatttttgaaacaccaaatttcaaatgaagcataggcattttgatctatttcagttaaatttaacacaaaagcagtaaattgtagtgacttcatttttttcaaccacaaaatgaagataacaatgaacaaagctaaagtaaaactcagaattgaaaaaagtctctgtgcatcaataataaatactaactccagcatggccagtgagcctagagccatttaatggatagtgtttgtcctgttgatttagcatgcattgaaacaagaagcaagaagcagatgagcatccgtgaaagaaaaagtactgggaaagaggcttggcttcaaaatgaaaggccatgtgtctcataaatgaattttgccagcctctatttattgcataaaaattgctgtagatgataatggatttgctctctagagctaagataaatagatctggattctaacctcatcaggttacttgttttgagacccccaggttctttactcatcctccatcttgatcaaatttgtagtgccatatttattgtatggctttacattttgattttagtatttgaacaaatttcagtgttcaagattgcacatagtaggtgctccataaacccttatttaagaatctgggactacctggacatacttctacagtatgctgggagtatggtttctcttcaggccaaagtggaattttacttgatggtttgtgtggacgtttagaaataacactcagagctgatatttctacagattttcaagtttatcactttaatggaagtttctggcttcttgtattaaatatccccatagttttcctgattagtaagaggcccctcagagcagggtataccttatcatagccaccattaaaagttcttaggacttcatcttttgtctctctaccattcattgcctcttccctcttgaagctgaaaggctttagacacaaaaacaaaaaacatattctagaagttgacaaaattaaaggtgtgctgtagtggtgatctggcacgttgtaattgagactgaggaggtgaatgacttacatggaggtcgatggagctgaagagggtctctaggaaatgtcatagtcaagaggtttgtatgcagaatgtgggggttgaagagctgtgcggctcctggtgagaggcacacttatctgggatgcagtctggggagtcctggcgaggcagcttccacctgctggaggaggggccggggcggagctaagatgcggaggagggtgacgcactagctctccagttcgcccgttcctggcctgacccccaccaaggcccataccgcwgtaggctcctcgggctgcccctcggtgagtacagttttgatgtcggctcggccgcctgccgccaacccgagatttggtattgccagttgtgggagggcgtcctgctaaaatccttgaggtggaggctggggtcagacraaggatgcgtaggggattagaatgtttggctatcagtaaggggaagggagtactgagggaggagattgtgtagttcatcaaatcagagcggcgtttgctgggatgacatcctgcattcagagtggacaagggaaagatggagatggagagcctcgtgtctgcctccagccttttccatcagaattgcagattttgctgttaaacagctactctcagctctttggagagcaaggttttatatctagtggctagaaaaggccttttctttgcagaaaaagaaattggagggtataaaaatttttgtttcagtaaaggaaatgcacgattttgcctcctcccacctctccatcccccatcctcagtagaagaatgattagaaggagggtttgcgccggtcctggtggctcacgcctgtaatcctagcgctttgggaggctgaggggagggggtggatcacctgaggtcaggagttcgagaccagcctgaccaatatggtgaaaccctgcctctattaaaaatacaaaaattagccgggtttggttgtgggcgcctgtaattccagctactcgggaggctgaggcaggagaatcacttgaacctgggaggtggaggttgcagtgagtcgagatggcgccactgcactccagcctgggcaacaagagtgaaactccgtctcaaaaaaaaaaaaaaaaaaaaaaaaaagggtttgcaaggccgctgcctgaagcatgcatccaaacacgttaagcagctgtggggtaagctgcaaggataatgttcacttgttttgcagacatacccatagaaaccaacattttggacaggttgaccctcccacccccaggctagttaactccctctcaccaccactgcctccccatattctaacctccagaactgttaaggcaatgttagcaacataataatagcaatataggggctcattctgtgcctggcattgkcctaaacactcttaacatgtatttgcacacascctcacaacaaccctaaaaggtaaatgctttaattatctccgttttgcagaggaggaaactgagggacttgcctacgatcactcagcatgtggctgagcaaacaaacctcaaactaccccagcagattgcagggctggatctaaggaacattttccttcctttcaggatcgcaaacgtattggatgtttgctaaactgaaatgtttccctgccaccactcccaaccttcctgagcttcttgatttgtgtcttcctgactccctcctgttagacttttattcccagagactgggaaaacccaagatgccactatctctttctcaaaatgtaagcaagtttggtttatttgttttagtaagagagggagagagtgatgaagttaggagtaatgcagaactttcagggagctacaaggaggataaaaattatgagtgagaaccgccattccagcctagctttctcaagaatgcaaacagagggaattggatacctgcaactgttttgtttaatacctttctgcaatgatgctctgcctagcatggaaacttaagacaaaagcaacctcctaaggattctttgttacaacccctttctgggtggtcctcgaaccacaacctggagtggttgcatcattataaytgtattatcacaawtgccgattgtagcctatcagtatacatttggtcttttatctgcaggttgacaatggtctccaggatggtctctaccatgctatctggcctactgttttggctggcatctggatggactccagcatttgcttacagcccccggacccctgaccgggtctcagaagcagatatccagaggctgcttcatggtgttatggagcaattgggcattgccaggccccgagtggaatatccagctcaccaggccatgaatcttgtgggcccccagagcattgaaggtatttactgtgttctgatggtttgaagtttccgttagcattttaaataatatatttgcacacttctcacaacaaccttataagtagatgcctttattatcctatttttttcagaggaggaagctaatytttaagagactctactttctcatggttttccctttcttcttctacacagtgtctacatacttacatatacacacccacatgagactataagtcctgtgagagcagggaccttatctatctaattcatagctgtagccctagcacctagcacaatgtctggtacataataggtgctcaattaatgtttgttgaatgaatgaaggagcatctagtgttatcactaaagaaagattasaacccagacatgatgttttctcctcactgctgatcttcaggaaattgtgtcatcagatagctgccttttgagtcaatgccagccagtacttgtaaaagagcttcaaaatgtagaacctacaggatctgacttgattcctaggaatgactccagtatacccaagaggagacaaaagaggtactgacattaagagtttacgtgaaagcttttgaaaatatttaaaaatataacaattttattaaataataaattaagaataattaaatcgttttaaggtggcaagaccattttccccctgaagttttccaagtttctggcaatgtggtcataatacttgtattagaaagcagtacttcatttgtttgttgtttaatgatttgtttataaagagaatctagcttctatgagctggtgatgcagcgttagacagattccttatttccatgctttgctttttatcctctgattctaatgatctccttctccactaaggcagaatcctaaagaagtagcatggttaatttcagttaaatgcaagggagcatttccttatagttcaaggatttgcccatggagtgggtccgaaggaaaatgagaattatctctaaaagcataccaaccaaatgctgtttgttccctacagattgattatgcactattttgccagagtctgtgattttctaaaaatgctatctgccctagggttctgtgaatgccatgaatattgttgatagatgattcttatttctgttttgttacccatagttttaagccattgagtaaaactaattcggtgagattgtagtctgtttaggttgacatttgatttcaggagtggattaacacaaatgygttgaatcggcaagcatgcaaacctagcacatggcttgaattagaacaaatccgacagagcttcctgtcatcccttttagggagaatctcagtccttctcagcatctgtcaccgttacttcaagcacacctatatatttcaggccagctcttttgagacaaacaataaatatctacctttttaaggcaggaagtgcttggttattcacctaagctgttgtcatggagytctctgagtttccactaatacctgaggcctgatcagctgtgctggaaaagaaacagccactcccggggcatcaaaagcctctttatccagagactccattccctccagtatccaactatttagtacccactatataccaggcactaggcaggagactggtgcagctctgccctaaagattcacagtctgagtggagagggaagtggggacacacatcaaaagttatgacagtgcatcccagcaggtgttttgatagatgtacacacaagctgccgccgtggaagcaaacaggagtaatttagtctgcttaggagtggatggggtggctataaggaaatgctgctttgaagaagcaacatttgacctgggttttgaagtttgagtaagagttcatcagggaaccataagtgtaaaggcatggaggtacaactattatgtacccacaaaaactaaaaaaataaaaggcatggagacatgaaagatcatggatyaggacaattcagaattaaaaactctgtttcccttattacccttggaataatgtgcttaacatagcaatttttttttcttctttttgagacagagtctcactctgtcacccaggctggagtgcagtggtgcaatcttggctcactgcaagctctgcctcccgggttcacaccattctcctgcctcagcc

SEQ ID NO: 10022 - DNA, 40394 bp, Homo sapiens
ggatcagagtttttaaagatagtttggtgctgggtgtggtggctcacgcttgtaatcccggcactttgggaggctgaggcaggcggatcacctgaggtcaggagttcaagaccagcctggccaacatggcgaaaccccatctgtactaaaaatacaaaaaattagctgggcgtggtggcacttgcctgtaaacccaggtwctcgggagattgaggctggagactcacttgaacccaggaggcggaggttgcagtgagctgagattgtgccactgcactccagcctgggcaacagagtgagactccatcacaaacaaacaaacaaacataatttggcaggtagggkctcaggaagcagagtgctgattggtcaaggttggagatggaatcctaggggggtcgaactgaggttttcttgctgttttctactcctagatgggatggcagaactgattggcccagattaccggtctggatggtgtcagctgatccatccagtataggatctacaaaatatctcaaacactgatcttaggttttacaatagtgatgctatccccaaaagcaatttggggcggttcagactcttggagccagaggctgcatgacccctaaaccgtaatttctaatcttgtagctaacttgttagtcctgcaaaggcagactggtccccaggcaagaagggagtcttttcgggaaagcgctattattaattttgtttcagagtcaaactatgaactgaattccttcccaaatgcccagcaatgaacaaggacagcttaaaggttagaagcaagatggagtcggttaggtctgatctctttcactgttataatttcttcagttataatttttgcaaaggcagttgaaactgtgtctttgaaaagacacagcagaaacatctgttacataaacaacagaaatgaggaagaaagtatctgactcagtagcaaaggaaatccacagaaagaatgttctgagaacggaagcaatgatcagaccaggtagggatatgatagaaagaaaattctcatctaattcaaattctggccagtccttttggtgatttccatactaatactaggcactttaaaatgtgagttctggtaacacatggaacctcaaagtagaaatgtctgttgttcatttttaaaagactatttgcagagttttgatgtttatcaatgaaaagagtttttttttwaaatttatgaagaatagggaatcctatatgggcatggggcaaataatcaaactgttttaatgcagaaaaaaatgtgcaacagaaagagatagctcatggagggataaagactttattctggaccctctagattctgkggggcctgcagtagcttcaagatgccccagcatgtcctgcgcccacacccctgtcaagatcactgtggtcagggcgtcttgcccatggccagtgtattagtctgcttgggttgccacaacaaaataccacagactgaggttgaaaacatttattttctcacagttttggaggctagaagtcctagatcaaggtgccagcagcgttgcttcctctgaggcagctcttcttggcctgtaggtggcgccttcttgctgtgtcttcacatgggcggcccctcagtctgtgtgtctaggtcctaatcttctcttataaacacaccagtcatactggattagggtccatcattttaccttaacggcctatttaaaggccttatctccaaatacagatgcattttgaaatactaagggttagtacctcaacatctgaattctggggggacacacttcaacccataacatgcaggcagacctcaatgctgcttgcagacccaaggcgaactgcacaacaatcaagcctggctcttaggacaaaaacatctgccagagtcaaccaaactgaattctctgggaaggacgagatgcctggtgtcataaaaagaccatagtcttttttaagtgtgatgcatgcgcacacaggcacgcayacacacrcgcrcacacrcrcrcacacactgcactgctgccctgtccttggcagacattcctgtggggtcatgttcgaaatatgcacttctgtggagtagcttgggttttcttggaagtctctttttctaaacttgtacctaagctgatggcctgtgcctgcttgggcatgaggggtcggagtggggatgggtcaagactgactcctgttcactgtgaagtagaggaaggcagtgatagccagacagggacgtgtgtttagggaagtcctctgtgttttcagttctgtkttygttttgtttttatgatgggagagatgagcaaatataaaggctgcttctaggagcabgagtgaggagaggttgcctatatgagagaaacgggatggtcaatactgtaggtttttttgagaaggtgaaatatggaattcattttttaaattttttaaatttttttttttttgagacagagtctcgctctgtcacccaggctggagtgcagtgatgtgatctctgctcattgcaacttctgcctcctgtttatataaacaggccaaaccctgtatgtatgtatgtatktatktatttttgagatggagtttcgctcttgktccacttgttgcccaggctggagtgcaatggcacgatcttggctcactgcaacctgcaactcccgggttcaagcgattctcctgcctcagcctcccaagtagctgggattaccagcactcaccaccacagccggctaatttttttgtatttttagtagagacggggtttcaccatgttggccaggctggtctcgaactcttgacctcaggtgatccacctgcctcagcttcccaaagtgctaggattacaggcatgagccactgcacccagccgaaagatggaattcaaagaagtgctggtaagtcactgtggtatttgtgaaaaaataaaaataaagagggtttgggctaggcgcggtggctcatgcctgtaatctcagcactttgggaggccaaggggggtggatcacctgaggttgggagttcgagaccagcctgaccaacatggagaaaccctgtctctactgaaaatacaaaattagccgggtgtggtggcgcatgcctgtaatcccagctactcgggaggctgaggcaggagaatcacttgaaccgagaggtagaggttgcagtgagccaagattgtgccactgcactccagcctgggcaacaagaggaacaagagcaaaactccatcaaataaataaataaataaataaataaaaacagggtttggccttgggcaggatggaccgttttctagaargacagccgtggtgcgctgcacaactggtatgaagcccagtttccatctgaagtcctcgatgttcatggaaataggggcgagacagtctgaggagtgtgaagaaggcctgaaaatatccttgcagagaacaggagagacaatgactgggacagccaggcagggctgagggcccatttgaatttccmgcagtgccctctgtcctgttgtgtgacccctccagcagtaggtactgggaaagcaggtggctgagttcatccaggactgaggctctgccagacaagaacagtgcagcaaggatgttgaaggtaatggcaaaaaataactggaatgcagagaaatgaaatcaaagctgatgaggagggaagggaagagaggagagggcagatagacttgggtagagaggacagaacaatgacagggcaaactggtgatgttgaggaagagtcacagggagcagctaaacaagccagctgcagggatggcactgwgtggctggagagcagggttctggagttatcggkttttccatgtgtgacatgggcctgggtgggtgaggctgagtgtagaagtcttacatttccagtcttgtcactcctctgatgagtttcagaccaatatatccatctgcctagatgtcatttctccttggattcacatgctccaaaccaaactcctgggctcagacatcaaagccactcaaaaatagctctctgagaaatagaactaccatatgatccagtaatccaacttttgggtatagacccaaaagaattaaaaacagaatattgaacagatatttgcatagctttattcacaacagccaaaggtgggaacaacccacatgcccatcaacagacgaatggataaacaaaatgtgctatatacataaaatggaatctttttcggccttaatgaaggaaggaaatcctgacacatgctacatggatgaaccttgaggatattttgctaagcaaaagaagccagacactaatggacaaatactataaaatccacttatatgagatacttagagtagtcaaatttagggacagaatcagatttgcaagataaaaagtttctggaaacgtatttcacaataatgtgaatatgcctgatactactgaacacctcaaaaagggttaacacggggccgggcgcggtggctcatgcctgtaatctcatcactgtgggaggccaaggtgggcagatcacctgaggttaggagttggagaccagcctggccaacatggtgaaacccggtctctgctaaaaatacacacaaaaaaattagctgggcatggtggcaggtgcctgtaatcccagctacttgggaggctgatgcgggagaatcgcttgaacccgggaggtggaggttgcagtgaaccgagacagggccattgcactccagcctgggcaacaagaacgaaattccgtctcaaaataaaataaaataaacaataaaaataaagggttaacatgggggctgagcacggtcagcgagagaatcacttgaggccaggagtctgagaccagcctgggcaacagagaacgctgtctctacaaagcataataataaaaaaatgagccaggtgtggtggcatgcacccgtggtcccagctacttgtgaggctgagatgggaggytgagactgcagtgagccgtgttcgcatcactgctctccagcctgggcacagagacactctgtcyctgaaacaaacaaaaaaagaggggctaacatggtaaatttcatgtttcttatcaagtaaaaaggcttgctgacccacaatctatattaggtttccctgttactagcaaggagtgaaggatgtgctatcccaaaatatgtccaaaaattggtatattattttgagctaaaaacaccggagaaattgtagtttcagaaagggctagatgacctgtcgtttcctacagggaataagcagtaaagattcctctgggagtggcaccctctctgtacccgggtcagaaaatagcccttatcaccagagactgggagttggggctgcaayggacctgaataaatgaacttcccaagtaacacttaccttccactaattttacaccctccccaatatttctcctagtgactctcttagaaatgtatcgccccagccagatgccttttgtgctttcttctcaaatgcatcattctttgtctaaaaagtataaaagcatcttgctgtggccacttcttcagacctcactctcttttgaaggtccccatgaaaaactaataaagtgtgtatgcttttcttttgtttatctgcctcttgtcaattcggtttctggctccagcggaagagcccgcagaagcgctgaggggactggagacggtctctggcgcccctacacctgctcagtgagccttcagccccttctccctgacgaagctcccagaggctggaactctggcgcgggaggcacttgggaaatcctcccgaaagcaaggaggagcctttcctagaccgggagcggtcccacgcgggggtacaggttggggcaggggcgaccgagccgggcacaggaactcgcagcagggtagggttggcggctacgccgccctcggtccgcggggaaccrcgcgggcttccgggtcacgccrccgcgttccgaccgccctcggggagaggggaggagcctccagcgccgggcggggcgtggttaaggccggtgggccccaccgcagccagacgctgcccgtttaagcgcagagggccgcgggtcacgtggtgggcggggtgggggcgtggcaccaggaagcggcgtccgcgccgggcccagagccgcagccgcagccgccgctacagtccgggccgggctccaccgcgcatcctgctccactctggcgaccgcccccggggcccccgccgcgggcgcggcgcccgccatgggcgaggaggactactatctggagctgtgcgagcggccggtgcagttcgagaaggcgaaccctgtcaactgcgtcttcttcgatgaggccaacaagcaggtccggcgcgcccgcgcttcctcccccgcgcggccctgccggggtcgtgggcgygccaaggccggtcccgcgcgaccaggcccgagcgtcccctcctgtcctgtcccgtcccgtcccagcgcgggaggcggcgcgcgctccttccttgttgggtgggctcagccgcggccaggtgtcctcgcaggtgacctcggggctggacccccgagccagctgcgcggatgcagtggccccgtggccagtgtctcaattgttggcgcgcccgtcttatctaggcttcttttgttgtgtttgtcattagttacactcgtagtcaagggtttagacgtcgagattttcattttccttgaaattttgtaaagggggaaaagactgtacttcaggcgtatcagcggcgccgatgcgcgaaccggygttagaacttggagcctcgggaacccgacccggtgtcacggtggcatccttttcgctctctgctcttggtttttaaaattcacctgagcagccaaacatctgtaccttgatatgtgccgtgttactttagttgaacccagggtggtgtataacagaaataatcgcttgcgggttggcttctgagtttagatcctttcagagttcaggctgttaaccttgctgcttttccctctcaggtttttgctgttcgatctggtggagctactggcgtggtagttaaaggcccagatgataggaatcccatctcatttaggtaatggtatagacactttcagatcattttgtcatgtaaacagaatgatgtttttctaattcaaatggttttttataattttgtcatttggtctgccctaagaggcctgaagtctgtgtgcgcacatggaattcctgtctgtagggagggtcttcgtggcacttactagcacctcttgtcagagtggaatatctggagcagttgatttgggagccaaatacttcaaaagtggggcagccacttcctagcactggaaattaacaagtcagcgtgatgatgtgcccatttctggtttgttcacagaggagggcgttcatttctttagcccaggtctttccagagtggcaggtggaggagattcattgtttctcatgtaataatacaagaaaatcatggcttccactatacttaaggtgactgcatagtcccagttcgcactgttgaacaggtttaatgatcaacagcagggcctttcactttcagaagtgtctcgatttggatgataagctatctggccacygtaacactggtgcttacagaaggtgaaagtataatgtaggccctcaattcagtagtgacttaaaaaattttactgttggtctgtgttaatgagaaactgtccttttttgagagggagcctccctctgttccccagggtggagtgcagtggtgcratcttggctgactgcaacctccgcctcccaggttcaagtgattctcctgcttcagcttcccaagtagctgggattagaggcgcccaccaccacgcccggctaattttttttgtatttttagtagagatggggtttcrccgtgttggccaggctggtttcgaactcctgacctcaaaacgatccgcccgcctcagactcccacagtgctaggattacaggcatgagccgctgcacccggcctgagcaaggttttaaagtatggatggggtkcgagcatggtgttttggggaactctgggtctgtgtaactgaaggttacatagggtgtctccacagggaaggggaaatggtggtggtgtggccactggcaggggccagcttgaaccttacatattctcctatgaaattagagctttatcttcttattgaaacttatcaggtggggtgtgggatgatcatgtcagtgtttggcaagatcatgctgttcacagcacggaggctggcttagttgggagcctgtcagagttagggatgctatggagagtagcaatcagcgagccatgtgtggtgaagagcagcgctctggtggtgtagagtggcattgcataggcaatcaagggatacttaggaagatgggtctctcgtaagacccgggggtcggttgggtgtggaaaacgagtgagcccgtgataatctagattgggggctctaagaagtttgtgggtggggggaaggtactgaatttaacttaaaaagagtttttagactgggcrcggtggctcatgcctgtaatcccagcactttgggaggccgaggcgggtggatcacttgagatcaggagttcgagaccagcctggccagcatggtgaaaccctgtctctactaaaaatacaaaaattagccaggtgtggtggcacgtgcctgtaatcccagctactcggaacgctgaggcaggagaatcacgtgaacccgagaggcagaggttgcagtgagccgagatcatgccactgcactgtagcctgggcaacagagcaagactcygtctcaaaaaaaaaaaaaaaaagatttttaaaagcagctttattgaggcatagttgacacataataaactgtacacacttaatattatgcmatatgtgagttttgacatgtatacacccatgaaaccatcaccacaatcaaggcaatgaacatgttcagaccccgaaaagtttccttgggcccttctgtaatccatcccttgagttttttttttttaaatgaatttttaatttaaaaaatgtatgtattggaatagagacrgggtctcactgtgttgctgaggctggtctcgaattcctgtgatcctcctgcttcatcctctcacagtgctgggattacaggtgtaggccgctgtgcccagctgagttcactttttaacatctgtctgaggcggtcatgagacactgtagtggagccatctgggttgcataatgaatgtgctgtgagatgcacaagtagatagttctttccagaagctttgctgtgagagagaaacagcagttacggagaaggctcctgagcgggtctatagttatttatgttggaacaattctcaggtgatatgtgtgtgtgatctgaattcttcaatcacttgttacccataatactgtaagtttcccagcaagttctttccagttggatttggtagtttgaaaagaggtcctactgatggcttccgaaacataattttaattttagactagaatttgctgcctcctgaatatagattgtgtcttttgccttttcaataaatggtagtagctagaattcggttatttaactactaacacaatctttcttcttaaagaatggatgacaaaggagaagtgaagtgcattaagttttccttagaaaataagatattggctgttcagaggacctcaaagactgtggtaagacttatctttaaaatacagcattaaagggcattagaaatacatttggaagagaaggaatcgcaaattttcagtgttaaaggaaacttttattatcttactgttgtgaaaggtatagttatgttgcattgtattagagccttcaaaaacgaaaaagacatttgagtgggttaaaaaaatgaccttagtttgatttttaaattaaattaaaaatttttttttgagccagtcttcctttgttgcccaggctggagtgcagtgatgtgatctcggctcactgcagcctcgatctctcaggctcaagtgattctctcgcctcagtctcccttaaaaattgttaaaaaataatttggaacttcrtgtgtcttttgtattgcttgatagcagcatagaatatgtgaggtatttttggctactttgtgaattagccttttcatctctcatttctgagtgctagatctgataggagcagatattccaagttgaagcagcctacaggcactttagccygtgtaaatgttcaccattgccgtttgtagagtagagggaaggctgttagaaacaggcagaatcctctgttagtttcttccatcagttttaagtgttaaagtcttggggaagcctcttagtgcagcaacacatttctctgacatcagctgcttgaggaatgaatttttgaaaggagttactaaactgtaactgaatatttgtattaacttaaaaaaaawtgaatcgtaagcctgctgctgttgagacagatgatccgaattggtctttttatctttcctgtgttttggttgtcttcagttattttctggtcaytttttaagttaatatttatttttcttgtcttgtagtatgccaacgtaggttggcagtatgctgcctaatccaaatttgtgtgtgtctgtgtgtttttcctttcaggatttttgtaattttatccctgataattcccagctggaatacacacaggagtgcaaggtatgaccccaggccctttctcagctgctggtgtcagtggtgttgagctgggttatgtagtggagagcggggcatyggggtcgcagggagcacagacttgaagtcagactgtccctcatgttgattcccaaactggagtcaggcggggtgtttgctttgtgacactgaacagttttctaagtttgaaagcttgttcctttggagggggagggttcaatggatgatgcgtggtgaacacccagtagtgctagcccttggggctgtcgtctgtcttgccctttttctcctcactgggctgacagcacatctgggtctgggccctgggatgcctcacagccacctggagtggaggtttctggtgaggagtttctttttctgtttcctgaagtttcctttcctcaatttgttgtctttgtcttgtccttactctttctttcttctcctaggtgttgattctaatccacattaatgagatttgctgggtgtagtaaactaggctagagggagctgagctaaaattggcagtgtggcaccttgggcgctgacagaagctgctagtggttggggtagggctttctgcatttttgtgactgttttgctcaatggagttcagggcggactctttggtgaggagaggtgcatccccaccactgtcctgcctgccctgcagtggccccgtgtgaagagaccctcagcccggcccttctcaaacctgtctgccctcaagcgagtcgggtgtgtgtctcagggtcctcaacccattttagtcaacactcactaaagacccttaggcctttgtacatttttaataaccatttttataacgtgggtgactaagaatgttggcagtatggtgattcctgcaggtagaagctgctgtctgtgagctctggtcagttacttttctacaaaacacagacttctcctgttctgtttagtagaaggaattaggattcaggttcttgaatgaagagttatgggcaaaaatcagggaacattgtatttaaaagaaaatttgttttgttaattagtaaacattccggggaacgttcattaaagaatgacaaacygcagagtttgtgaagcttttgaagagagttatatgtgttttttcttattaattaaaaatatttttaaaaaatttttcttagactaagaatgccaacattctaggattctgctggactagttcaactgaaattgtcttcataacagatcaaggaatcgaattttaccaggtattatgtttatcatttatgtttgttggttaaagttcagtgatagcattctggcagccttttgaattcagtactgaatatatatatatatattttaaacattttctagagatggagtcttgctctgttgcccaggctgcagtgcagtggcaccatcatggctcactgtaatctcaaactcctgggctcaagcaatcctcctgcctcagtctcctgagtaggtgggactacaggcatgtaccaccatgcctggctaatttttctttttattattttattttattttattttatttttgagacggagtttcgctcttgttgcccaggctggtggagtgcaatggcgcgatctcggctcaccgcaacctccgcctcccaggttcaagcgattctcctgtctcagcctcgtgagtagatgggattacaggcatgcatcaccatgcccgggtaattttgtatttttagtagagacgggatttctccatgttgagactggtctcgaactcccgacctcaggtgatccacccgcctcggcctcccaaagtgctgggattacaggcgtgagccactgcgcccggccctggctaatttttaaacttttttgtagagacgaagtcttgctatgttgcccaggctggtgtcaaactcctaacctcaactcctgccttggccactcagctytagyctcttgctggggattttattctttttttttttttttataattgcaagtaataaattaaaaaaaaaaaaaagaaaagaaaaagggcttggtggcccrtgcctgtaattccagctctttggaaggccaaggtgggtggatggcttgagtccaggagtctgagaccagccaggccaacatgatgaaatcccatctctataaaaaatacaaaatgttagtcaggcatggtggtgtgcgcctgtagtcccagctacttgggaggctgaagtgggaggattgcttgagcctgggaggcaggaggttgcagtgagccaagatcacagcactgcactccagcctggatgacagtgagaccccatctcaaaaaaaaaaacaaaaacacaacaacattaaaaagtgggcaaaggccaggtacagtggctcacacctgtaatcccagcactttgggagaccgaggtgggcagatcacctgaggtcaggagttcgagaccagcatggccaacatgacgaaaccctgtctctattaaaaatacaaaaattagccaggttggtggcaggcacctgtaatcccagctactagggaggctgaggccagggaattgcttgaacctggaaggcggagcttgtagtgagctgagatggtgccactgcactccagcctgggcaacagagcgagactccgtctcaaaaaaaaaaaagtgggcaaaggacatgagcagacactttttaaaagaagacacacatgcgaccaacaaacataaaagagctcaacatcactgatcattagagaaatgcaaatcaaaaccacaatgagaaactatctcacactagtcagcatagccattataaaaaagtcaaagaataacagatactggcaaggttgtggagaaaagggaacccttatgcactattgctgggagtgtaaattagttcaacctttgtggaaaacagtatggcgattcctcagagagctaaaagcagaactactgtttgacctagcagccccattactgggtgtaatatgcagaggaatataaattattctaccataaaggcacatgcacgtgaatgttcattgcagcactgttcacaatggcaaagacatggaatcatcctaaatgcccatcagtgacagattggataaagaaaatgtggtacatatataccatggaatactatgcagccataaaaatgaayaagatcatgtcttttgtgggaacatggatggagctggaggccatcatccttagcaaactaacacaggaacagaaaaccaaataccacatgwtctcacttctaagtgggagctaaatgtaagttatgaatgcaaagaaggaaacaacagacacggggggctacttgagcaggggagggtgggaggagggagaggagcagaaaagataactattgggtactggacttaatacctgggtgatgaaataatctgtaccacaaaccccgtgacatgagtttacgtatgtaacaaaccttcacatctatccctgaacctaaaagttaaaacaaaaaacattcaaacattgcaagatatgtaatatggaaagcaaatgttccctataatcccgataaataattattatgaacagtttggtgcatattcctctatttttaaaaataaatacaaacttctttttaacaaaaaggggaatgttgtatataaacttttgcagctagctttttttttttttgtccaaagtgtatcttggacatctttctatattttattctgactgggtagtatyccactgtatggatggactgcagtttaaaaattttcttgttatkggacattggctggttttccatttttttgtgattacaaataacccttcagtaacatgcttgtacacacttctttatattagagggagagttgcagtataggtacgaacatctgaaaagctgaaccagtatcgccaaatttcttctagacatgtgtattttcactagcaatataggaacttctgcttttcatacctttaggaggactggatattatcagtctatagacatttgccaacctgagaggtagaaagacttttttttttttttttttttctgagacagagtctcactccgtcgcccaggctggagtgcaatggtgcgatctcggctcacggcaacctccacctcctgggttcaagcaattctcctgcctcagcctcccaagtagctgggtctacaggcgcccagcaccacgcctggctaatttttgtatttttagaagaggtggggtttcaccatgttggccaggctggtcttgaacccctggcctcaaataatccacctatctcggccccctaaagtgctgggattacaggcrtgagccaccatgcctggccgaaagacattttaatttgcattttacattactagggaagtaagcatcttttcatttgtatattgtccatttgtattttgttaacttcctcttaaaatttttttattttgtaataattattttgagacaggatctctgtcacccaggctggagtacagtggcacaatcacggctcactgcagcctcgacctcctagcctcacgtagtcctcccacctcagcttcctgagtagctggaactacaggtgtgtgccagcacgcccaacttaatttttttttcctttttttttttttgtagagatgaggtcttgctgtgttgcctagactggtcttgaactcctaggttcaagccattcttctgccttggcctcccagagtgctgggatttatgggcatgagccactgtgtgtggtcaaaaatattttttttactgtggtaaaaaaacatacaacatttattatcttaactgtttttaagtgttcagttcagtagtgttaagtatattcattcacattgttatgaaatagctccagaacttttttcatcttgtgaaaccaaaactatccagtaaacaactccccttatcccttccctgcagccccagcaatctctattttactttctgtttctatgaatttgactcctttttttttaagatggagtcttgctctgttgcccaggctggagtgcagtggcgtgatctcagctcactgcaacctctgtctcctgggttcaggcgattctcctgtctcagcttcctgaatagctgggattacaggtgtgcgccaccacgcctggctaatttttgtatttttggtagagatgggrtttcaccatgttggccaagctggtcttgaactcctgacttcaggtgatccactcacctcagcctcccaaagtgctgggattacaggcgtgagccactgtgtccggccgaatttgattaccttttatacttcatataagtgaaattatacagtatttgtccctttgtgactggcttatttcatctaccataatttcctacaggttcccccatgccatagcatgtgatagggtttcctttttaagactgataataccgcactgagcgtatacaccacattttgcttatccattcatctgttgagggacatttgggttgcttctgcctcttggccattgtgaatagtgctgctgtcaatacaggtatgcagataccgcttcaagatcccgttttcagttcttttagatttatacccagagtgagattgctggagcagatggtagttctgtttctgaatattttagggaaccgctatactgttttccatagcagttacaccattttgcaatccctccaagtgtacaagggtcccagtttctccatatcctcaccaacacttgctgttttgttttgttttgtttttgatactagccatcttaattgtggttttgatttgcgctctttgttgattagtgatgttgagcacttttgtgtgtgtgttttggccactttgtgtatcatctttggagaaatgactaattcgggtcattgtgcctatttttaaaatcaaattactattatttgttgaattgtagttctttatatattctgatattarcaccttcttagagatacaatttgcaagtattttctccgaatccggaggttgcctttccactctgtggattgtgtcctttgatgtacctgcctgtttcttttcatctgttccagcttcctgacctattaagcatgcttctgagatctctaaggggaactaatttagagggtgttaagagttctttcaggttttaattttgttgacctaatgaaagtcatataatttagaatgtatggttagagaaaatacacctgtgtgttaatgccatggtgctttgctgtaaggccatcatcgaaatcttagtaatgactggctgggcayggtggctcatgcctgtaatcctagcactttgggaggccgaggtgggcgatcatctgaggtcaggagttcgagaccagcctggccgccatggcgaaaccccgtctctattaaactccatctttactaagtgccgtctctactgtctcaaaataaaaatacaaaaattagctgggtgtggtggtgggcgcctataatcccagttacttgggaggctgaggcagaagaatcccttgaacgtgggaggtggaggttgcggtgagccgagattgtgccactgcactccagcctgggcaacaagagtgaaactccgtctcaaaaaaaaaaaaaatttgtaatgaccaataggagaactttaaacaaactttagacaaattccatacacacagaaatagaattttgtacatgtgattgcatgggaaggatggcttgctttctgggggagttccctatggtaatcatttaaaagtctgtctttctgttctctgcagtgggaaagtataccttaaggttacctagatggcttcagatcttcaagaaaaaagttaaaaagaaagaagactctagcacatcctaattattatagttcttaagaagcttacggctcctgcccctgacttgcgcagcagttcttcagtgcagtgtaccatgagcattaatgtcttgggggctctgtacagtgttctgtaatatcggaatatttagggtacattgaaaatgtgcctggattataaagtactgcatttgtatggagtcttatgaacacatctgctagaagaagggagctcctcccaggcccagtgtagactggagtcgaggtggaggccaagcagaaggcagatctgccatggtctgggaggtggccgagttaacacatggggtcctggaggtgtcagtttcttttggccgtttcctggatgaggagaaatttgttgtaaattgctcttaggtgtatccatgtgctccacatgcccaggcatgtggaggcacagataaggattttggagggaaacagcctacccaggctataattgctttgttaaggggcaggttccctaatccactcttggagccttgtttctcatctggctaatagggccagtgatgcctgcctctcagtcgtggcaaagagtaaatgagttaggaggctctgtaaagcaccaagcatagggctggttaagtagtagctgtaataagtacaagtgagaatgttcatttcacttagtgggtttcttctgctttttattctcagagcgcactgtaaggatcttctgacagtttgctgttattgatttatttattaattgagactgaatctcgctctgtcactcacgctggagtgtgatggtgcaatcttgactcactgcaacctctgcctcctgggttcattcaagcaattcttgtgcctcagccttctgagtagctggaattacaggcatgtgccaccacgcctggctaatttttgtatttttagtagagatggggttttaccattttgtccaggctggtctcgaactcctgacctcaggtgatccgcccaccttagcctcccaaagtgctgggattagtttgccgttttttaaatgaagatcctgtttcttaaactctgcttcaggtattaccagagaaacggagtctgaaactcttgaagagccacaatctcaatgtgaattggtacatgtactgccccgagagcgccgtgatcttgctgtctaccacrgtcctggagaatgtcctgcagccttttcactttagggtaagaggaagcctcccctgaaaaaaacacctttccccagttgtcccctgttcctgtagcatcctaatgtgtcaggcacgttagggacaggttcctctagccgtaacgtcaccgctctgaccactagagggcactctgtatacccgtcagctcctggagccattcattctatgctgggcagacaggctgtgagaggacatgggggacggtggaaaggatccaaagacgaagtctgtgtttatccttgttggttttacacagggaatgatgaaacattgaaggggtttaataagcttttcctaaaacattttccccctaaacaggctggcactatgtcgaagctgcccaaatttgagattgaattaccagctgcgcctaagtcaactaaacccagcctttccgaaagagacatcgcaatggctaccatgtatgtccgtgtcagagagaattccatcctgtgattgctttcagtaatataaataatagaaggagtgtgttacaagcaccacgtgatgccctgacccctagaacacataaggaggactccccttgttctgggtattcagtgtataggtcctgtgaacatagaaaacctgcagtgtttttggcattcctttttgatttttatcagctttgtgatgctaaggaattcctttacctttctagcctgataaaacaagaacattgaaccaatttatttcttagtatctttgttttagaatttcttcttctttttttttttttttcgagacagagtcttgttctgtcccctaggctggagtgcagtggtgcagtgtcggctcactgcagcctccacctcccaggctcaaacgattcttctgcttcagcctcccaagtagctgggattacaagtgtgcgtcacctcgcccggctagtctttgtatttttggtagagacagggcttcaccatgttggccaggctggtctcgaactcctgacctcaagtgatccacctgccttggcttcccaaagtgctgggattacaggcatgagccactgtgcctggccaagtttattttttttaaaagctcagttaaataataattgttctaaataagaaaatagattaagattttatgtaacagacatggaactaaattacgtatatatagaggtatattttcttttactttttttttttgtttgtttttgtgatggagtcttgctctgttgccaggctggagtacagtggcacgatcttggctcactgcaacctccgcctcccaggttcaagcgattctcctgcctcagcctcccgagtagctgggactacaggtgcgtgccaccatgcccaactaatttttgtatttttagtagagacagggtttcaccatgttggccagggtggtctcggtctcttgacctcttgatctgccctcctcagcctcccaaagtgttgggattacaggcgtgagccaccacgcctggcagtacggaggtatattttcatttgaaaaagtggatatctcagtttttaartttgtaatgaaaattttaaacacacaatagagactaataaaaaagaacccctgtatgcctgtatctgattcgacaatagtcaaaattttgcttctaagttacttctgattcttctgtggcctaaaacagtggcccaaactttcaaactttatggtagttagtataatgttctttcatttcttcttcctttttttttaaacrtactcttctgtggcattcctgtttatttttaaattttttttggagagtgtcgctctgttgcccaggctggagtgcagtgttacaatctcagctcaccacaacctccgccttctaggttcaagtgattttcctgccacagtctcccaagtagctgggactacaggcgcatgccaccacatctggataatttttgtattttctgaagagatggagtttcaccatgttgcccaggctggtcttgaactcctgggctcgggtgatcctcccgcctcatcctcccaaagtgctgggtttataggcatgagccgccgtgcccagccagcattcctgtttagacaatagataaagtgagagcagtcctggctgaagtggaggtggggacctgttccctcccaccttggtctcctccttgtccctgggcaggcccagcacagagtttaccactggactagaatatgcattcaggaactgttcacagcaacatttattagatggcacttaaatagaaaaggctgagcatggtggcacacacctgtaataccagtgactggggaggccaaggcagggggatcgccttgaggccaggagttcaagaccagcccgggcaacatagtgagaccctgtttctacaaaaaaatttaaaaattagccaggcacggtggcacgtgcatgtagtcctagctactggggaggctgaggtgagggaagatcgccaaagcctaggaggtggaggttgcagtgagctgtggttgcaccactgcattccagcctgggtgacagagggagaccctgtctctgaaaaatgaaaaaaaaaaatagtgattatattttcctgttattaaggaatatacattcattatacaaaacttggaaaacagagaagaaaatgaacttagcatatcactcaagtataactattacatgtgtttctttccaatcattttagactctatgcttaggtttggggttttcttttaaaatattatgatcaagctgtgtttagtgtgtgttctcttttccacttaactttataataggctttgagtaactgcatgtttctttgtaaacacttgttggcagcaaaatactccattaagtgaatatcttataatttacttaaccgtgatgccatttagaacaaaggaattttgaatggccagatgtgatttatgtctgtttgttccctaattagatacgggcagctgtatgttctcttcttgaggcatcattctcggacctccaacagcacaggagcggaggtggtcctctatcatctaccacggtagatttcatgctttgttttccctctctctctgattttaaaatgtgaactgyagcttgttgatctgttttttgctttctatcctacagagaaggtgcctgtaaaaagatgcacatattgaagttaaataggacgggaaagtttgccctgaacgtggtggacaacctggtagtcgtgcatcatcaggatacagaggtacaagctgtctgcgtttctaccaaagttaaggttgcttaaaagccttgtgaaaattggtggctgggcacggtggatcacgcctgtaatcccagcactttgggaggccaaggcggacagattgcttgagcccaggagttcgagaccagcctgagcagcatggcaaaaccccacctatataaaaaatacaaaaattagccgggcgtggtagtgcacgcctatagtcccagctacttgtggggctaaggctggaggatggcttgagcccwggaggtcggggcttcagtgagtggagatcgcgccactgcactccagcctgggtgatggagcaagatcctgtctccgaaaaaaaaaaaaaattggcaaaatgtctgaataagactagaaagtgcatttttatgctaagagttttggtcttccagatggaaatgggtttggtagtctyaagtagtttagaaaaaagtgattgtgtcagttgattaaagataattcaaaactatttcagaaactaacgcttgagatttgaccttggaagaaggtgggaatccgctccattccacgagtacttgaactctstgttgcaattgtgagcatggatgacagtgctgggggataatggttttgaggccgtgtggaccaggacaactagaatgggtcctgtgggctgggcctctgatataaagaagctgcttmcctcctctaccctcccagagggtggtgacgctaactctgtgacacgtgaggatgtttccagttgaaatgacagagatctgcttaggtcactttgagtgagctcatcaaaggaagcatgtcataaatgcaggaaatacttgtgagaggagataaaaatattaaaagagagttgtgatgttaatsacaaattccttctcaagtaagagctagcctgtagggwggaaatgcaaacacaggcttttaaactgatttaaacagcaagatgggatggaatgaaagcaactgggcaaaccatgattgattttggcctcagtcttgtctttttcccccccagacatcggtaatattcgatatcaagttacggggagagtttgacggctccgttaccttccaccaccccgtgcttccygctcgatcgatccagccctatcagatccccatcacaggtaacacgggttctgtagaggagtctgtgctgccctttcaccatgtggctgtgttctcaccatgatctttgggagtcacgttaaaagtggagtgaggaataaacagagattcccagatctgtctgattttgccaggggccatttgttccagttttgttgttgttttgagacagtctcactgagtcacccaggctggtaggtagtgtcgtgatcttggctcactacartctccacctcctgggttcaagtgattatcctgcctcagcctcccaagtagtggggattacaggtgtgtgccaccgtgcccagctaatttttatatttttttaaatttatttttttgacagagcctcactttgttgcccaggctggagtgcagtggcatgatctcggctcactgcaacctccacctgtctgtcacaaggttcaagcttgtgaggtattcaagcaattgaaccaagtattcaatcgcttaaatacttgtgagaggagataaggttcaagtgattctcctgcctcagcctcccaagtagctgggattacaggcgtgcaccaccacgcccagctaatttttttgtatttttagtagagatggggtttcaccatgttggccaggctggtcttgaacttctggcctcaagtgatctgcccaccttggcctctcaaagtggtgggattacaggcatgagccaccacgcctggcccaaatttttatatttttggtagagatgggrtttcaccatgttggccagactggtcttgaactcctgacctcaggtgatccgcctgcctcgctctcccaaagtgctaggattacaagtgtgagccaccatgcccagcctgttctagttttttaaaaaatgcaactactactgatcctataagctaaaattatgttgtgaaaaaagcattttctaagatagatgaatctcccttgggaggaaatagaataatttatcttccctgagctttagaatggatagttttgattagccgttgatggtgaaatatgttttaatattgaatacacccgtaacgttttctgtttgccttagctctgtaaygctgaaattaactttggctgtaggtttgttactgtaacctgggatcacttttctctttctcacattccgtgtgacagtgatgatgaatattgcattctttgggactgacagtcamagtaagtgcttcggctgtggctcttaggcttacccaaatcagtcctccttctgtctggagaggtggggttgggaagtcagaagagtggaggtcaggaattcaggaaaagggaaagaagtcatttatttgcttcgttttgcctttttccagtgtaattgattttaagatagaactgaaagaatattcaacacacactctctctyttttttttttttccttaaacagaactttattttctcacagttctggaggctagaagttcaagatcaagatgtctgcaggtttgctttcttctgaggcctccctcctggcaggcctctttgcagatggccaccttctcactgtgttctcacagggtctttcttctgtgcctgtccctcgcagcagtctctcccggctctcttttgaaggagattggagtgcagaattggctagtctgaggtttcagtgtgcaagacrtagtcagatggctcacatttggaaccctrgtagtaatgttttattctttgtccgatggcattgggcgggttgacccagcctgcagtcaggatttccttgtaccgttcacccgggagttcagaatcgcactctggctgaaagttcagcaagagcaccattgtcagcctgactgccctgtcttgctggaccagccaaaagcttagttactttctggcacagttggaggaaggagctggttcttaacagacgttcaattaggtcttttkgctttctgtgttctttcaagcttcttccttttcctttgtaaataatgttagtattgaaagaatagattttgccaagtgattgtcttgtgtctgctgcccacttggcatgaaggtaactgctggtgaattgggggaaaaaaactaaacatttagaacaagcctgtccaacccacggtctgtgggccacatgtggcccaggacagctttgaatgcagcccaacacaaattcttaaactttcttaaaacattatgagatttttttaatgatattttttaagctcatcagctattgttagtgttagtgtattttatgygtggcccaagaccattcttcttcttcctcttaaggcccagggaagccaaaacattggacacccctggcttagaaccttcagctctgttccggtggtacaggaccagttaggaggcatcaggttctaaccatctggtcataagggaacagatgcgaggcctggtcacagtaacagcccgtgcagagatcaataggaggaaatcaggaatccactgagggtctggggatctaggtagtgtgggctgcaaagcattttcagaggttagtgactctccttttgtttcctgctgggctgtgagccctggcggcttgatgcatccgtgtgtcttgcccactgtgctgccactgggtgggcgtgctcaggaattgaatgggcctgttgagaaagatataaccagcacttttgggaagagtcagccaccctttttctttttgttttgggcctgttagaacagtgggtctcaatctgactacatattaggatcatctggggggccttaaaaatgaaagctctcacctgacagtgtgtaggtcagccacccaaaggtgagggctrtgcactcggcgcagaccttgacacttaggtccaaagcgcgagtgctcttcgccaaagcttgtctgcctgggctctttcctacctttgggtggtctgttcacaatgaccctttctctgaccagctgattgaaacctgccttctgattgtacctgggtaattggaacagaaccaggagtcatggttagcttgtagggctgcctgcatggctcatgagcagtataactggttgttaacggtccctgtcatgtgaggttttgggggtctgcttcccagacgagctcactgtgcttggacctactctatgcaatggataatcgaactaattatttagataattaagtggctgggcacagtggctcatgcctgtaatcgcagcatgttgggaggctgaggtgggcagatcacttaagcccaggagttggagaccagcctaggtaacatagaccttgtcttcacaaaaaaaaaaaaaaaaaaaaaaaaaaagaaaaaaagttagggcatggtcacatgcctgtagtcctagctactctgaaggctgaggcaggaggaccacttgagccaaggagttcgtggttatagtgggctatgatcaactactgcactcaagcctggacagcagagcaacaccctctcttaaagaaaaaaaaagataattaagctacaagccacatttatttgaaacattctccgtggatgatctgggtatttgattttgaatccttcaagtaaatttctcagttccttaacgtgcatatgtaaacgatcatgagtcatctttggttattaaaaataacccaaaccacagtgattgaagccttgacatgctttctttttcttggtgagattttcctggattgtyagctccttcccccttcctccccgtacgtgctttcagtgagacggaacagttcatttcttccktgactacaattgaataaacatttcgtaatgacattaaaaagtattgacttttgtgtcataagtaccagcatttgcagcattttctgactgcatcgttgcacttatgttttctcaatttgtaggtcctgctgccgtgaccagccagtctcctgttccatgtaaactctgtatcctttactraggtgtggcaccgtgcacaacagggcaagtggtcaccctcagagagtggtcctgaagtcctcctccgggcagctgtgaataamactccgagagccaccccgcaggcagcttccctgactgtccaggggcctygcgtttagcgtggacycagtacatggtgggcaggggcgagtgctagcggaaactgggtttgctttttgtttycatcttttcctggtttagaatttcctataacatgtggattcttcatcttggattgtctttcaacctgacatcattatcagcgcaagccaaggtaggtcagcggggacagttgtcgtgttacaacatggtgcttgttgactttggatcccagttgtagccagggacgttttcaaggtgaatctcttagaaatgacccctcctttcaagcgtgggaatgggatttttttttttcactttatamgttttttactatatgtgcattttatcaagaacatatactacttttaataattaaagcaacaactaagaatgccattctcctgcttaagcccattctggaaaagccagactccaccccagggtggatggaaagccggactccaccccagggtgtctccctcatttctcccatcraccttcccaccggtgtccgtgcccttttctgttctgcatgagcccgggaggtgtgctcctctttctggccttgctgaggaagcctcctcagtctgttaattgtctcttcctgggtaatytctttattagagaaatcttttttttttttttttttttttttgagacggagttttgctcgttgcccaggctggagtgcaatggcgtgatcttggctcactgcaacctccgcctcccgggttcaagcgattctcctgcctcagcctcctgaatagctgggattacaggcatgtgccaccacgcccagctaattttgtatttttagtagagacgaggtttttccatgttggtcaggctggtctcaaactcccaacctcaggtgatccgcctgcctcggcctcccaaagtgctgggattacaggcatgagccactgtgcccggcctaaagaaatcttatttttttaaggcagggtcttgctccgtcacccagcctggagtgcagtagtgctatctcagcttactgcagccttgagctcctgggctcaggcgatcctcctgcttcagcctcccaagtagctgggcctacaggcgcacatcaccacgcccagttaatttattataataataataataattattttgagacggaatctcgctttgtcaccaggctggagtgcartggtgccatctcggctcactgcaacctccaactcctgggtttaagcgattctcctgcctcagcctccccagtagctgggattacaggcatgcgccaccacacccagctaatttttgtatttttagtagatacggggtttcaccatgttggccaggatggtctcgatctcctgacctcgtgatctgcccacctcagcctcccaaagtgctgggattacaggtgtgagccaccacagccggcctataattttttttttgtagagacagggtcttgccatgttgcccctgtgtctctaatacctcgccaggctggttattagagaatctcctatgttactctttaatcctctgtgtattttcctgcctttcctctggaattcctaagaactcttgaggagagaattagccctgatgctgtaggcatccactgtatgtaatgcattgttgtgccttgtctgtaacccatagcctcatgtgacatccactgtatgtatgtaatgaagtcatttctctcctgtgcatctcgctggtgttttcctgtacagctgctctgtacctgccttgggccaactgaaaagggggtcacccagatgattttttatgtggcacttcattctcctgtggcatcccaattgggaaaggccacaccagatgctggcagtgtgggtgatcagtacatttatgggtcgatgaatggatgagttatgatgttccattgagagcctctggagttaccttttaaactaatgagctgttgtaggagaaaccaaagcacaggactgaagttgatgccacgtgttgacatctttttctattttaaacgttaaaagaggggctaggtctagggaagtccccgtttggaatgaaggactaggagctacacctttgatgtgcccctgaatgcagaggttacttggaaaagagtcagccaggtgtgcggtggttgggctgtcatcctcctgtggtagacacgctcctgaattgctcctgaatggctcagctctgctttggttaggaaggaaaagctacactgactgtactttgcggctttttatcaccacctgccacccgccccgcagatgtttaggggaaccacttttgggcttttgttacggtttgcatcatactgttttatttgctgcctcttaaaatccaggttacctctggaacctccaagtgaaacttgagcccatagtaaatctcttaccagacaaaggaagactcatggactttctcctccagagaaaggaatgcaagatggtcatcctgtctgtctgttcacagagtaagttgaatccttcccccttgctctgattccagtgtgaggcctgtgctgcccaacactttttatcgggatgtgggctacattgttgtgtcttgtctgtgacccacagcctcattctttatgtgaggggtggctatgtgaccccctaggaaaggctgctaaatggaaagatgatttgtagagatactggtagaaaagaacaataaatgggatggttctgaatgaaagtgggcacacaggaggggagtgggccaccacccctggccttcacacacacctctttcaaaatccaagccactcactgcatatgtgtcttctttaagaatcccctactgaggccaggcatggtggctcatgcttataatcccagcactctgggaggctgaagcaggaggattgcctgagcctaggagttcgagaccagcctggacgacaacatggcaaaaccctgtctctmcaaaaaaaaaaaaaaaaaaaaaaaaaattagctgagtttggtggtatacacctgtggccccagctactccagaggctgccgagggaggattccttgagcccgggaggacgaggctgcagcgagccgtttgtgtcagtgtacctccagcctgggcgacagagcaagaccctgtatccaaaaaaaaataataataataatcccctaccaatatgtgctgttggtgtttgtttttgttttggtatagatggggtcttgccttgttgcccaggctggtctcaaactcccagcgttaagtgatccttctgcctcggcctacccaaagtgctgggattataggcatgtgccactgagcctggcctgctatagcttttttttttttttttttttttaaccgtaaccagaaaggggttgcgaatgacatctagctgtcaggtctttaaagtattgtatttcttaragtgtcctttaaaggtacttttgcattggtaaccttttgagattagtttttatcatagcaacgtgtggaaattctgaagctgacatgaagttggtttgatccgtgtgtgaacattgtgcctttccagtgttaagtgagtcagacagagcatcgctgcccgtgatagccactgtttttgataaactcaaccatgagtataaaaagtacctggatgccgascagagttatgcgatggtgagttacatggagtatgacaaagggtcctcctcccccaccccctcccgggtattttctaagtaattatgatgcaaaattgtttcctatatattagaataaggtcgctgagatttgccgcctgccatagggcaaggtggcagtagtggkggatagtggaggagtagtaaattcagggtccctgcatcccackagctggcggctgcatctcacttcataccttcactgtttttgtttttcccatctgtgtttgatcttgcctgtagatccttggtctactgttatagatgagaaaaatcagtctctgctttgcaatattttgtatatttttctgttatgccagagtgaggacttagaaaattaaattagaaatatttatatttgccacacctttcttcccttttgggaaagaatcctgttgagatagtgacgattcagtgttagcacttagcaggcgtgtttgtagtcaaggtaataaccatggcttatcgccaccaattcccgctgtattacttgtacatcatatcttctgaagccagaagaaaagtttaggacaaggagaatgaattatttcaattccaggatctgattagtcctaggctgaaaatggttttaaaccaacaaaagccccagaactccactcccctttagctgttcatggaagggtaagaggtctgagacaggcactgaagagggccagttgctgggacagtgtccattcctacgctgccagacgtgagggatggcyragtccttttggactctattgctgtgggtgttctgggctgtgggaatcagtaggtctgatcccaaatggcagtttctgtgccgtcccacacggtctgctgggctccataaaccgtcatgactcagcagtgtgggccactgaccagccacatgagcagcatctggagtttcttggaaatgcaagttctcaggctacaccccacagctattgcataatctgcacggatctgaactgcttttttttttttgagacggagttttgttcttattgcccaggctggagtgcaatggtgagatcttggctcaccgcaacctctgcctcctgggttcaagggattctcctgcctcagcctcctgagtagctgggattacaggcatgcgcacaggaaaaagttgtatctaagtagagaaagtgttttccgctcatatcctgggtccacatcgaagaattcagtccttgtggatgaactgtaaacagcacccttcctctaagatgcygaagatcatagtttgtggtttttttctttcaggcrgtggaagcagggcagarccgaagcagcccgctcctcaagaggccggtgcggacccaggcggtgctggaccagtcagatgtgtacacccatgtcctgtcagccttygtggaaaagaaggtgggcygcagctttccgcctcttctggactgagaatgctcaaaacaaggaagttgctgaaaacgaggagacttcatgtgattagagtcacttgaagtgattagaatcactggagtttccttgggtgaggccctagagctggtagtttggcttctaatgctgaggcctaaagcataattgttgacgggtggttctggagcgatktgtgcaaaaccagtgaaagatgaacactgggccattttaagatggaaacaaggtgggggttggatagrgagttatatgcagcctcttttgcacctcgttggtatttgtaagaccacatttttttctccctaggagatgcctcataaatttgtgatagccgtgctgatggaatacattcgttctcttaaccagtttcagattgcagtacaggtaccttcaaatcatctgggcccaagttaaaacagaaggaatttaaaaaaaaaacacagtcactgtcttagaagatgactcatatgctaagacaggtctgcctccctgactcagaatgctgagtgactcctgacattattagttggaatgggaagtgtamggtcaagttggggtctttacctgcatgacgaaaccacttcttgtaatgacagacttttactgtgttggttagaatagccagtccttggggagcctctagtctgttgtagctgaatgatttggaagtgttctttcactttttacttttgtcctcagcattayctacatgaacttgttatcaaaacccttgtccagcacaacctcttttatatgctgcatcagttcctgcagtaccacgtcctcagcgactccaaacctttggtatgcattgccagatttttacttccattgtggttaaaaatggaaaattttaaccgttatctttccaactgaagtgggtctaaaaatgtctttcaggcttgtctgctgttatccctagagagtttctatcctcctgctcatcagctatctctggacatgctgaaggtaactctgatgtgtgaggttttagactatggaaactaactctgttcctgttgtttgcactgacctggacttctctcccttactgctagcgactttcaacagcaaatgatgaaatagtagaagttctcctttccaaacaccaagtgttagctgccttaaggtttatccggggcattggtggccatgacaacatttctgcacgaaaatttttagatgctgcaaagcagactgaagacaacatgcttttctatacaatattccgcttttttgaacagcgaaaccagcgtttgcgagggagccccaatttcacaccaggtgagaatgcaatgaaaagacttggggtaaccatagcctcaaagagtagcagagggcactggcagctggtgggcgaggaccctgggttagcatttttgtaaacaacacaatttgataacagcccacctagcccttggcccattatttgtagtagagtgaattcagtatactgacagaatctgaattatgctctggaactcaccgaggaggtgtgttttgagtcaagacacatttaggacccagatcaggcacagcccatctcttatagcagatcttggaatatctcttaaagccaggaataagacggcaaatggtggctaagggttttaaagggtctggggcttattaaggtttcagttttatgaagtatacattggttgatcattctcattttttttttgagacagagtctcgctccgttgcccaggctggagtgcagtggtgtgatctcggttcactgcaacctccgctgggttcaagcgattcttctgcctcagcctcctgagtagttgggactacaggtgcgtgccaccacacccggctgatttttgtatttttagtagagatggggttttactatattgtccaggctggtctcaaactcctgacctcatgatccgcctgcctcagcctcccaaagtgctgggattacaggtttgagccaccgcacctggccctggttgatcattctcatctccaaatagttatacaacctaagacatcatctttaggatagggaaggatcagggctgtctaatgaaacttctaggtctatttctagctcaatgtaagacggcatttagttaccataaggacaggttagatagaatctcttccatttagcttttgtatttgtctctcaaagcagatagggtaaccccaaaacttaggaaaacaatgtattttattaaagaaaaataagttaaaacccagtagacacacctacgagatgctttctttgtccctcatttcatgccacatctaactggcaattaaatctcttcctttctaggggaacactgtgaagaacatgttgcttttttcaaacagatttttggagaccaagctctaatgaggcctacaacattctgaaatcacttgctgtttttttatataaaaatgtgtacaaagttaatttattgcattaataaagctctttaaactataaaatgttataaagtgtatctacaacctcaactgtcactaaaaatatggtatagaacttgtgggatggcttactcctaaaaggagagacagacagtgcattgattggcctttacagagtgtcagtgagcggatcacattcacagccatctagtgtcacctcctgcttgccaaagaatgaggtttctttcctgaagaggctgggagaagtttagtgtcctgtggttgcctccagatctagtaatactgcttcccaagtcarctgtgcattcctgagttcacaggcgctacgttcaaagctgctgccaaacaaccgatggttggcaccatccggtgttcaacttggccttgccgatgcagcacccgtccagtggtaaaccgaccgacccttagacacagttcagtcaggatgccctgcgagagggctagaaatttagaagccgttcgcgctctgttcctttgtatygctcttcagtggcacaacttttggctttatttactgatggccctatgagagagagagactttttcttatttctgcaggagaaagggagctagttggctgggcatagtggctcacgcctgtaatcccactttggaagactgaggcaggagaattgcttgagaccagcctggacaacagagtgagaccacatctctctccctctcttttggagatgggctctttgctttcttcctcaggctgcagtgcagyggtatgaacacsactcactgcatcctaagcccacccttctgggctcaagcaagcttcctgcctcagcctaacaagtaggtgggactgcagacgcacaccacttcacctggctaattttatttttgtagagatggaggcctcactatgttgcctaggctggtctcaaacgattctcctgtctcagccttccaaagtgctcatctcttttttttttttttttttcttaaaaggaactagtatattagattgtaatagaactactttctatcccccggagatgataaaaagcccctcattttcttaatcttctacttcagtgsttcaatttagtgacaaagctataaatgaagcaaatcagtattgytctttcaaccgtgggtcatttttgtgcaaggtgaagtggccatagaagtaaaaggatcaaggacagtctcgagatgaagaaaggcagcaagcactttgctaagaaacgggaaatccatgagggacataaaaagctgttctgcagcactgctggtgtgagagctggctgccagatggactccttcatctcagtggcagggaggagctgccctgcctgctgacactcagatccattcaaggactggctccaggcctttgtgaagcagacagatcaggcctccagaaaaaacatcgacaacttcctaataaagtagtctgcaccatcatgaatcccctggatgggttttttcttttagaagaaatttttttactcagtatcatttatcattatcaaatgaccattagtatgagttcaaatacttgaaaagaatgcctcaggatagaattccctttcagtaatgtccttcyattgtgccacccttttaagatgagaactcttacctatgtaacygagtaagacaggragaaatattaatccrtgagtggctyccagtaagaccatggccaaatacatcctgaagtagaatatctggaaaatttgagatttggcaaaagcsamcaccacaatccctccaaattttbtaagtgtgattccacygaacacctaaaagaagagatactgtgttagaaaccacttttaccaacctgtaattgaacaaaaacacttccttacraggatttctcccaggttcaagtgattctcctgccccagcctcctgagtagctgggattaaacaggtgcacgccaccatgcctggctaatttttgtgtttttagtagagatggggtttcaccatgttggccatggtctcgaacccctggccgcaagtggtccgccagccttggcctcccaaagtgctggggttataggcatgagccaccgtggccagcccttatggggatttcttaatattcaaggttcaaagcaatgggaactgaacccaggtagcatcatctactacctaacactatttgctgccttatgatcctgggggagaggtatgaccaagttaaaagctgtgtattctgcacagacactgcatcgtgtctcccaattgattatctttctttatattctcaggtgaaaacttaaatatttaaaagtgttacgaaacaaagttttagtttttactctttaccaggtattttctacagtggtaaagagataggctaagccagggtgtagagttgaaccaagacgactctccaggcaccaaccgcacatcacacgctgggttctggcccgggctcccctgcattttaaatgrgaaagactgccagctgtctcatgtttaacttgtctgttattttcctgcttcagcacactgccacctaaaaaggagccgtaccaacaggtacagttccacagaacgtccgttctgtccacgatgtggcagctaattcatgaattgcctgaaagcttgcaatccttagaagctgctttgtaagtacaggatccagactcttcagycactgaggaggattactttgtggtgcgactctgccggcgtggccctgctcagggtactcacggagctgcccatgtgggcaagtgcctcttccgcgcgctccacgcggctgcctttcaygctcaccgtgaacgctctggttatgtggctgcagaactccayggagatgccacagctctgaaataaagcacttcctttaggatggctctcttcctgttgaagaccctaggcagccaccccgttctgaggatgggtgctaattacccagggcaccctgggtgctagaggaggccaagcatcccattggacttacaaggcctccatcacaccaatcttactgtaccaggaactttytggggccctctctacacacagccaaaagcctggttttctgtggcacgtttgtgttgaccaggagaaattgctggaacccgttaaggtcaccccacccgcaccgagctggcgcattgtcacaacttcttttcttggacctcagtgctcccctatctgaagcagggctcatatctgagagtacggatacactgttctattttccatgaataccttctcragtgctctcatctttaatgattaaaagtacctgataaccacataggaggcaaaaggcactggtcggagagctcctggggyggggtgcaattttctaagtaaaaagtgaacatcctgctgtcatcaggctacaggcttgtgcartctctaaagaataacaaattacaggcagactagcccagaactaggccaggaaatcacatttccatggtcagaggcaccatcaggtatactagtatagccgcaaggaatgggacaagagaaaaaattgaacagaaattgcctgtaatgtgcctatgctcccagatgtccaactcaatgctcgctccctctatgccctgtcccaccaccatccagcactcctccagcactcatcctgcctctccatgtgtgccaagagcaagcgccagacttggtatcttactccatctttagggtttacatggaatctaagacagccaattcccccaagtgaaacaggagctagggacaaactgagactgtatgaggactcaccatcaccaggytgaccaaggatacagcrttcagactgatgccccagagcyacrtaactmcaaacatgwtgaccaagaccatggcgatggtggcacacatgatgactgcagaccagagctcacagcccaggaggamcatggtcaccagaaatatcgcgcccagggacacaccgaggttgaagatagtgtcgtcaatgatggtcaggtactgttygyagargacataaaacacactggaggggagaggggaggyctcattaaagctcgctctcactcccraacactgcgtgttcatcctgtcaccactgccaagtggtcaractcctttgggaaacatcccttgcagaaaaccttgctggctgtctacaagactcaccgaaagcaactcacttgacctctcatggccactgaccacccagagaagggcccagcagtgatgcaaaatgtatatttttgataaagtttctgtttataagcccaatctatgctattttatagacatttacagagagcattccacagcattctgaaaaaacacaaaaaaacaaagaatcctgatctatcctgagacactacctcaggctcagcggggtccgtgcaaggcctgaggaaaacatgctttcatttattttctgccagagctaaccggctcttaacttcttccaaacaaatccaggccttcctgctttaagcgagatcatggggaggcaggaaaaataaatcacttgtttctcctacctttctacagtttctaaattcagtagttcatacataatacttttcttcctgggaaaaaaaacccctaacaatataaaaagtctacatacaggcagcatcccaaataaccagcagttagggattctggttcattgttggccaagaatgtgggcygggccctgctctgagccgcctgctctccaagcgccccctgccttaagccattttccagtgtgtgtctcttgcagctgtgcagtggcgcagagatcaagttttgcgtctctagccctcaggccttcacagagactttagattctgaactcctttgcccagcacccatttcctttgatatactgccctgtgctcagaatggagcaggggccagaacccaacctgaaaatcagcatcttgccaagggaaccctccccactcccacccagtgtaggccctttgctgggtaaaccccattgaaaaagggcaggctttacctgtaaggaaatactcggtaggcactgccgttaatgcccatggtttcggtgacattactggctrtaagtygggctttcttcagagygtcaataaagtcagcagaggtctgcagcacggtgtggtaggtcatgaagtacrtgrctccgaccctggtgccatggccaaggaggatgttaactgcagaactataggcagcaygtcccctgaggaaagaatcctgggtgtcaagagagtccaggtcttgcaaaatatcagcagaatctgagcacttgaggctaagcaaaatcacctgaccctggactcagaggtcagacccagctgtacatttcagggatgaagaaggcccccagataagggaacrscaaaggtttagcttgttctctcccagactggcttctttttttttttattttgagacagagtcttgctctgtagcccaggctggagtgcagtggcgtgatctcggctcactgcaacctccacctcccgggttcaagcaattctccctgcctcagcctcccgaatagctgggattacaggcacctgccaccacgctcaactaacttttgtatttttttagtagagacagggttttgccatgttggcctggctagtcttgaactcctgaggtgatctcaggtgatccgcccacctcggcctccaaaagtactgggattacaggtgtgagccacttcgcctggccagatgggcttttctcgattgctctgggttctttggtacatagctgctgtttctccacctggtttcatgtataatcaaakgtacagggtttactcagtcctgttgtgtaataggaagcaggaaagggcaagggccctgggaacaacctcagccctgccacttactggtcatgtaaccccgagcaaaatgaccacctctgagccccagtctcctcttctgtaaatgggtatamcaccacctactcataggctgcgtgatgagaaatggaataatgtcagggagtgcctggcatgacgctggcaccctggaggctccccaggaacggtggctactgccttcagaaaaactgaatctacttcaacttattttacgtaggccaaagcatccagtcagtgagtaaatcaagctgcaagattc

SEQ ID NO: 10023 - DNA, 583315 bp, Homo sapiens
  misc_feature (58505)..(58604): n is a, c, g, or t
  misc_feature (156364)..(156364): n is a, c, g, or t
  misc_feature (530290)..(530290): n is a, c, g, or t
gtgactctgcagtaatgggactgattttttaaaaacacggattcctaaattcacatatttgattatgggctcttcttagagattttaaatatttttccagaggtatttttactactcaaaaactttytaaggctgggtgtggtggctcacacctgtaattccagcactttgggaggctgaggcaggcagatcaggagttagaggccaggagttagagatcagcctggccaacacggtgaaacaccatctctattaaaaatacaaaaattagccgggtgtggtggtgcgcacctataatytcagctacttgggagactgagacatgagaattgcttgaacccagcaggcagaggctgcagtgagctaagatcatgccactgcactccagcctgggcgaaagagtgagactctgtcmcaaaaaaaaaaaaaaaaaaaaaaaaaaaaattctaactcctctcttagagcttgccttcaacctgcagtgtatttaaaaatttatgtatataatatgtatctatgtgtgtgtgtgtatatatatatgtaatatagatttaagttttgtaactagtaggtgttatttagtsttagtcttatgaatgaggtgggaaatcaagatgagtaatactctatctaaaatgaagtatgactgtagattactgagtctgatttttttcaracttggtaaggcttttcactttcaaaggaggaattcyrcttgtattgtgtgaaaaagcagcattattacaataagtttgttgcttttcaaatgaacatgaaggaaaatactcatttagatatgtgttctgatgtgtttattaaaagttctaactctgtgtataragccacacctagaaaaggctatgaactttttgcttsctaggaaagtggtgtggaaacaaacatgagagcctgagagcaggagctggcatcgattacatggtgccgaaatagggctgtggtgattgtgtggtaggttaggaagccaggtggctgactgggctcccctcttcgatttyacacataccctctgtattagtccattttcatactgctgatagggacataccagagactgggtaatttataaagaaaaagaggtttaatgaactcacagttccacgtgggtaaggaggcctcacaatcatggcagaaggcaaaagccatgtcttacatggcagccaacaagagagaaatgagaaccaaatgaaagaggtttccccttataaaaccatcatrtcttgtgagtcttattcactaccacgagagcagtatgggggaaaccatccccatgattcaattatctcccactgtgtctctcccacaacatacgggaattatgggagctacaattcaagattagatttgggtgggaacacagccataccatatcacccttaaaggtgaaagtttgtttttgtcaaaattttccctctgctttttccctttaggttttcttttgctatttcttttatccatattagcttataagaaaaggtctacatcactgaaagaccttgagttgagtgtttttgtgtgtgttagatttctcttaattccgtgtcatcacagtattgattctagaaatggaaagtaaagaaggaaagcaattggcaagagtgtttaggatggtttcttaaagtaggtgggtgaaactaatttgaactaaattctggagcatagagatgacaggcattgcttcagtgcacgtgaactttacatttgtataatggctatacattttttgtctaatgcatggtagcattgtcttctacattagaatgcaaaatacttagggcaagggctagttctcctgatcctttgtaccttacagcatgtagcagagtgcaggatgtacttatcaaggcccagctaagctttccatgactctctcctgacagagttgttactcctcgggtttcatcacgtttctttaagcaaactctatgtcttggtcagcatgggctgctgtaacaaaataccaaggactgggtagcttaaacaacagatatttatttctcatagttctggaagctgagatgtttaagatcaaggtactcattgattctgttcctgatgaggactctcctgccttgtagatggccaccttyctgctgtgtcctcacatgatgaggagggcagtggagggggaagagagagacagagagatgggaggggtggggggagccagccagcatgagagctctctgatgtctcctcttacaaggccactaatcctattgaatcagggtttcctccttatgacttcatttaaccttaattgctaatatagtttggctgtgtcctcactcaaaatctcatcttgaattgtaatccccataatccccatgtgtcaagggtgggaccaggtggaggtgattcaatcatggaggtggtttactgcatgctgttctcgtgatagtgagtgagttctcatgagatctgatggttttataagtgtctggcatttcccctgcttccactcactcagtcctgccaccccatgaaaaggtacctttcaccatgattgtaagcttcctgaggaatgtggaactgtgagtctattaaacttctttcctttataaattacgcggtctcaggtatttcttcatagcrttgtgagaacrgactaatacaattactttctccaaatatagccacactggggttyagggtatcaacatatgaatttgggggaggcacagttcagcctattgtaccctggaacatattatgtgtgttgtaacaatttgtttatgtctgctgccagtggactgtggtcttctcacgtgctatgcactgtgccggacattgagaatcacaaagatggatcctgccctcaaggagttgtattaattttctattgctactgtaacaagttaccacatacttagtgttttcaaacaacacagatttattatcttacagtgccgtgcattagaagtctgatgcagggttggtcatggtggctcaagcctgtaattccagcactttgggaggccgaggcagatggatcacttgaggtcaggagtttgagatcagcctggccaacatggtgaaaccccgtttctactaaaaatacgaaacaaaaaaaaaatagctagatgtggtggtgcacgcctgtagtcccagctacttgggagtcggaggtgagagaattgcttgaacccaggaggcggaggttgcagtgagctgagattgtgycattgcactccagcctggacgacaaagcgagactgcatctcaaaaaaaaaaaaaaawwtttttttggaggctctgagggagaatgtgtttcctgccttttccactttctagaggctgcctgcatttcttggctyatggtccyctttmtccatgcatctcggggacccttccccagttatatctccctctgatgcagattggaaatgttctctgctcttaagaattcatgtgagtagagtgcatccacttrgataatctagaataatcttcccatcccaaggtccttaattatatctacaaaggcccatttgccacttcaggaaacattcacaggttccagggattaaaatrtggacatctttgggaagggcattatagtgaaagagagggacatgtaaattagtgacttaatgcaatatgccaagggcaagaatgaaaatctattcagggtacatatatatatgtatatatgtgtatatatgaaaagcatagaggaaaacggttgtttgagaaatgatggttgtaactgaggcactggcagcaaggatggacagaaaatggcttctaggaaggtagaatgggtattatttgggtamcaatttggtgtaggggatgaaggagagagagggaaaaatgaagtgagaatgacttccagattctggattgggattgggcaggcttgtccctgagatagggagcacactatctctagtgtgagaatgtatttataggattctttgaytgcaagtaaaagaaatatgagttgaattaggttaggcaaagaggagaatttattataagtttattggcggggaggttgtacaaggaactgaggacaggattayagttggacatcagacatgaacaagattgaggatacaggtactatccggatcttccctcttctttccctgtgctcctctccttgtgtcttttyacttttctctttctctgaagatgagcacttcccttctactggtgaaatcttactaaccatagttgccaatgttattcctcacttatagttcagtcactcagacaaaggccaatctctctctcaattgcatactcctgggaaaaggctttgattggtaaagctcaagtcaggtgcccaatctggtgcacacagctatggccagggctcagtttttcttcatgcctttctatcttcatgactgctctggctacaaccatgcattggatggagtgtttcttagaaaaggtttcctgggcagacattctaatagagatccacttcagtggagatgcattcagttttatttgtctttttctgctgctttaaaaaaaagttgagatgtaatgtacagtaaaatgcacatcacttaaaagtttagtttgaggagttttgacaaatgtatgcccacatcccagtcaagacatrggacatttccatcactccagaaartttcctcatgcctcctacagtcaatctccactcctcaaagacaaccacagttccgatttctattaccatagaatagctttgctggttgtagaacttcacatacatgaaatcaaaccaatatggtctttggcctttttcattctacataatgtatctgagattgttgctatatcaaaagtcttttttgtggcagagattatttcactatatatatataccacgtttgtttattcattcacctgttgatagacatttgggttgttttcaggttttttgacattatgaacattttaatatgtctttttagagttagaaggaactgtacattaaatgctgagattacaaaagatgacttcagttttgaataaattgagtctgtagtacttgtaggacactcaggtagtattctgggctcctcttggagtacagtctaagttgcagaagagagacagggtctagcaatgtaaatttctgtagtcgccagycttgattcagagttaaagctatgggaaagtcctcaggcagaggacaaacattagacaagaaaatgcccatatatgaaaccctgcgaagcatcagtatttgaggagcagactaaaaaggaaccgtctgtggaggctaagagaagcatggccatttatctttgtgtcccgatcatcaggcacaggaccccacacacagtcacttctcaatgtgctaaatttcacagaatgcgtccagggtacctggttctggatagayccggtagaaggagatagaccgggagggcaaatggcatgaggagtctcacaggccagagtgattaaaggggtgtatcggggcggtaaaccctacagactctacctgtgcttatgcggggctggggaggacgagtcattacagatgaagaattaagtaaggtcagaccactcagggccttagatggatgtcacattgaagaatttagactccaacaggcctgccaccctgggaggagtcatcgcggattctggagaagggcgtgacagaggagatttcctttcgggaagtgtagtctggcagcggtgccccggtggtggcggcggcggtgctgctgttgctggtgatcgtgtggtggtgttagcggcgatagtgctttccactgggctttggcttggtagccgctgaaagagaacaacgctgccgctgctgctgatttcatgccatttcctgacccggcgctgtaacttggcctctgagccttggccacagaacgcagaggccgtggcatctggccgcagctgggctgcagtgcgtgcgcgcctggcctggtggtccgatgggaagcccggggcggggcagccgcggggcgggggcggggcgtcgcggagataggccacgcccctgcccgcccgcgcaggcgcgctgcgggtcgttagctgtcagagccaagcggcgggctggcggcgggctccgacgtctgcgccaggacctggctggctgagcccggcgcagcagcagcagccagggcagcgcggcccctactccctgtcaggtcgtagaggcgagcagggaccagctggtcgccggcccctcgggcaagatggggaaccgggagatggaggagctgatcccgctggtgaaccgtctgcaggacgcgttttcggcgctgggacagagctgcctgctggagctgccgcagatcgccgtggtgggcggccagagcgccggcaagagctcggtgctcgagaacttcgtgggcaggtragcgcgcagggcgcggagtaaggatgcggcagtggggcgaccccgctgcgggccgttggaacgtggacgggcagcgggagccagagggtggatggaccaggcgctgcggtggaatggggggcagagtggaatggggggcagagtggcggtgtccgtggggcgggcggggtcctccagctctgggcatcctccgtcccctgccaccccccgcctggtggccctcctgcctgcctttcatcgtgcgatacaaagccatttcctccctgtcctccagtcggggagtcgggggaggggtccgccccgggctcgacccccaccccctcggtgcgcgccagccccgggcagcctccctgcgtagcgcgccgaaagcttcccagtgcccctctcctgttttcccagctcaacacccccctccttttcctgtcgccctccgtgaggctccctgtgaggctgtggggctttatcccccgagccccctcccttaggtggagatgctttccttctcgccwgggttctcgttcctctcagctgtctactgttgcctgcctctagctggggaggcggggtgcgaggagaaagacgtcgtttgttgtggtgaagctttatccagagacgcttccccaccattctcctcccggagagtcgaagaataaaaggtggtgtgtttgcgtgtgcacctattcacagcttcaggcaattgtgagagagcccgaggcacagacttggcagggggtggacgtggacttatgttgtccaggtgccatgtcattcctgcatcatctcggaactgaccagcatctttctcgcactctctctgcgccccctcccccagcatcatcttccgttctctaagctcctatttgtcttgctagccttcaagacaacattctgaatctaaattgtagctgtggttttcctcatgactcttaatacagaaacagctaaggaattaattttcgaattaggaatcagcatttcttccactgagcaattcaygagggattaagttaccttaatggccttgcctgaagagtgcagacatttgctaagaaaagcccatttaaaagcattatgaaaactgaaatctgtttcctagtartagaaaaccaggtagaaatgtacagtatccaagaaaaaatgctggcgagattgtactttattctttttatttggctcattcgtgacttgggatgcagaaggttcctgtttctgttccttttttctttttttgttagtgcttggtgatgtgtagaatttagagctgaatattcccacatttcctttggaaatgttagtgttcataaagtacatattcctttctctcaaatgatrttccatctctcagatgatattttttttcctgtatgaactagaaagataagaagcctaacaaagtaaaattgctgacaattggcttgtatccttgagtaattcacttaatcactacacctcatttttatattttttttgattaatgaacaaagtgaaggtaaagcattttgcctrcgtcatcttagacttytggtgaagtgatggatttcaaacatataacagttactttctttgatttgttgccaatgaaatttacgaratataaagtggcatccaaagagtgagttttggtaacatatttttggctttccaaagccagggcatttttgtcatgacaccttaagagttatttaactatttttgttttttaaacaaatacttaaagattaaaactgtaagtatttcaaatgaaattaccatatttttatgcatctcccatatatttacttggatgagcctatattgtatgcaagtgcattgtttgtggtcagagcttttgaacttaatgtcagttgtatgcacataccacaattctacattctaggttttgaaattctaacattcttcctaatgttataataaaattgtacacatctccccacactagctatgttcttttggaataatttgaaaaaagaaatgtagaagagtaaaatatttaagyttgaatatttttcaagatggaataaaaaatagggacaagtataaaaatcagagcacgtaccagaatgcattagtaatttgttgtactttaaaaagttttaccactaattgactgttagaacgccaaatcaaagaaaaggatgaccatagaggaaaaaggtcatttaattcatatgtaaagtcttaattatatgtagagataacacctgcctagcagagcttacatattaaggagaaaatttaattaggaaggtcatttgactttaataaagatttcggtcattgaattattgaggaatctaatttctaattataaaccaaccttagggaaaatggagttttctattttgataagttattcagcctaggtggaaaaaattgtatccattttctactgtaacatcttagcattttcttgtcattatccaggaattttgcaataaaaayagtttctttcctaaggatgcaactttcctcttttacacgaaacagttttcattttaagactcgatctaatgtgcagttattgaatgcagccataaaaaccaagggtcatcacttgtgtaaattcattgtgtttgctcttgactcaagcttcttctctacaaaataatgatgcattttctcaacaatcctcatttagtggactaactgtatcttctctcagtttgtttatattgagtttttttggacaccaatgaatgaattcggatgtgaatatgtttacttcatttagcggttgctgtaaaagctgatttttgggtgacaggtttgagattgttatgaataaaatgagtcatgaatgaaccacttgtttgtgattttcttgctgaagtgatgaacttgcatattaatgtgatatagcatgagtaaccagattgttcttttggtggtgcaggatgagatatatgctggcaatgagaggcagcttaagatctaatgaatagaatttgagacctataatctgaacataggggtttactagctggcttgggtctgcctactggtctgatttgtatacagaagaattgaatttattcaactattttcattatacgtatacatatatttatagtgcagtggtgatgataataatggttaacatttatagagtgcctgttatgtgtaggtactattctgggtgcttttatatgaataatctcatttagtcctcatacaaccccaaagaggtaggtactcttatgatttccattttacagaagaggaaatcaagatttagagagtttgagtaactcactcaaggataatttaatttaatataaaaacagtggagctaagattcaactagaggtgttgatgaccataacccatgctctagaacctctgtgccatattgcatcctccatgttgaggtttaccatttcctctgataaatacttttaacttctgtcttgctccctatataaatgttacctatattaataagaagctggccaggcacagtactcatgcttataaccccagtatttggggaggccaaggcgggaggattgcttgagcccaggagtttgagaccagtctgggcaacgtagtgagatcttgtctctacagaaaaaccaaaaaataattagccaggtatggtggagcatgcctgtagtgccaactacttgggaggctgaggtaggaggatcacttgagtccaggaggtcaargctgtaagtgagccatgattgtgccactgcactccggcatggctgatagagcaagactctgtctcaaataataataataaacaagaagctactatgttaatgattttattaatatttatttacatatgtttaccttgcctcatttcacagaagatttgaggtgaccccttaggcagaagcaacatttattaaaagataagtatttttctttgctatattagacattcttgaagagagttttaaaatgtaattggattgtttatttaagtatgtttttagagtgcatataactcatttatagaggtgttaagtgaaaactgtactagttgctaatacrcagatgttttaaaatgacacgcttgttagaaatattagtttttcaatgctaattatrtaggcagaagagtccacattattttattctagtctgagtggtaaatagactctcaattctgcacaaatagaaaaagttttttgattaatggggacgaaataaaatatttttaaaaagtgattatgctgatatttttcaagaaattgcttctaagtattatagttattagataaatggtgcttacaattaaaatgtcataattattgagaaccatacttcatagttcccaaggtctataaataaagtgtcaaaacatgaacttttcttcatgcaacaatgaattggtagaacttgaaatcacaaaaatatttttgctgaattaacattatataatatacttttaggttatcacaaattcacagttgkgtacttaattactaccatcaaatgaattccttttttattartaatgtctgagagcaatatawctaagataactagactggataggatatctctgttttggaatttacttatgattaacagttatccaaaaatgcacttgatttaacttctttaagaatgaagttgggcagtcacccagaaccttggaggaatggaaacttaatgtttagctggattagagggtaggctattgggttctctatcaatggagtatacatttagagtgttaggtattcttcttaggtagtaccttttgctatggctagtaagttaaattatgaagttttatttattattgtcatttattttagagggacttcaagtatctagaaagaaatagattatttttttcctctgctaccagagccaagtcaagagagtcccaagctcatatgctatatagaatgatccaatttaattttctgyatggccaaagttttgcaatttatcckagtccaagtttgcattgcagtttctcacactctctgcattgatttaaaaattcttatggattatgtyatactaaatacattytataaagtagacggaaaaaaggggccaacatttgcttagccattatggggtagcagacatggattctgctagatacttttcataccttctattccttacctgtttccatatccccatgtcaataggggagaaaattcagggttggagagacaagtcattcacccaggatcgtatagctagcaagcarccaagctgggattcagtatgactcctcctggaactcttgagaaatatggacacataaaaccaatgaacatgtatttattgagttctaagtttactgggtaagaatatacaagaaaatatgaatacatagaagcttatgtatgtataaaaagagaactgacaggataaagtatgagacaactttcaaatgcacatgtaaaatgaaggtagtcagatataatgcaaactaatcaggataaaaaattatagtatgtcaatttatttttacaaaaatccctgaaaaactacagttctgaaattgaactgaatataagtggaaagtagacaatatatgcatttccagtgtcatctggcagcccatatcattttagctcaagcctgcatgwactgaagtatctatgtcaaagcaggaaggtggtgatctgtgtctcagtttctgagttgacaacaaggcattgaatttagactgtgactttatcacaaagagatactgtatattggagagggccctagagaagagcagcaaggaaaaaaaaaagagattggagagattaaaaatataactggatgcagtgaaggttaattgagagtgggatggatcagatcaagtattttataaggacttccaaggcactaatacttaagggaggtgaattctattttccttttaaagaataagtcatttagttaaaggagtagaataagtcaaagacacaaatgtcagggaaaatgtcctaaaggcaaacctgaaaatggaatgaattgtttagaatgggaggagggtaaaggagttgacactaaatgatttgcatttcatgaattaaaaatcatttccaacaaattagagggttmattaataccatattaattactctctctctctctctstgtgtgtgtgtgtgtgtgtgtgtgtgtgtgtgtgtgatcataggtagcttagcttttcttcctttaatagtagcaagactggcatttgatgacattattataagaagcttttctctggcttgattttctctaacttcctggagcacagtaggatacagagaaaccagagatttgcccaaggtcagaagaaatcagagctaggtttggaacttaatgttaggaactgggargcctgtgccagttcatcatcttctcttcctcctgttattgttttagagcacctccctccaaccctcaccctgcctcctccttttcccatccctttgcattgggccagcctttttctcttccgtgatactctctttcattactcttcttgatagttgaccagcagtgrcmttgcattttattacyttttttttcccatacagaatagtggagacagggagcagaatttttctcagacttaggcaagttaatttgactgaaatagtatactcgtgagtaaagcgtgacttttagggaacagatgggcccaggaaaagactaaataagatattggatgtttttacacattattaatatttatccaccaggtgggcattagctagaaagatatgcctgagatggtcatcaataggccttgcttaaaccaacacgagcttctgaaaagttgtatgtaaataaataatctaaatggaaatgttattatttaaacaagtgggtgaacttttaggtaaaataaagatgtatttgtgtagcaaatctgcatccttcagtttgcctgttttctattctttttgtgtgtgtgtttgcattcttagagtgcattgagtgacattgaggtccattaatgttatagagattattttaacaatttttcaacaagcattaatattgcattgtctttagtgttaattgataacaaaaacagagcagttgttgaggaaaatgatgatacatttaattccggaattatatgaatgatacaggattgctttagatcttgtttttctctaatatccctgctgcaagtcctctatttccaagggtttaaaatgtacctcagtgctyctttgtgacagtgtgtcatttttatttcccactgcttcaaggtcatgatatacccatgaatagcatatatatacatgatagcagtagctaggtatcctgaaggacctcattgtttatccttccagtggcttggaattgaaagactaatctatttgataagtaatttgatgggtgactaaacttgtttatggtgcttatttttttagatttctcaaaagtgagtatttgaagaggagtcatcacagcatggtgatggagtgcaggctttgctggcagctcttgagtcctgcctctgaytctcactggtagcatggctcctcattacggaatctagcctcacttggcctcagttccttcatctgcaaaatagggattgcagacttcaccttttaatctgtgtgtgagttctgagtaagatggtatcaagtgcctggtccatagtatgcattcaataactgattgctsttaatttaaatcttttatttagactggacattttttgagtgttttaaaaacaaaagtaagttgaggcagatggtaatgcgtatttgcaaattcttttygtgaatgttggaaaattacagttgcatcaaaatacttacttgtagataaggctaatagaatatatttgagccttctttaaagaaagcattgcccacattcgttaaatgcattatcacaatgtgttcttttttttttaaaccaatatatacaaagtgaacccagtttgtatactcttcccttccaagagttccaaagcagtttttatcatttcattaatccttcgaatttctgtgagaagatagcaaaagcatgttttgtttactttaatttagaaataaaaaagattaagctggaaaaaagttgggtgacatactggggtcacatggtgagtactagaaattaatgaacaaaatagacttaataacagataatagaattaaaatgaatttttctgacattatttttagttttctcctagagaatakattttaaggaagatatttgatgctgtgatataaagtaaaccattcttagcatattccttttcttttggaaatgttagatgaaattgcaggcaaagatggtgtagaagggggaaaaacaattgaggaagtctagttggcgaagcaggactacttagcaagagtatggtctgagcccaaggaaaccatctacaaccaagtgttcaggaggtaaggtgtaattagatcttaaaagaagtaccaacatttttgtagtagatgttgaaataataccaaatcactcttttttccagtggaaagattcatattctgatttgattgacattcccataacttgttaaccatcagttttagctctgagctagtcagctggttctgtttggaattacattatttttaagttactagatatacctcagaagctttgaaaagaatagctttgggtttcttatctagtggaggtttagaaccctgtatatgtgtgtctgtttatgttttctggttaataaaactragacccattctcttcatattttgaaaagaggggcaaaggcttgcaattatttttatagatcctagcattcatggttctgagtcctactaccaggacagcaacaattgtgtggtgagatttctgcattctcatctaaataccgatagaacgacctgcatactgaagtccttgtaaattcaacttaagaaactttagcctgtttatttaatcctaaaaacatatcatgtaaaatgtgtatgtgtgggtacttgatttgaattatgtactttgaaagttacatattctcttagggctttgtttttttttttttttcctcagagtaagttaagaagggaagtggcagaaggatcatgagttccttgcttgcagagtaagtggggagatgagaaggaggaagcaatgcttttstgagtgtccaccagattgtagggacatacgaagagaaaagactggtaaggttcaaccactgtgagaattaggagtatttgtgaatgagttagtctggggtggctttggttctctcctgctccctgtggcaggtggtccctgcatatttgttcaaagtgtgccacaggtaagcaaggtagcatgccaagaacagtgagagctgggtttagtctggcctctgctgtcatctgctggtcttctcagctctatctgtctgatttagaggcccctccttggtggcccttgttaatatttcactgcacaggaatctaccgaacagttggttgcctcctctgtctgctcaactatttgcagcttccacgaagccaggagctgtgtctcctttatcattttccrtagtgcagtgccggcatatggcaggagctaactgaatgaatcagctacttgactctgtacaagccatttatctaagctgaaacatacctttgtcatcaataaattggttgagaatagttgagtgggcttggattagaacggttgttgttttttgagacagagtctygctctgtcgtcccggctgaagtgcagtgagtggcatgatctcagctcactgcaacctctgcctcccaggtgcaagcaattctcatgcctcagccacckgagtagctgggactacaggagtgcgccaccacacctggctaattttcatatttttagtagagacggggtttcgctatgttggccaggctggccttgaactcctgacctcaggtgatttgcccgcctctgcctcccaaaatgctgggattataggcgtgagccactgcacccgacctgaacagtgctttttaaactgtagattgtgacctaatagtgggccatgatatcagtttagtagatggtgtgtgacagtgttaarcgaagtatcagactacatccaaggtagttataagtaccactttgtgaaagttttgtattagttgcatatttgtatatgcatactaggctgcaatgtaaaatgtatttcttactatgggttatcctcaaaattgttgaatgcctctgatctagattaaatctaatattacttctagtcatttatttggttattytctatttaaatggcaggacatatctttttattagagaagacacaattcacactataccattactattccactaggatgaattaaaatggaaataactttattaatttaaaaaagctgtcttttaattgaaaaagtgatatgtacatgtaatacaaattcagacattccaaaatacattatatttataccacataaatccctttcccctaytgaggtttcttagtaagatgtttcatttacctgcctatcttccagattacttctgaatttatattttctttatatgaaatttatttgagttttgaggacagagagaatttaataaacttgtttgtaagtagatgatacaaccagttaagaaaggacatgtttgaaaattcttttagcagatggatttgtccatttactgagtcatttacaaagaatcatatgttgagagtccacaatatgccaggaattgtgtgaggctctggtatgcaacagctccttcaaagagcttggtgatccagtgggtacaggattgctatgcactgcactgtcaggatacccaggctaacaattcttatgagagccatttgtcagagaatagttggtgagttcatgatactgtctctaaatatttgaggagctgttacttggaaaaggattagactgactcagttatctccccagaagacataattagaacaaatgggtgaatgttacaggcagatagacttaaacttaacgtagaggagactgttcaatagaacactttaaaaaatggaatggattgcctgtgaaacagtaagtattccatccccataagtgtagagactggcgattgatgacttgctggctgcttggcatggtgtagtcaggagaggggttgaacaaaaggactttgaaggttttttgtttgtttgtttgtttgtttgttttaaacagtctacgatttggcttgatggatgtcagagagaaacctggctttaaaaaaatgtgtgttttctataggttatctgtaggtagataagaaatgacagacttataaaagagttaagacctctctgggtctagaccttcaaaaaatcattatgcctgtcattgtatggatgtaaagaagctggactctctcctggaatggctaattccatgaagcagctgtggttaagggtgttttagaggtaaactgtatttattctttttttttttgagacaggctctagctctgtcacccaggctggagggcaatggcatgaaaactgctcactgcagccttgatatccctggctgatgagatcctcccacctcagccttccgagtagctgagaccacaagtccgcaccaccatgctcagctaatttttaaattattttttgtagacacagggtctccctatgttgtccaggctggtcttgaactcctgggctcaagtatttctcctgccttggcctcccaaagtggtggcattacaggcatgaaccactgtgcctggtctgtatttatttattttttaaaaaagcttaattttaaaatctgcttttctaattgacccaatttctttcagtggtatactagtctagaaacttaaaaaataaacatagtttagtttcctttttttatttttaaaatcttcctatatctaacacatcttgtaatttctttattcaaaacatctttttggtcagccttttcctctttattctcattctgaccatcagagtctcagctgtcctcctttcgcatgtgggataactctgacagcatcctgccctctcactctctccatttcttattcatctattccatgtaaatattgctgctctcaggttaatcttccaaaacacaagtttaatatctctgtcctcagtaacctgcagtcccctccctcccctttaaaaatctctacttggttttcaaaactttctgaccattcagctttgttttccactcctcccagaggtattcacctcatttttttcatcttttctgtgtatgcaatggcaatttctgatgacttaagaacatgaatagcttgagtagagcatattttatgaccaaaatgggttcaaacaatcaacctatacttgagttgctactttgtgaaagacaytgttttgggatggaaaaaaaaatatttgcccttaacagaawctagtgtagactagcatagagtgtagtcagaacttacagagtgttgaggtaaagaacatgtattctgtggagcctgactccctgggttcacatcgtagttctgccacttaatagttctgtgatcgaaggcaatcacttaacctgcctgtgcctcagcttcctcattggtacaatgggacaatagtagtaccctcctcatgtggtggttgtaaaaattaaattaatacatgtaaaacacttaggagagtgtctgtcacatggtaacatagttacctgtttatgattattattactggggatggaagtttagacagaatttgggtgcctttagaggtgcagtgttctggatgatcaaaggaaaagagcaatttttcctttttttytgagacaaagtctcgctcttgtcgcccaggctggagtgcagtggcgggatctcagctcaatctatcaaattcttactatttaatgcccatttaaaatcctactggtttacatgaaatctttcttggactctcccaaagaaaaattgaaagacctctgcctcccagattcaagygattctcctgcctcagcctcctgaagagctgggattacaggcccccaccagcatgccaggctaatttttttttttttgtggagacggggtttcaccaggctggtctcaaactcctgacctcaggtgattygccagcctccacctcccaaagtgctgggattacaggtgtgagccactgtgcctggcccaatttttccttttttaaaaattattattttaggttcaggggcacatgtgcaggtttgttttataggtaaacttgtgtcatgggggcttgttgtacagattatttcttcacccaggtactaaatygagtacctaatagttattttttctgatactctcccttctcccacccttcaccctcaaggaggccccagtgtctattgtttcctttgtgtttatgaattctcatcatttagctcccactaatsagtgagaacaggcaacatttggttgtctgttcctgtgttagtttgctaaacttaatggtctccagctccgtccgtgttcctgcaaagaacatgatctcattccttcaaggctgcatagtattccatggtatatatgtaccatattttctttatccaatctgtcactgatgggcatttaggttgattccatgtccttgctattgtgaatagtgctgcagtgaacattcacatgcatgtgtccttatggtagaatgagttatgtttctctgggtatatacccagtaatgggattgttggattgaatggtacttctgcttttagttctttgaggaatcrccatactcctttccgcaatggttgaactaatttacactctcaccaacagtgtataagtgttaccatttctccatatctttgtcagcatctgttgttttttgacttttatataatagccatgctgactggtgtgagatggtatcttcattgtggttttgatttgcatttttctgatgatcagtgatgttgagcttttttatttttttcttctcatatccctgttggccatctgtatgtcttcttttgaaaaatgtctgttcatgtcctttgcccacttttttcttgtaaatttgtttaagttacttacagatgctggatattagacctttgtcagatgcatagtttgcaaaaattttctcccattctgtaggtggtctgtttactctattgatagtttcttttgcagaagctcttaagtttaattagaatccctcttgtcaatttttgcttttgttgttattgcttttggtgtctttgttatgaagtctgcccattcctacgtctcagatggtattgcctaagttgtcttccagggtttttataattttgggttttacatttaagtccgtaatctatcttgagttgatttttatatatggtgtaaggaaggggtccagcttcaatcttctgcatatggctagccagttatcccagcactatttattgaataggtagtcctttccccattgcttgtttttgtcagctttgttgaagatcagatagtcgtaggtgtgtggccttatttctgggctctctattctgtattctgtcccatcagtctatgtgtttgtttttgtaccagtaccatgctgtttggttactgtagccctgtagtatagtttgaagtcaggtagtataattagtttagctgtgttctttttgcttagcattgccttggctacttggctgttttttggttccatttgaattttaaaatagtttttttctaggtctgtgaggaatgacattggtagtttgataggaataatattgaatctataaattgctttgggcaatatggccattttaatgwtattgattcttcctatccataagcatgggatgtttttccatttgtttgtgtcatctctgatttctttgagcagtattttgtagttctcattgtagagatcttccacctccctggttagctgtgttcctaggtattttattctttttgtggcaattgtgaatgagattgtgttcctgatttggctctcagcttgggtgttgttggtatatagaaatgatagtgatttttgtacacggatttttctatcctgaaaccttgatgaagttgtttatcagctggatgacactatggggttttctagatatcaaatcatgtcatctctgcaaacagggatagtttgacttcatttctttctatttggatgccatttmtttctttctcttgcctgaagaagcagtctttcaatttttctttggagagtccaagaaagatttcatgtaaactagtagaatttgaaatgggcattaaatagtaagaatttgatagatcgagatgaagccagacgcacagaaataaggatgtgtttagggaacagagaattttctatgtgacctatgtgtctagaagaggagtggtgggagatagagctggcagagtgaattggggccctatggaggattgctaagatgaggaattggtactgaatttaggaagcaatgaggagctgttaatgatttgtaagakacattgcagtgtgcctggagtcaggctttaggaagattaagttggccacatattaactggaggatacatagatggagggagacatctgaggtaccagtggggaattaatgattgaatggtaatagggcttgaaaaagtatgtttactggtggaaatggatacaggtcatttcagagacagaggctgtgattacaaatggtgagtgacagaaaggcagagagggaataaaaaataatttcaaactttgagtagatccctggaggaaggatagtaaaattcatagaagtaaataagtttagagagggaaggaatgcattctctctctacttgcaactggycagatcttccattctaccatcaagctcagggttatccatggaacatcccrtttgaacactctgtctatgctgattttgaccttctcagatgtcctgatgacttatggttcaaaactgtttaaaacttgaatatttctgactgtttcattaacattagcttttgcttctgggacagactgcaaacccttaattagtattccccacagtatcttgaatgatagtgttttaggtaccattatggactgaacgtttgtatctcctccacaaattcatgttgaagcccaaaccccaaatataaygatatttggagatagggccaattaggaggtaattaagattaaagaggtcataagggtgaggccctgatcaaataggattagtgtccttataaaaagaggcactggagagctctctctctctcttcctctgcacaaaaagaagaggccatgtggatacagagagaaggcaaccatcatcaagtcaggaagacagcccacaccagaacctgaaccagctgaatcttaattttgggcttctagcttccagaactttaataaataaatctcttttatttaagtgacccagcatgtggtattttgttatggtagcctgagcagactaataaaagtacttaacttktattgagtttttgctaattaaattgttgatctgacttagatgggttggtactgagagtgaggatcatgtgtttaagtaagagatttatttttacatttatgagaaaaaattcactgatgcactaatattcttagcttgataagctagtgtccttagcccatgtgcctcagtttttgaggtatccattctttcacctgtacttctctcttcattttcttaatgatgtaaactacttgtgaktctcccatctcaacctttgccctcttcagctgctgacttagctttcctacccgataaccatcacacaactctcactgtctaaatgcaggaaccaaatggatttgaaaaaaaggattatgatactgaaaagattggtccatcccagcatctcccaaagcaagtatatggatatctgtgtaagatttacctgaggaacttatgaaataaaggttcctaagctccactaatggaggcccactcagtgggtctggaggtaagccatggtaatcggtatttttcagaagctctcctcatgctcctgataagcagccagatatgggagctattaatcaccacttccacaattcccattatttctgcagctgaggataacgaatgcagtgtgtcttccttccccatcagtacactgaaaccgcccttcccaaggtcaccaacgatctccagacagcttaatttactttccaaatatgtctgaaactgatcatctgtgcttaattcctacaaccactgactgagtacaagttgtcatcattcatcttctggactrtaacaatagactcataatactttccccatttgtaaccttccaatctgactttcacacagccatagcataattgatatggaattcaaattaaatcacatcactgtcatagttaaaatttttcagttcctaatgccaacagcataaaatcatcaaagcttcttgggatgtcatacaaggccctgtgtagcccagcttctccaggttatgtgttgttattcttttacctggctgtgtagcataccccctagacacccaccacgctgtttcattgcctttgttcacgttgttattgttcttcaccccactattattatcttgaatttgggtctcctttcctctgggataccccaactgcctcccacttcctcatgtctcctaggtttcttgtccctcttctgggtatacataattctctgagcatttctctcatgttatacttaccacattgtgttaaattatcttatttgcttctatcactaaattgtgagcctctcgagggcagggtctcttttatttgtttatcttcacttctagcatatggtaatttctgaataattattcaatgcattaatctacaaatataatggagagctttcagcctttttcatacctgatttatctgcaacatgtgatgccttttattgaacatccactgtgtgccaggcactgtcttaagcascagaaagacagtaataagtgaaaaagcacattccttgtcattttggagcttgcagtctaatgaagaggcatataataaacaaataaaaatgtataattataaatcagtatggatgccatgacaggaatgatcaggatagtgatagaacatgacagagagtgacatatttatcagttggtcagggaagccagtctgatcagatgacatttcagctgaaggacaaggaatcagtcataagaagagccaggaaaaagcattccttgcagaaggaacagtatgtgctaagacttcgaggggtcacagaagtctgtgtgttggaggaacttaaggtaagtcagtgtctccagagctcagtcgagagggagaaatatagcaaggaaagatagcagagggaagttcaggtaggctctgttgktgccaaaaatagattttatccagagtgctatggtaagtgactgaaggaaggattttaatcaggttagttatgtaatctgatttacattagagaaagattactctaggtcagtgcttttcaagacaatagtcactaccccatgtagctattataactaatgctactgagaaattgaatttccagtttaattttagttactttaaatctacttttaaaaatataacgaattcagttaagtatgttttggtacatgaagctactttttcaactataaattttgtgaactttaaatatagatcaggtatttctgataaaaatttagcatccaagttgagatgtgctctaagtgtaaaatacacatgaaatttcaaagatttgctatggaaaagaatacaaactgccttattaatgattttatattgattattaatacatattgaaaggattataagttggagaaattgggctaaataaaatgtattgtttaattttacttgcttctttttactttttgtaatgtggctattagaacatttaaagttatttacatggctcatattatatttccattagacttgcattgcactagatgctgtgatgataatggattggaggcaggcaaagtagcagcagagagatgggttaggaatcttttgcagttgtctaggtgggtgataatggtatctttgattagggagtggcagtggaaatggaaagaagtataaagagtctacaaatattttggaagtagagtcataatgacttgctgatggactagatggggaagggaagaatgaaaaacgactctcaagtttttgacttgtgactggattgcagtgttgccatttcctgtagtgggaagactgagaaaaaagttgggagttgaacatctaaggtatggatttgggcatgttagagcctgtaaggtatgcaggtggttggatataagagcctggggcacagaggagagtttaactgaagatattaatcagtacttgtcaatatatcrttgatatttaaaaccttaagactgcacaccaaaaactatacaacatcattgaaagaaattaaagaagaccaactaaaatggaaagatatcctatgttcatgaacttgaagacttaagtgttaaaatggcaacacacctcaaatcaatctgcagacttaatgaaattcctatcaaaattccagatgccatttttgtgcagaaattgacaaactgatcttaaaatttttatggagttgcataggattcagaatggccaaaacaatgttgaaagcaaaacaaaacaagttgaaggactcacacttcccagttctaaaacttactacaartcagtgtaatactggtgtaaatatacacatactaaatgaatggaatagacttgagagtccagaaataaactgttacattcgtggtcaattgatttttaacaaaagtaccaagataattcaatggaggaaagagtagccttttcaacaaatggtactgggacagcagtatatccatgtgcaaaagaatacattggggcccctacytcacatcatatatacagattaactcaaaatggatcaaagacctaaatgtaagagctaaagctacaaaatttttagaagaaaacacaagtataaatcttggtgattttagattagacagtagtttcttagctacgatacccaaagcataagtgacaaaataaaaaatagttaaagtgaacaacatcaaaattaaaaacttttgtgcttcaagggacactattaagggtatgaaaagataacccagagaatggggggaaatttttgcaaattatatatgtgatagggaactagcatcctgaatacaaaaggaactcttataacacaacaataaaaagacaaataacccaattaaaaattaggcagaagacttgattttctaaagaatgtataaatagctaatatgcacatagaaagatgctcaacatcagtagtcagtagagaagcaaattaaaatacaatgatatgccaccaggtatctcactaggacagctatgataaaaaggagggatactaacaactgctggtgaggatgtggagaaattggaacactcatccattactggtgggagtgtcagattgtacagacactttggaaaacagtttggcaaattcctcaaaagttaaacatagttatcataatgttatacgaaacaattcaactcctagattcatgctgaagacaaattaaaacacaaatatgtacatgcaaaaacttgtgcataaatgtttatagtagcattgttcataatagccaaaaggtggaaacacccaaatgcccaccaattgatcaatgaataaacaaaatgtgacatacattgaatacaatggagtattattgagccataaaaaggaattaagtactgatacaggcatgctacaacatggataaatcttaaaaacattacactaagtgaaagaagtcaacgcaaaaggccaatagtatatgattccatttatatgaaatgtatagagtagagacagaaagcagattggtgtttgccagggcctagggagaggaaggaatggagaatgactactaatgggtatggagtttttcttgggtgataaaaatattctggaattaaatagagatggtgttttataatatcatgaatatactaaaaaatcaccaaattatacttccaaagggtgacttttatgatctttaaattatatctcaattaaaagaaaaccttaggacagagataaatcactttgagggagagtatatgaaagaaggaaaagagaagcagcaacagaagggccctgcaaggaagcccaagaaggagaggccaaagaactagaaagaaaatctagagactctttagaactgagagaaaagagtagttttgttggagtggtaggagttgggaagccttactggagtggttgagaaaatgagaggtgaataaatggggacacagtgtgtagataactcttctgagaagttggaagagagtctagggcaaaggagggtgtgctttttttttttttttaaagacaatacataacattcaaaggggatgctttttttgatgggagatattagagcatttttgtttgctagtaggaatgacccagaagtaagatccaagaagtaaggtaagacccagaagaagatatagatgacaaagtacagaaaagcagaagagagaggcaggacatgcttgagaaagtatggtgagatgggcatcccacagaggagtagggatatcttatcyactgtaactgaaaggtaaagaagctggtgcagacaagaagggtgtatagatttggtggggaatgtagggaagctccagtttaatgaagtgatagcatcagctgatggtagggtaggaagcagagggaggggcagaaagacaggaaaaaagtatacaaagactatttgaggaaatgggaatgtgagcttagtagagaaatatattcaaaatatttatgaaatttcccttttcataagccaataacagttacatgaattttctaaaatgcatgttttatcaaaccactctactgctaaaatccctgttacccagcttctaagcatgctgtagagtttccttcatggkctgccatctgtctttatgtccgttctctccttctccttctatgcactggggtgtgcagtcctgctgaacgactaaggttcctagaatgcagcaagccctttcatgtctccatagcgttacacatgttcccctctacctggaaggctcttcggtttccatattgccaggataactctacttacaagaactagttatcacctcttcttgaaagccttcactaagcccacaggtagaaggtatttactaagtgtgtgttgaaagactggagatacttagtatgagccttattgaatgaatgagctctttgaacacagaagaattatcsagagtctgggctgtatgtgcaaaacgccaaggactttaaaacttatgtggctttcttggtttatttactcatctgcagaatggagataataaacattatctcaattccctttgcagagtctaaaaagtgggttttaaatgtctaatatactygtcaataaatgatagtttaaaaaatagtacttaagcaaagatttgcatgtagcaaaacgtgactgagagattgctttcattgcagggattgcaaggacacctgctgtatttaaaatgctgcattttcttggcataccatttaagacaaattacaaaaacctataactgaagcctgtttttccaaaaggtacgtttcctggtttggacctgtgggtagtgagtggaagaacacatttggtgtagaaggaaaatatgtatatattctgatctaccctgcatattttccattaaggtctccagctgcctgaacattaaggagctgtgccagtaaggaggacaagacctggtaactggttaaaagaagctaacagagctcatgataaggcttgccagcctagaggacaaactgccagttgtctatagaacagacaggacttgtggragcatagtgtgttaagtggaggcccctgagcttagaaaaaggggctttcctattaggcaggaaccaagagaagcacaaagagatcatagtttataaatatgcaacagacacctctgtttggaaggaggcacaacacttattgtggrattgtcattgtgtggcttgcttttttcaataaattccctccttaaaaatttttatatagattgaatatttgtaaatagtgttttattattgatttacattattatgttagtaatgctttaattttcagttttgcttgccaaaaattttctaattcttgcttaaataaaaaaaaaaactaattgtatagcttggagttccaaatttagaatgagaatctttttgtgaggctaaattgttttgtaatgaaattaatcaytcattaatttgcctcttaaaatacagacttatttaaaatctagtgggttttcttaattggacggagagacattcttgtaattcataagaagttatttatcttctctccaaatgaaattattttaaaatttaaatttatttatgtcttgcttttctgcaaaggaattgaggtggcttcctacaaactacatttatttattcattcttttctataactatttatggaattattagacatttaaaataaaacattaaagtcaaatagaagtgaagaggcagggctgggcgtggtagcttatgcctgtaaccccagcactctgggaggctgaggcaggcaaatcgcttgagcccgggagttctagacaagcctgggcaacgtggtgaaacctcatctctacaaaaaaatacaagaattagccaggtatagtggtgcatgcctgtagtcccagtgcttgagaggctgagactggaggatctcttgagactgggaggtcgaggctgcggtgagccatgatcctgccactgcactccagcctgggtgacagagcaagatcctgtctcaaaaaaaaaaaaaaaaaaaaaaaagaatgaaaaaagaactgaagaggcaggaccaaggtaagataaaaccaagaaatggagaatgaaaaattcccaaacctaaatattgacctaataatgggattaaacacatgtaaacaccccattaggggaaaaagtgaaatrtgatcacttagacagttttgttatcttcgaggattaagaaacatttttattcatacatattcctctagaggtgagtaaaaaacaatttctcatattttataacagcaaatacagtagcttcctttctctgtgatctcacttctcatcagggtttagctgggtgggcaactttggatcttgagtctgtatccctttcctacattttcagatccatgttgagatttcaatgtaaatactcatacttttactaatagattcagcatcttccccagagaggtcatgtcctctgtgtattctcttaatcaacaaaccttgaagctttcatattgccttcatctttcctttccccacatatactaaattttgtacattctacttgagtagtgcctttgttctcgttggtgccctttcatttctgttgctgttgtcccagctcagagcttactttcctcttgcctgatttatcctaataacttatttaatagcatcagttcttccagtgtcaacccccaccttagtcattctaaatactcttgacagaattctcttaaagcactactctaatcgctccctttccctacacaatagaatcctaacttcttggcataactttaaaagcttttaatgatctggctaccaactacttcccagcataattttccatttcttttrtacatcataggtagccattctctgaaaccgkccttgtactttctctcctttgtgtcatcactcataccattccctccatctagaatgcttttgctccttctattcctcccatttcagttgaatccagcaaatctgtactgagtgtttgctacatgcctaargattgtaccaactactttggttccaaagatgagrataattatcctttccctcaaagatctcacagacttatgtagaagaattggtaaattgaagttgacatattgcttcctctataaagctttcctaattttcaagtttaaattaatttttctttttttcatatgcttttcttttttttaaataacactgacttgtacttttcaaatagaatgtgtgtatgttttaaatataaattatttcatatgccccattttattataagcttctatggcatcatgttatctgggtccttaggtctttaggcatgccacattataaytctcacatagtaggtgttcagtaattttttgcaaggttgtgtacctggtgaatgtgctgagatgacatagatcatgtaggtatcactgtcaaagcagtcacactcagttgtacttttagggtcttgctttaaaagctgcttttaggtcgtattttaaaagtttaggtgcacctaaggttccaacaaaggctaaatgtttttaaacttttaagtgacgtgtgtaaccacacatggagttcagcctttgaagtcagcaggaactccacacagcatgtagagaagatcctggaacacttaggaagggggtaggagtgtggcctttagggcagggctccctaaaggataaaggagctgaaggtcaggctttgaactgatttgaagaaaactwgtgtctatgttagaggtgattgcttttgaaatttgatataattctggctaatccattgtgaaaatggctactggttaagtagttgaggaatactgtgcttcctgtgcctctgtgattgctttatttcactaaaaatttgtattttaatatggctgttcgtgcttcaaacctcayatatttggaatatgaagtcacatctgcgctaggctccagtaggctgcatccctggtttatccagtccatgattcttctgctaatagccaagtggcattccatggggagatgcaggacacattgtttttctttcagatattaactctatgctaaggttagaggcacccaaactggtttttgtatatttatggtattgtcactcataaatttttccatacttcctttggatctacttttatttaaatatctctttgtggaataatgttttcatcatatttattatccactttggacatttttaatgggttccaaactcacatgactgagtgtcaaagaacatccccatcatcctagtatttggtatttgtgggttttacttcagtggtaccgttggtcatatatcacatatataggttctgtatttaccataacccaccatattttattcatcaaagatgtcacacacttaagatgtagcattattttatatacagctaagaaagaaaaagaaaatcattgttaattaaactaagatactttcttatcacttaacatttttgttttatagttaatggaaaatatcttgggttgtagaaagatttttatcatatgccactcttataggtatataaactataagatataaatgaaatacattggtaaattactctaaaaatttcttcacattgagtccaactctttatggatcttccttcagctcaaaattgttatctgtgtttttctacccagtgtcatcccccatgctactaagagtattggtggtgaagcatttcttaaaaggctgcttcttgcttgagtgagtgttattttctaagagacaggatctcttaggggtaatcagtttgggaattccttggtcaagccctgggtcctaccctccctgatgagggtgacaagaggtgtcctgcacacagctcctggcatgccaggcattcatcttctctgtggtctgctcaggccaagaggcagaaactgaactgccctcaaatacttggtacccagccaagtgatttttcctgttttcaaccttgacactgcaatctgcgsattgcgtgaataagtggaaattttcgagcaagaaatagcttcatgccagttctatttgaaatgttcaaaccacctatttaatggcatcttcacagccatgcataattgagttagagatgtcacaacttagacaatttttcaggcaggaagaaagaattggctctcttctaagttagtaccttctggcaactctggcttgttttatcaagcaaggatgagcctctctctatttaaaaacttaatttttgtgtaccctcttacaytgattgagcagttgtggtgtgagaaggaacaaagatgcttctggtgtcctttgtacaatttcttttttttttttgagacggagtctcgctttgtcacccaggctggagtgcagtggcgcaatcttggctcactgcaacatctgcctcccgggttcaagcrattctcctgcctcagcctcccaagtagctgggattacargcatgcgccaccacacccggctaattttgtacttttagtagagacagggtttctccatgttggtcaggctggtctcgacctcctgacctcaggtgatccgcctgcctcagcctcccaaagtgctgggattacaggcgttagccactgtgcctggcttgtacaatttcttaaactacaattgcagagctaattattcttgcatgtgcttttttaaggctgtgtacctaaacatcatgtggttggtttttttttggagaaaaccattttgtgaatgcttttggatacaaataattgctttccactctgaattaaggtatgtgaaaacacctggcacagagcccaggcactgtttcctttgccctccccatctggtgctgccctccccatgcctgaggagctgtgggctgcttgcttacagctcagccacataggatcttggaagagttcaaatttctccaagatctccagtgtgtgattttcactcttgctaagtgtgtctctccagcagcatttcctcataaggaaagaaggtagttatatctgtcagttacaattagctgtagaattgtgctgttttacccgagaaatcctcttctccagttatactaaccaagtttttcctgtactaatatccatatagaaacttaagctcttgacctgaatttttctggctgttcatttctcctttttccacttacttaattacaaatggattcgtgtcatgaagggtaatcattagttctcactgacatatgatgctgagttattgctggtaaaatatttcactgccctgccttattgttattgtttgaaaatgtaaagtaatgcttataggcaatcaatatctcatgctacctcaggacagaaattgaatcctgaccaatgactttcagtttaatttaaccttcatctagttaaaagtggagactgaaaacttttacatgaactcaagataatttttagattagggaagttctgatgattcctgtaattttaattacagtagctcatatctgaccctcagttttcttcactaatcatttgggttgtaaagctatagttaggctcattagacagagtgcagaagtgcagatatagtgtctaggaagatataaatgtccattgaagaactagccatggaagaactatccttgctcagggaagaactagccttaactaggtctggtggcttgcttcaggacctatttaaatactagcacgtttgctattacattttccattattctgaaaaaattattaaataacaatatccgtttgacatgaattgccttttatattccttactgatttaaagtaaaattggggtaacatatgatttttatagactctcactctgttctcattaagaaggcattactgaagataaattttaggtgggaccaattacagactaatgcagttatatagtcattgtgatctagctgargaccaggagtcttttaatcagttaaaaacctctgcagcctgggcgacagagtaagactccctccatctcaaaaacaaaaaaacaaacaaaacaaaacaaaacaaaaacaaacaaacaaacaaamaaaaaccctctgaagtctctcatgcactattctgtgttctgcaaaacgttggccctaattccctgaaataaaaagtgaggaaytgatcttcagtaagagtcttttgaatgcttattatgtgcctatcactttgcaaattagattatgtatcaaaaggaggtttagagtagttcttgagctcaaaattatattcttctgaggaaagatatgacacaaaacaataaaaaaacagcataaggctagaaaaataaaataaaatgcgaaactgaacacaatcaggtacccaaactgcctgtatttgtaatgtgaagtccaaagggraataatctgtgttgaaaggtagtacccaggaagagtttatgaaagaagtatcatttgagatgggccccagagtacgacagaatttgagaagacagagaaaaaggtggaagatgtgtctggagaaagaatggcatgaataaacacttgaagacatgagagattctgaaattttcagggaatagcttgggcagagggttgactaaagaggctaaagaggcaagatgtgctaaagaggcaagattccaaaagatctcaaatggtaaaaatcaaaagtttgcaatggacatcgtcagaaatattgggctrgagagggagatcaggaagggatcagtacatgttgtcgagaaataagtgacatgatgtgcaattatgtatgtgctcaccactctatactcaacgcccagagccccaggatacagagggtgttattttggcaactcaaattgacaggaagcattgctgtcagggacctgatttttcaaaacactaaacaattctttataaagttcccaacaaaacaaagtatagtcttctctcaatttacatgatagttgcatttccggaaaattcaatgcattgcctaaatctttggtgtttctggataaaacaggattaggatccagcccagataatttcacctacctgaatgtgcagcaaaagactgaaaaatcatgtaggatgtgggatcattgttcagtgcataggattctcgcaagaactgtaggatgtttaacattgctggtcctatgaacaccgtgaaacatcctcacaaattttttaattggtcaccttccccctagtaactattgctttatttctatattagtgaccatataagttacataccctaatttgccttttttggttaaaattttaattgttgctttatttgtttttacttgctaaatagaatatttaaaatgtattttctctggaatgttagattctgtgggtttaagaggtagtaaattatttctttattggttactatataagttacatatcctaatttctctttttctgttaaaattttagttgttgtcttgttttttttttttttgctaaatagaatattcaaagtgtattttctctagaaagatagattcagtgggttaagaggtagtaattttttttttttcaatttagccaacaattgctaagcctctaccgactgccagcctccatgcagacgagctatggccattgagctcacagagctagctgataacccatcaggaaaggaatgtgataaggkgtgtagggagaatttgagagatgacaaagcattgtagagggttgagggaagatcagggaaaatgacagagatcatcacatttgagttagtgcttaaagaataattttaacaggatttaagagtgtacttctttataacagaaagttgaatttgaaatgactctcaaatcctattcattatataggctttgcagtgaattaccaaatggtatattttgagatgaaaaagcttctttgttatctcccaccccaaratagtttttcctttttttttcctttttgcagttctccatcatttgttttttcatatttagatctggtcttcctaaagagtttatgaggatagaaactgtgccatatactttactggatctcctgtagtgctagrcatattggaccttagatattttcaaaataatgtacgtaggaatgaataagctattcttaggcgcaaattgtttgtttattctttttgtattagcatttcctaggaaagtgaagtcaggatgttagtaatgaggacaccaagaggatgtccccgctagtctctcggcatgctggccagaccctggttgtgctctgtctgagtccacagaatcacattgcttttctcctagtccctatctgtaggtaagagaaaatgtggaaagtcgatgtttgctctggaagttatagaaatttccactcagaaggtccttctttctgaagaaatktttktttttttttaattcaggtccaatttggacaagatactcttgctttttcgagtcagttgaagagcaagataacaggtgaaaagtatttcaagagtttagatcaaacttgataatatttgtaaaaacatgaactgtaaagtattacagaaattgttattcttttgttgttattaagattgaaggaggagcagaatcatcccataattactcctgggggtctgagtcttgtgtttgattagctttaactcacattttgttattgtagttatcagatggatttggatatttgtaagatataaaggtgtctattctttaagaagtcaagttgaatcatataagataaagagatcttgaagggagcttcactagctgtgaagttgtccaatctctataagtgacacatttctcatcagaaaaatgatctgtatttcccagggtgttgaagagttcctttagtgggtttgaagggtacagcatggtgcctgacctgtagtaggtggtccataaatgttagctataaaatattactattatttaaaaggttatttaaaaccctgaattcagcagacatttattgaacacctactgtgtgtcaggcactgttttaagagctagaaaaaagccataaagcaaacaaagattcctgtgcttgaggaactcaggttttaactggggagayggataagcaatacccaaagtaaataagtaaattatgtggcagattacaagattattagggccatggaccaaaggaaaggcaaagcagggtaagggggatcaggcatgtccaagaagaagaggtgagatttaagcaaggacttgagggaggtgacagcattaattgtgtctcatctcctcagtcaagagttgatgtttcaaatgrcaagataaatgactgtaaaaatgcctgatgttcttaactattagacttaaaccatacgaaaaactgtacgctttttcttttctcgttctccacgaagtaagaaaatactgtccctttctttttcccctcaatgacaataaaataagtatccctgatgatattatcaaatcctttttagaagctgtttcctttacttcctaatggatttagctctaatccaaaccagaagcacattttgagtcttttctgatatgacattattacagtgagtggtttctatttttcttctaagtgttgcttgaacacaggaaaggaatgtgagaagacctcttgccacagctgaagtatatattagagtacattatttagtaaacggtagacagttctttccttgaaactcatttgaacatttattgtaatgtgaactaagttttttcmattcctaattagagatggtagtttttctgtattttaaaattggatatcacatccatgtacatatatacaaacacacataaatttctcagatattaaaatgggatgtcactaatatgcatatatgtatatgcatctatatatacatatgtggatatgtgtagatatacacatatgcatagtttagttgattaggttaattatctcttaattaatttcttaattatttcaaagaattggggaaaccagcagtttttatagttaaatattccttgaaatgaaattaattgtggcattggtacaagtcaaaataattcagtgttttggtagtggtagtatctgtgatagtcttaggcttagatattgyagtgacaaagtatccagtggtagagttgatgaaattgtatttttatagacgtatttgaggctattatgcttttatcatcaaaatataatattcatatagttcattacatggcaaatgcacatgtatgattagtgagcctggattagtagccttgctactcttgtacttattcagccaccttaaaacataatgtcaacttttattttagatcagggggcatatatgcacgtttgttacatgggtagattgcatgatgctgaggtttggagtatgaattatcctgtcaccccggtagtgaacatagtacccatagtatccagtaggtagtttttcagcccttctcccttcctttacttccccatctagtagcccccagtggctattgtcmtctttatgttcatgagtacccaatgtttagctcccacttataagtgggaacgtgcagtatttggtttgctgttcctgtgttaattcacttaggataatggcctccagctctgtccatgttgctgcaaaggacaygattttgttctttttatggctgcatagtattccatggtgtgtagctatcatgttttctttatccaatttactgttgatgggcacccaggttgattccatgtctttgttactgtgaacagtgctgcgatgaacatatgagtgcatgtgtctttttggtagagcaatttattttcctttgggtatatgcccagtaatgggattgctgggccgaatggtagttctgttttaagttctttgagaaatatccaaactgctttccacagtggctgaactaatttacattcccaccaacagtgtataagccttccctttcctctgcagkcttgccagcatcttattcagccacttctagagttcattattactttgtctgaattgtttgtaccaaagttacttaaaaagccagtattatttcattgaactcattgtgctgttgtacctttttttctttgtctttttaagatgagttggaatatagtatgtaaaaatgacacataagttagatttggcatctgaaggagtaaaccaaatatttactggcaatagagtgtgccatagcatttgagagcattggaatgagcctgaatacctgggttcaaatctcaccttgccacttaytacctggacaaccttggggaagttaattagccttctaggctttactttcctcatctgcgaaattataaaaatagtagtacctaccttactgcattgttttaagaattaagtgagttgctatttgtaaagcacttagtacagtgtttattaaatagatataaataaataccccagcaagtctaaaaaaagagttrtctctcttttttttttttttttgagatggagtatcgttctgtcgccaggctggagtgcagtggtgcgatctgggctcactgcagcctccgcctcctgggttcaagtgattcttgtgcctcagcctcccaagtaactgggactacaggcgcgtgccaccatgcccagctaatttttgtatttttagtagagacggagttttaccatgttgtccaggatggtctcgatctcttgaccttgtgatcckcccccctcggcctcgcaaagtcctgggattacaggcgtgagccactgcgcctggccaaaaagagttatcttttaaagatacgtacttacatctttattgatgaaatgatgggatgtcttagatttgtttgaaagtaatctggtcagagagtgggacatgaagtggtgagacagtaggtggatcaagatggctcatgggctgataaccattgaagtggaatataggatttattatactactaggcctactttatgtaagcttgaaattttccaaataaaaagtcaaaacaaaaaaaggacagttcacttcttccaatgttctttccttttttttcttttctttttctcccctaaatctggcatatcattcctgtcttttggggtatagttcaaatgctacctgttgtgaagcctccttgataaccccagccacatctcatctcttctcttctgactcatgcagccccctggactcttcttgagcacctatacatgttgtggctttgtatttattcctgagtgtcttttccttcttccaggctaacctccaagtggattaggatcatgttagtgacttccagggcagataccttkctcacagtaggtgcccatcaaacctttgttgaaaaaatgacatttattgactataatctagaaagagcaaaagcaattattttgtgtgtcacaattactactaaagtactgtgtttggggatgaaaggttgttattcgaattttttagtggtagtttgaaataggaatacctgtggctttatattaaaatgtttttgctatttgggggcatttctttttattcttttcaargacttcatttaggaagttaatgttgttccaggcgattagcaaagttacaaatatgtccttctaattctggcatgttgagaatctgaacatgtgaaatacttgtgttctattttatggttatggaaagtaagatttttttcatctgtgggcccamattattttttctatttactgacttaaatgatgcagagaagagtctagtatgaaactggaaaaagttaacaatgaaaacctaaatcacagaactttgttttgctttaggatacgtcctgaaaccatgggaataaattataattttagccatcctcccctccctcataacatagataagcttttctttaggcatgttcttaaaacaccatatgtaaaacacctgttggtaagttaaagaatattttaaacccaaggattttatatctattaaacatattcttaaatgaaatgattttataaagcaaagactattttagagcaaagaattctccttaacctctcatttaaatgttttgcaagtttgcttgtttatcagttgaacttatctaaggtgaatacttcattcattttagtctcttctccacaacaaatcatttttgttgaacttcgatggaagtcaagtagtgaaattgggctaccttgagtttcacttcggcctcctttctatttccatcctcaatggaggtgctaattataagtgaaatagtttaaaactgatactaagagcaaaaagtgccaaagaacataggtaatctataaactaaataatcaaattcaagaatggggttataytgcctgaaggcattattgccatgactttctcacttgcaatggagagttaaaaaaaaactctgcttttgatttttctccacttgctgctctgttaccaccccagtggcatgttctcattaacccaattccttgacctttggctattacactgaagaattcaaattcacaagatgtgaattgcctcattcatatctacaaggtttgaatcgtggttaagacttagaccgggtgtctgattatgaacaggctgtaagtgagagtgggtgttcctttgtgaagatctgtacttgctcagctgtattgcttcgttgactcatttagagtttctatagtacttaggacaatgattctcagcacagtcattgtggcctatcatgctatctttggctgacaaaagtgattctgagataatttaaaagtaaagtaaaatttttatttaaaaatataacacatgaaataatttaagaaaaatgaaagagtaggtattaaagayaagacttccaactccccaaaagtaaaattactaacagcttgcagaagctttaatgaaattatttttaacacagattgaaaaaaaccatgtgagatcatttttctctatagatcataattccttggggatagggaccttgtttcctattctgttgtatctctccatggcagttaataaggtactttgtacaaattgaagagacagaaaatattaaaattcctttctttttttttttttagaaatttggaaaacctcaaatctgttgagaaattggatttttggaaatttattcataaaaaattattgtagctgaaacttacctctctcagataccaagcatgtttctgtagaaggatctgctggactacctctgtttccctcatgaattggagagatttgtgttaagtgacagagagaaagcaagccctaatctattcccttctttttctgcatgggcgtgaactcagattgtttgatttgctacccagtggagagccaggtggccataactttattttcttttatatcatatttttatgtgaaaagrcataccattagtacccttaaggaataatcatatcgttttaatccctagtggtacttgggtactgttgggaccttcatcaagcagattccaactacttcaatgaatgtatttctgacttttcaggctcaagctttcttttttttttaatatatgaaacaaaagtatatgaacaaatggaaataaccagtgggaatgaatgatccatctgattagatcctttgtcattgtgggaaattattacattattccaacytgtagaaatttcctaaaatccccacatggagtcccctatsttttctgtcagagtgtatgtagttatgcaagtgcacttaattttatggaacatcctcatgattcaatctgctgctcccaaatcaaaactaatatgcttttggcttatgtactagtttgaatcatttatattattctgctcacactcagtaaaactaacatatcttcagggtctgccatatgaaaggtgctgttttagttgttcaaagaagcaagggctggaagaagttagactgttcttcctttgctattgctttcaaatatcaaatcatcacaagtttgagtgaaaaataatttaatgtattgagtagctatgttttaaaagtctagggttctttttgttgttgctcagagagaagaattaaagattatatgatgtactttgattagtgctgtctactgaaaatccacaccactttacattattttgaatgtttgaaagcatgaaagtgttcacagttgaatgtttccaagtagttgtcttaatattttatcacttagaagtcagttacagataatggaaataattctaactatttaagaaaaaaatagaataataaaaacaaaagcatttaccataaggaattaggtgcttactaatctaatcattggactctagactgggcctctaagaatggcttccagaaaggcacagtggactgcgtgccaggggcattgcttccattattactcctaggaagctaggaactaaaaaagcctgcatgtcaactgctggtttcaaatcacascaccctagccacaaccaggagtcacgaagcaactgttgtcttctgggatattctactttagctgtgattcagggatcagactgctaccagcattgttagcttcagagctgtctgctgcctgttagatttgcacaagcaagacaaaaccttgggtgcttcttctcttccgcttaactctgaattcaagttttatggaagtggcgctcatggtgaaacccaaattggaattcaagtcttatggaagtgcatcttaatggtgaaacctaaattgtgttgagaatgctagttacaagggagtctgggaaatgaggtttttagttttctggcatctgcagtgtaagaaggcaaayatggagattggaacagaagttgagctggccaatgtgctgtatcagccacagatgcttttgtgttatttcctgtgatggctagaaaacaaacttagaatctggctgattgagtaaggaaacaattttcagatgtaaaccttgtatattacagtctccaagtagatttttaaaatatatttttttgtttgcattatctgagaatccagaagagcatccagtaatcagtaattacatagtcagatgtgccaggtggaatgattcaggtatctctatgtatttgtagcttgaatcctgtatgtcttctgtttagaacttagccatcttttgaaattaagcttttttccactggtgattatgctagtgcatttaattgggattattttttggcacagcgatcattaattagagcaaatggagcataagcaacgttagttgaataaataatgaatttaaagmgtctatraaggttaaatagcatactctggaatgttctatgaagtaatttttcctttccatgctacatactgtcaagataactagtctaacccaaggttagatagaaaacaatatgtagagtgtttcctgcaatattttcatgaaaaatatatgtgtaaaaatgtctaggatggtctaagagaaaatatttatattgattactgtgaattagaatagwttttttggtttgtttatattaaaaacatttaatcccatgagcacatcatcttatcagaaaatgattccaaaaagttcttctgtgagttttatcaaccaggagttctattcaaaatacataggcagaataaatagtaaagtaaaaaaaaaacctatgtgtcttttatttctctgctaactttgaatgggtacatgtgatagactttaattattttgtggctaatttattggaaattgttttttggttgggaatacaatgtcttttgttgatatctccccaagtctcaggtcataatcataaattatttattttattgaaggcagttatgataccatcttgtcacttttcctaataattgtataataataagttgtattcacattatattgatctatttactttttcagttaattccgtatgaaacatttgtttactaagatatcaaatcaaccacaaattaccattcrtagataaaatggaattaattcttaatgatgtggcctttttaggacatagttaaaattctttaattttgtgattatgttatttagtatacattaagtataatgtagaatatacttatgatattggcccttctttcaggaaattaaaatttaaggaaatgggcaatgtatgatgctatttaattatgaaaattctcctgtgacgttttgtcttttcatgttaggcctaagcagagggcctaaagggtgtggttgtcagttacacttgggaaaatttataggagtgggaaattctcaaatgagatcataggggtctccaggcagagggccaggctgagccacaagcagctccatagagccagggtcagggagctggagagtcaggatgaaggtcatgggtaaaatataattctgggcattctgctgaaatggcagacctctcggtacagtatagatatgcaaatgctaacacccagagtgtctgactttgatgtgctgccaagcacctttggcctccagtgggtgctgactgaattggagagattccagattcagcaaagatgtctgttagcagaggaacaggattaatgaagggatttgtccctctcttacctcagtttacttaaggagagggttttattaattggcgtgaaaacgttgcataacattttaggaactaaatcctagaatttcttttaaaatagtacatttacaataattatcaaagattttttctttaaaattattttttcagatctagagttattttaactttattttgaaataatttcaaacttgtagaagagttgcaagaagagtattaaaaccctcttgtggccgggcatggtggctcacacctgtaatcccagcactttrggaggccgaggtgggcggatcacctgaggtcaggagttcgagaccagcctcaacatggagaaaccccatctctactaaaaatacaaaattagctgggcgtggtggtgcatgcctgtaatcccagctactcaggaggctgaggcaggagaattgcttgaacctgggaggcggaggttgcggtgagccgagatcgcgccattgcactccagtctgggcaacaagagcgaaactccgtctcaaaaaaaaaaaaaaagcccttttgcataacaactatgaatgctttgccacatttgctttatctcgttttgtctctgtctctctctatacacacacacacacacacacacacacacacgcaccatttaagagttaatggtcaatatcacacccctttactcctaaacatttcagcatgtatttcttaagaacaaggacattctcttatataaccacatagatatacagcccatattcaaaatttgcctattatcccaataatattttttagagcatatttcctcttggccaaataagtcatgactacatattacctttagttgtcatgtcttttaaatttttaatctggaataatctcgtaactccattttctttcatgacattgatatttttgaagggtatatgccacttgttttatagaccaatcctttattttgatttgtctgattcaatattttttatcaatgactttatactttaatttgaaaaacatggaaatatataaggaagaaaacattcacccttgatcctgctgtccaaggatacttctgacatttagacatacttccatttttcctatgactcataaaatcagttacaaaattgaacatacagaataatcccatattttatacatattaatacgtataaaatatgtatagtgtatacatattaatatgtataaaaatatgggattattctgtatgttcaattttgtatctgattttatgagtatttttccatctcattaaatgctctttgaaagcatattttcctggctccctaatgttctttattacagttacactatcatttatgtaaatactctcttatcattggatatttaaattgtttctatttttcttattacaaaaacactgtgactgcatgcagtggctcacctgtataatccctgatagtcaggaggctgaggtggaaggatcatttaatgctagrggtttgagattagcctggacaacagagtgagactccatctctaaaaaaacaaaaaaggaccacacacacacacacacacacacacacacacacacacacacacacmcygtcagaatgaataccatcaatctataaactgcatttgattcctctttttcttttttctttctttttttttttgagatggagtctcactctgttgctaaggctggagtgtaatagcgcgatctcggctcactgcaacttccgcctcccgggttcaagtgattctcctgccacagcctcctgagtagctgagattacaggcacacaccaccacacctggctaatttttgtatttttagtagagacagggttttaccatgttggtcaggctggtctcgaactcctcaccttgtgatctgccctcctcggcctcccaaagtgctgggattacaggcatgagccaccgcacccagcccctgattcctctttttcctaaaattacttaagcacatgtatattaaacaaatgacttttcatagtggacttactcataaaccagtaattaaagtcttgatgtgtgcagaaatgcaaaacatttcccagtctgatttttggggcctctctcttataagggtttgctttcccataatgtatcgtctgctcagtgtgcttgccacactatctgtggtgacaatgtattgtcattctcttggtctgactgctgggagatcacagggagctgagtgccgctgagttaaacagatgttcagcatggctgcatcttcaaagtyttgtctggttccagccctgacgaaacttctagggccctgagagaaagagaaagtttctagttkaagtaatatcctatagtttgttagtggaaacagaagcacgtggtttctgatttggttctggtgttctctttggagatttgtatcagtgatgaaaaaaaggaaaggttggttaagtctgttgcctcctgaagtggttctttttatcagaataaagactaggyatcatctcctctatgaactttttcctgacactcctgttcatcttccatgctggacccattaggattaatcaccttctcctttgagttacccatatatgttatctttaggtctgctacagccttcgcactgtcttacaactaattgtatataagtctagcttccctatgaggcactgggttttatatgcattagatccatttgccctgcaataagccaccccaaaacttagtggcttagaacaatagccattaatttagctcatgattctgtggaatcagcaggttggtctgggctcagtagggctcagctgctttctgatgggactcactcatatggttggctgggggctggctgattgatgactgggatacctcacttattctcttgtggtttcccatccttcaacgggctagttcagacttgttcacatgatgtcaacagggttcccaaaagcatcaacagagcatatcctttaatgtacaagaactttcaaatttctgcttctgatacatttgcttctgtcccactgtccagaacaagtcacatggctaagcccagagttattgtgtgagagcactacaaaagggtgtgaatacagggatgtgtgagcaaatggggcattactgcaatcagtccactacatgttccttgatgtcagggttacatctcaaccatcttttcatctctagatcctatcatgttgcttggcacaaggtagttgcttggggaatggtgaattgatctatayagttatctagtccgtttagcatcccctcaaacttgggtaaactccagggcacaaggagggcattaggcaatgttcttagatgctgagctttaagggagtttttgcagctggcttttgatgaggaaagtctatggagagaaaatgggtatggcacttggtaaaaaaaaatcgggagattgttttacggaaaaataaaatttcttacctcctaagcaaaacatcaaaacaycaaaattttattttttacggaaaagtaaaattttttacctcctaagcaaaacatcaaaacatacatacttatgttgtacttttatttttctttcaaagaatgttcctcatgttaatttaatctggctttattttgtgaataactagggagagagtacatagccatgtttgacctgggccccatattctcagagtcaaggcctctgaaaaattttttgaaagtttgaataaccaggaatagaatcatccttaaacctatgtgatgcgggctgctttcttaggcctaaaattttagagggccttgctgttttttctggcgttgcctatccccatcttgctagtattggggtgtcaaagatgtgacaggggatatgcccacctagagcttgaacccttctaccttctaacccatgtagcaggaaactgggactctaaaattctctgcctaaatgggctcaagctgctttcaggacctgtgtgggctcctttgcttttctcctaaaggcagactctaccagtgtataccctttctaggcccaaggggtggccaagggtagctgtttgcacagtgagggttagggggtggatagatcttggactttggtttggggtgcttataaccttgctttggagacccctgagggtacaggatgaaactgagagtaggatgagatgttgacgggccttaggctagggaccactttgaccggactgtcaagattgggggtggcctgattagggatctcataaggctgttgacaggagtggaatcttccatgggagcaatagtcagatttgtctcaacttaaattytgggaattttgctaaaataagaatggcttctgagatataatgagctaaacctgaaatgttggttcttgtaaatacatggyaaaggcgtgagattagaatttctcttttaggaaacctgtcaaattgttaagctccttttcctcttttatttgtgatctaagtgatttgtctatacagcctcacagatagtagatccagtcagtaccaagtacatgtgactttagcgtttgtctataaatcagatggccacttaatgggtatataatagaagggatggtaatagaggttcatactgaggcatttaaaattgttttaagaagattcagagagggaaagtttgaggcaaagggaacacaaaaaacaaggggatactggtatcactgtggctggaacaaattttaatgatgcttttctggttcccacttccccaacccattttttttttaaagaatctatggccaatcactgcttgcttgaaaaattgcctttgttatttacattatgcttttaggaattttagaatgatatgagagtctgtaatagaagagtgagaatcaaagcttattgtttccaggctatggcttgaatttgaaataagaaaggcaaaaatacaagttttaatctttctaacctgaagattaggttaagaagtcattagtagtgaacaagtgtctagtaatttcatttataaggcatttgattaatgactacactataaacattatttccaatgcacacagctctcttaaagccaactttttttttgtgagttggcacagatttgtcatcgtttctggtttaatgttttgaaagagtcattatacaattccttagaagaaagttatttccctttggttatagtaaaattgtattttaatgtgatgtgatttgataataacgtaaaatcgtcaaatacaagggcaggagaaggtagatttattaggtaattgaattactagagatgctattgctgtgagagaaaacycaattacctgtgggctgtggacaaagagcttcctatttcctgatggggatctaaaattgattagcttcaggcttgtagaagtcttctgctattattaatagaatcaagaattatagaaatagaggaattttagaaatcatctaatctactatcctcactttaaaagtaaggatattgaggtgaaaggtcccatgtccaaggccacactgcagtcagtgactggggccagaacccaagactgttcccctgaactagggactgttacttcgaaatacagacaatatctgttcttggtccatagagtatatattttgagggcagggtctttcttaaaaaatgtcttctgtatactatttaaaagattttccatagttttcatggatgcataaactataaagccaaattmttggcctgtttataagttctttggtttgactttgttattgccagggtatctcagtgtagcaaaataactccattctttatrgatctttttctgatgatttatgggaaacttaagataaacctttaattaatttatttttttttgtttactttgttgactggataaaattctttcacgtggttcaaaaaaatctctgctgtattttaacatttctttgataatctctaaacacttttgtgtaacttaaatatgtgtcaatgtatatgcatatctgtagatttgagaaaatctggggatttatttaattcattattaatttattgtaatcaagttggtaaattattttaaggcatcatctaatatgttttttttccactgtctttttttttctcaatagggatgaatgggaccttcaggatgtatgtaaaacaatccttataggtgaaaatctaattgatttttgaaagtcaaaaaggattttgattctattatgttctctgaaacctgtcttgtatttgaatacccatatggtcaaacagttcttggttatatcctactgaagctttcttcttttttttttttagtytttttttttcttctattctcttatagttagaaatcagcatgttttgacaattatatattaagaatctaggagttaagtaacagaaatttttctttatcattagaaaaatcatttgcttgtgaagtgtgaaaaaagggtaatgttatatttgtagtagagttttgaagccagatctcaaggctatacagttaaaggatagtggagctgggaataaaaccaaggtcaaatgaaattcattctcacttagagtagggggggaataatgtcatttccccagagaacatactctgtagctattagaaacatttaaaagaatttttaatatggattataaaactggcatagatttaaaaataatagcatcctaatgtcaactgggagtgtaattctgcagtatagaggaaaggatgcagaaataggtctcaatctccatttgcttggcctcctgacctcgagtaaataatttaactgttttcagtctcgggatgataatacctgtttttctaaacttctaaggttattatgagggtcaaatatgataatacaacagtgctgtgtggatgtgttagcatgaagccagagcatctgatgcattcttgttttatcttgccagcagtggtgtcatctctttgaaggtggacaaagcagtggggagaattgcaattctatatcttgaaataactaacaaagatatcttggtcataaggtcttaaagaaattctgggaaaaggtgaccatataagagtttataatatcaaagcaaggcagcattgggtatcatttttttaaaagtagattttaagaagcttagaaacaaagtagatattttagaagggattgtgactcatgaggatggtacrtaagaagaaaatgaaattctgattatttacttacgaatgattttttggtttctttttgagacagggcctctctctstctctcactcaggctggattgcagtggtgcaatcacggcacactgtagcctcaacctgcctggctcaagtgatcctctcacctcagcctcctgagtagctggggccacaggcatggaccaccatgcccggctaatttttttgtttttgtagagacagggtcttgctatgttgcctgggttggtctgcaactcctaggctcaagcaatcctcccaccatggcctcccaaagttctgagattacacgtgtgagccactgtgcttggccgtgaatttaaataggagagagaggcgtatggacaaggtgatttattaaaaataaaacaaaacaaaacgacaacaacaaaaaaccatggactatatttatatattctctagccataaagtatgtgaataatattaaaaaaatcaaggtaggggcatatacgaaggaaaaatacataagtggcttttaattaaaatggagctggtgactttccagtagtagaattggctttaattaaactatgcatttaacagaacatacttcaaagttaaaagaatgtctactagctactccctcactcttgacagaaagaatttgcatgaaggtttaggtatgatagcgtcagagaggctaaaactgagaattggccaaagtttttgaaaaggttaaggcaaaamcaaaaacaaaaatgggttaaagacaggagaaagaattttttttgttgtttatctagaagtcggaagagagaaagccattgattagggaagatggaaaaggctctttaaagctattctttaccrgaaatgtattagcagagaccgactgaacagtcatctgggataattgcagaaggtgaaagttgggctttaagtatctttatttcacccattaatatttaatacatatagtatagctgacatgcttacatggacatctaggtgtgttgtagctgtcctgatttgagtttaagcttcattttgtgttgctctcaccaagatttaccagccatattttacagatttgtagtgatatcaagtgctgagaactaggataagaggaaaattcgaagagaaaaactacaagtatatccgcctttattctccgaaccatttctcattatttagagtatgatgaatgaatcaaacaatgatcttgggtatagttcttcagatatctgttctcaaacagtgtgggatctaccaattagaatgctaattgggaactaaaaataatattcatagtaaatctgctttctggttttattttaagacttggctttttaaagttttctccatccttgtttggaagtactcattctgtgaatttatatagaagtagcatttctggccaagcagaaaaaccaactagttggttcattttcctagaaaactaccagatgcyttcctagagataaagcataaccgagtttatttaaaattgagttggtgacttccttgtgtaaaactgactttaaaatatgcatttaacaaaccatatttcaaagttctaactagctacttactccctgactcactgaatgaaaaagtattcatataaagttttaggtgtcagttgaattaacttataaccaacttccactgggaaaagatatcattaagttgtttttttttgttgatactgttcctgaaaaatgtatttgagaattataaaggtggcatagtttatgttagaatactactaataataaccttcaattctgtgtgtatggggcatgggaaatatgtatacgtctatttaggaggattatttttgtgatgattattagagaccaatcacagcagcaaaaaacaaaacaaacaaacaaagaaccaaacaaaaacagttatgcatcctgaatgaaaggtaaaaataatactggacatggtttcttgaactcctggcctcaagtaatcctcccaccttggcctcccaaagcactgggattacagatgtgagccactggcacccaactgggacatagtttctaaaagtcactccacatggctattgaaaagtcttgtcttaaaaatagttggtttctgaaaatcttctcatataattgacttcatattgttttgcaactaaattgtgctggaaggacccatagtctacctgagagaggaagagcatcaaagtgaaaaggctgcaatgaccaatacagtctcctatataargaaggtgaaggaggcaggtgatgcaaattacggcattagagatggggctgcaggtatagatttggcagtcgtcctatacagtaaacatcacagctttttccaaattwtttttttcaaatgaacgttttctttaagaagagttttagattaatagaaaaaattacatgggcaagtgctaaaaaaaaaaaacagaaaaattacaaagagtacccatatatgccacacttgtttttgcatttattaatatcttacattagtatggtatgtttgttgcaattaatgaaccactacttttacaatattattaattaaaatccatattttatycagatttttgttgtttttagcctrcttgcctttttctatccaggatcatatccaggataccacattacatttcatcatcatgtctctaggctcttcttagatgtgacaatttctcagactttatttcttatgaccttgacagttttgaggagtactcattaggtattttataaaatacctcttaattgagatttctctgatgtttttctcacggagttatgtgtttttgggagaaagatcacagagggaaattaccatcttatcacatcatatcaaaggagcatactgttagtkacttagcactgttgatgttgtccatcatcacctggctctggttatggttgtcaggctttccctttctatcctgtattctttgtaaggaagtcactgtgcataacccacacttaaggagtggggagttaygctccatctccagagagtgtattgtattatctacataaattatttggaactcatctgcrtgggagttttgtctattattctccatttgtttatttattcaataatttatatcagtatggactcatgaatagtttatactttaggttataatccaatgctactttatttatttatttgctcaaactgttcccgtgggagctctttcagttggttctatgtccgtttgacatagtctcgtaattgtgtgtgtgtgcgtgtgtgtgtgtctatgtgttttgaatacttcctaattttctgtcactacaagatgctcctggatcatcatctatatatcctcccccagttctataattgactatttttccaaggagccctggttcttttgtttggaaatggtgttagaaaccaaaatctaggcactaggtgtactcattgttattggattgtagctgcttttaggctctctcagctgacagagcaagggaatgtatttgcatataccaacctgtgtatatacacatatctacaaatatttctgtatgtaatcatctgtatctatgttaagctaaatatgagtttagactgatgtctccaattctaattcatcaccacatggataattctagcctcctcctcttgcttacctataacttcccattctaacagtcagaaacttggttgccatccatccacttaattgttcatttatgtatacatgtataacagtatcagaattaactggtatccccagaggcaagaactttatcaactacagcagcagttcccagcctttttggcaccaggggctggttttgtggaagacaatttttctatggctggctctggcagggagtgttttgggatgaaactgcccatgtgtcacttagttgacctaaggcgcatgcaacctagatcccttgcataagcagttcatgatagggtttacactgttatgagaatctattgccaccactgatcagacaggaagcggagctcaggtggtaatgctgttgcccacgggtcacctcctgctgtgcggcccagttcctaacaggccatggataggtgttggyctgtggcgcaagagttggggacccctgaactagagtacagtggttatgtgtggttccttttccctttagtcttgcagactccactcatttccaaagttacttaggtcaactaccctctccccttaccccttcagtgaggttgtttcatacatttgcaatagagttagaytgtctgttttgtcacattctgcattctattctgggatcctttgatgtccttaattatttttgtttaaattgcatggactaaggtttactttttgtgctgtaaagtttcataggttttgacaatgccttgtgccatgtatttgccaatacatactaagatagtttgagctatttaattttatattattatattgtattattttatgttatttactagtacaatgcattgtcaaaaccyataaagtaaggttttgaaatagwccaaactattttcaattatttaatatttgactttttttttttgtcttttgrgacagggtctcactctttcacccaggctggagtgcagtggcttgatcacagttcactgcagccttgatttcctgagctcaagcaatccttccacctcagcctcccaartaactaggaccacagatgcacaccaacacaccgaactaattaaacaatttttttgtagagatgaggtctcattatatcacccaggttggtctcaaactcctgggctcaagtgatcctcctgccttggcttcccaaagtgctgggattacaggcatgagccactgtgcccagccttgaccactttttttggaccggcaattttgagtggttcaatccaatataagttgaaatttaagccaatctattatttacatgcagttacatgaaatagctaaaacttttgagtaagtattgttatcataaagatatctcataatcttaactacatagttatatatatatattttttctcctgcctcagcctcctgagtagttgggattataggcacgcactgccacaccagacnnnnnnnnnnnnnnnnnnnnnnnnnnnnnnnnnnnnnnnnnnnnnnnnnnnnnnnnnnnnnnnnnnnnnnnnnnnnnnnnnnnnnnnnnnnnnnnnnnnnacctcatgatctgcccacctcggcctcccaaagtgctgggattacaggcgtgagccacagcgcctggcccaatttttgtatttttaatagagccggggttttaccatgttggccaggctggtctggagctcctgatctcaagtgacccgcccaccttggcctcccaaagtgctgggattacaggcacgagccaccacacctggcccccacctttcctgtctgtgattcctcccactgtccttgagcagggaaagttgtgaaaagacagtcaggatcttctttgccactggaaaaccggaaagctctggtctttcctcaaaagctatttgctttatttttacttattttattttattttatttatttttttgatacagaatctctctgtgtctcccaggctggagtgcagtggcatgatctcggctcactgcaacctccacttcccaggttgatgcaattctcctgcctcagcctcctgagtagctgggattacaggtgcccaccaccatgcctggctaatttgtttgtattgattgattaatttttattatgcttaaagttctagggtacatgtgcacaatgtgcaggtttgttacataggtatrcatgtgccatgttggtttgttgcacccatcaactcgtcatttacattaggtatttctcctaatgctatccctctcccagcccccgactcccccagcaggccctggtgtatgatgttcccygccctgtgtccaagtgttctcgttgttcaatttcccacctatgagtgagaacatgcagtgtttggttttctgtccttgtgatagttttctgagaatgatggtttccagcttcatccattctgcccttgtgatagttttctgagaatgatggtttccagctttatctatgtgcctgcaaaggacatgaactcatcrttttatatggctgcatagtattccatcgtgtatatgtgccacattttcttaatccagtctatcattgatggacatttgggttggttccaagtctttgctattgtgaatagtgctgcaataaayatacgtgtgcatgtgtctttatagtagtatgatttataatcctttgggtatatacccagtaatgggatcactgggtgaaatggcatttctagttctagatccttgaggaattgcccactgtcttccacagtggttgaactaatgtacactcccaccaacagtgtaaaagtgttcctctttctccacattctctccagcatctgttgtttcctgactttttaatgattgccattctaactggtgtgagatggtatctcattgtggttttgatttgcatttctctgatgactagtgatgatgagcatttattcatgtgtctgttggctgcataaatgtcttcttttgagaagtgtctgttcatatcctttgcccactttttgatgggattttttgatttttttcttgtaaatttgtttaagttctttgtagattctggatattagccctttgtcagatgggtagattgcaaaatttttctcccattttgtaggttgcctgttcactctgatggtagtttcttttgctgtgcagaagctctttagtttaattagatcccatttgtcaattttggcttttgttgccattgcttttggtgttttagtcatgaagtccttgcccatgcctatgtyctgaatggtattgcctaggttttcttctagggtttttatggttttaggtctaacatttaagtctttaatccatcttgaattaatttttgtataagatgtaaggaagggatccagtttcagctttctacatatggctagccagttttcccagcaccatttattaaatagggaatcctttccccatttcttgtttttgtcaggtttgtcaaagatcagatggttgtagatgggtggtgttatttctgaggcctctgttctgttccattgatctatakctctgttttggtaccagtaccatgctgttttggttaccgtagccttgtagtatagtttgaagtcaggtagcgtgatgcctccaactttgttctttttgcttaggattgtcttggcaatgcgggctcctttttggttccatatgaactttaaagtagttttttccaattctgtgaaggaagtcattggtagcttgatggggatggcattgaatctataaattaccttgggcagtatggccattttcacaatattgattcttcctatccatgagcatggaatgttcttccatttgtttgtgtcctcttttatttcattgagcagtggtttgtagttctccttgaagaggtccttcacattccttgtaagttggattcctgggtattttattctctttgaagcaattgtgaatgggagttcactcatgatttggctctctgtttgtctattattggtgtataggaatgcttgtgatttttgcacatcgattttgtatattttgtatcctgagactttgctgaagttgcttatcagcttaaggagattttgggctgacacgatggggttttctaaatatacaatcatgtcatctgtaagcagggacaatttgacttcctcttttcctaattgaataccctttatttctttctcttgcctgatagccctggccagaacttccaacacttacatagttatatttttatttagttagtaaataaactatgacaaaacacttgcaatttttttctgataaaatagtcatgttaaatggttatattccttcatcctctccaaatatgtacgctttcaaagaagagtagatactaattcgaatatatcctacccagtgtgaggattttaggcagagttaacaatgaattaaaaacttttaggcagtgtggggaaattttgctttctaaagggaaaaatttgctcccttaattgttctttacatactactgcttctctcatttcattttctgaaagatttaagtcttttggaccatcttaaagtgatcccaagccacatcttctacatgaaacagggttatatttcttcattcaacacwtatatatatatattttttagcatcttcttcatgtgtaacattgcgttaggggcagaattccaaattgtagatcagccaccttctgggtagctaaaatgcacttggaagcagtggcttccagactgctgaatttcacgaatcagttttaaaaaatggcaattagtgtagagttgccacctttttatttttgtcaaatcaggtcatagcaaatgaacaccaaacaaagttttcactaggttggatttgttttgctccttccaaatgtctaatttaaaatttatactatgtacttttttctaattagaatattttacatatttttccctattccatttttatttgaagtggattattcttaaactcttcagctattatcctctactccacaaatgtcaaggatagacctttaatgagtagaacagatgtcagggatttgacagtagtgaataatcatgtctatctcttgtcaatcttttgattttaagtgagggaaatgctgtggagaattgtttcttttgttgaaaacctagattagtacatgctatgccatagtgaatgcttaatgaatacatgccaaataaataaaaaaaagaatcttcccaaattcttattcattgacatgaagatataaaatctagcatgttgataacattgaactttcttaaataattctataacaaattctcttctttttgtatggatttttcatacaatctgtgttaacatttgcttgtgaaatcaattagaccaactagaaaaatacagttaaatgtttaaattacttttgatcaaatggcttttgtttgataaatgctatcaaaaaggactaatcaagtttctaggtctgcggttcatttttttttttgactaatacttgtatttgtacagaaccttttctttggagtttattactcttgtctataacattttcaggatttaattaggagagggattttcctattcaggatatgtataggtcagattatgatgctgtggcatgtagaccataccttagaattgtgttgtatttggcaagaacttcatttacttttaacaatctggcattttctacattttatggatggaaataataaaaatgggatctttgccctaattggccagtggtaaaatttaaccttggttttcatggtcttagactttttcttaataagaaatttgtttaaaattagtacatttcttattaccattttcattttgaacctaatttcacaagtaagcatttttactgagcatccagtatgtccctttgctgacctagtgattctacaagtcctataccatttgtaagaatcaacaagactgatacaataaaatttattttaaatcttcaggatacagatacaagtgawtatatttatgaagatttagagatttataaaatttaatcgagagattatttcatttttaaaacctattttttcttcttattaaagaaaatacatgttcattaaaggatattttaaaaacagataaaactaaaagaaaataaaaatcacctataatccagttacttggaaattagccacttttaacattcggtacagatttatcttatgctatattgtattatactgttatatgatttaaaagtgtgtgtgtatatacatatatatatatatakagagagagagagaaatcatattgtacatttgggcttgttagctttctttttcacttaatagtagagagtgaattttttttttcatatttactattctgktacctcattcttaatgattacttagtctacagtgggtgataaatcctctctttttggatgtttatattatttctgataacaatttcattttaactgttgttagttctacaggaggttatgcatttgactttttacaagaaaggggtgatgagtagtatttgaaactaacgtgagtttgtagggccgtagtgtcctccggatgttgggagctattgctctggggcattgttcctcttagcccctccggacgcttgcctagctgggctgaggcaggctgaggcctgtttgttgttagcccagctgcaagagcagtggccttagtaacgtcagcaggaacagagmaggcttcatctctaccctttgtctggatttggtgctggtgtgttttccccgctgctgccatgtgatggctcgtaagcagcactacacactggatctgtaactccttttgaaagctctattgtgagatgctgctgcgtttcagtggaggggagatttttgctagtgtgccacttttggtttctttcaaatgtggatgtgccttcctctaaagaatcctaggtaaggaaagcactagttttgaagtgactaaaaatgaattaaattatcctttcctccatgcttcctatggtggaacggtagtaaaataggaaagtaagtactcagatttccttgcctactttgcattatagttaatcaccacgggagaggtgggaaatgagagagtgagagtgggaatcagggaagatttcctaaatgaaataatatttgaatgaggtgataaagaataataatgggtggcaggaaacacagaaatgtggataatggtagttactaagggtttgtttatgtactcatccataaaacattagttgagggcctatgctataccaggagttatactagactttggatacccaagaattaattagacatggttcctgctttttacgggttgacagtctggttgggaagatggaaaatagacaaaacatatatagtgggttctatagtaaaggtttctacaaataacatggaagtatcatagtccagactaggcaggttaagaaaagtcttttcstaggggttgacacctgagatgagacttgaaggacaaatgggcaagggagaaggtacaccagatagaagaaactgcatgtgcaaaggcaaggatgcaagaaggaagctggaatatccaggcactgcaaggagttcagtgtacagcaaaagagagactgcacagtgggggaggattggcaagaagtaatttacgagggcttaagacagtaagggacrtggagaaaatcaaggacaacccccagatttttacttggttggtagtgctattcgcactgtatgttttcattgcagaaaataaacaaggagggacagattcaaagaggacaatagcgtattcaaattaggacacgatgcgtttggggtacttgtgatatatcgatataacaagtagaaatctggggctcagaagagagattggggctgcagattcacgggtggtagccattagcagggggtggatgaaaccaccgagggggagaacatgcagagtgaaaagatggctggaaaaaaccccaagaaggagcggacaaccaaagatactgagaaggaggcaaggagttggaggaaaagcacagaagacaggcgaggagacagaggtcagcagtatcaagtttttctgaaagaagaaatcagataaattttcaccacttttaggaatgaggccattggtgatcttggtgagggcggcttccagggtgaagtaggaaactgacctgaatttcagcagggcagcagtcagggtggcgtgatttaagaattttcctttaagaagcttgtctgtggaggaaggagtgaggaatgatagcagatctaggactgtatgaaacaggatggagagagatgatggtttacttgtctttttccccaaggttaaaaagctggaacatttttatactaatgccgataaaatatgcatattattgatactttgaaatgtatgaggccgggcgcggtggctccgcctataatcctagcatttagggaggccgaggcgggcggatcacgaggtcaggagatcgagaccatcctggccaacacggtgaaacccagtctctactaaaaaaaaaatagaaaaaattagccgggcgtggtggcgggcgcctgtagtcccagctgctcgggaggctgaggcaggagaatggcgtgaacccgggaggtggagcttgcagtgagccgagagcgcgccactgcactccagcatgggcgacagagcgagactctgtctcaaaaaaaaaaaaaaaaaaagaaagaaatctatgaagttcagcacctaggaaagatgacagtcttgtagtcataccccacctgccggaattgagaaatccaaaaatttattgttttgtaattgtgacagaaaaaaaaatcatctatgatgtcttatacagcattttcgcactcttgatttttccatataatcccgaaagaagacagcacggagagacaagaggtgaatgaaataggccctgagcagctgaggtggtggagcaaagttcctctagattactcaccagtgaacaattcaggcccttgcacagagcccactcagctccacacaactctcaccagtcarcttgtctgacatctacacccattacagaggaggagcaaggaggagccgcgtgggtgagggcaggcacactgatgcccgggagaagtggtagtcaatatgctgataacgaaggagggrcagacatgtcagaaaatgcctccaaaaggaataataatgccaataaaagctcacaacttgtgcagggttaccagacccctctgtaatagcaactgaaggcatcactatgttttaacatagtagcaataattggtatttcaaatgaatgctccatcaagaaatgtttaaatactcggtatactatgttttaagaacgtgaacaagaaaatgccaactgcattttatagtttgacattaaaataaaattttggcaattaaagtgctagctgggacctttcctaaagggtctcactctgttactatttgtagggcatccaaggcttagtgcttcttacataaattgatgagagatagagctgtgatgtgtagaaggtacagaaaacctggttatagatgaaaagaatgcccaggaagctatatkagttcaagtttacatttccatagcacatttaaaaaaataataattttcaatctgtattgccctgtgaaatcataaaaaggttaataaatagaatttttcaagaattaataaccccattctattctgaaacctggaaaacacattaactttattagcttttaagtaacaaatattcctyttttaattctaaactatagtttgcccttttaatccatttaattgaaatagtaacctatagtagaaactattaaaaatcaattatgaaaggtccattaaatttctttaaccagttacaagaaataagtattttaattgttctttgagaactgccaatgaacaaaatcagacttttgtaaaatgaaagtaaaaatgctcatgattgaattgtggtagccctgttgatattcaggaaggataagccttgaaacctcctgagatccaaagtttctgatgtgagaaatgtttttgtcttttataatcaagagtctgaaatctagacaatggcttaaaatcaaagtagtgacctggaatgtttgttgttgactctacagaaatgtgttgaggagtgataatctttgccaaaaggagggagtattttttttaattgatcaaaggcttaaatctttttttttttaaactaacatttggttcagtcagtgttacctaccgtcttttatgttgaaattcagaagcaacatactttagtgattgacttatctgttggtgatgacatgttatgacatgttgttaggtgtttatcaaggattggaaattccaatttgccacgtaaaagaatggttactggttaaaaactacttgtattcttctgtgctatgagtgaaaaatttctatagcatctatgttaaaaaatgcttgttaaagggttgaactctcatgtctgtaatcccagcactttgggaggctcaggcgggaagatcgctttagtccatgagttcaagaccagcctgggcagcatagtgggacctcgtctctacagaaaataaacaaagtatccaggcatggtggtggactgccaaatagtcccagctatttgggaggatggggtrggaggattgcttgagcccaggaggtcaasgctgaggtaagctgagatcgtgccactatacttaagcctgggtgacagagcgagaccctgtctcaaaaaatatatataaataaataaataaaaataaagggtttaattaggggtgaaaatgaggtagaagcataaggaaaaattctaattgagagaaataagataaaagtgtcattcttaaaaaatgttgtatgtatatagtttgctgtcatagactagacagtggcaaatactgtaactttatcatagatctttcctttgtacttggataccattttgaattttatttttctgtatgtatttttttccatttaaatttatgctccaagatggaagttaacagtaataccaccttactttctttttccacgttacaatttttagagacatttcccaagggctatcttatttattaatatgtgattcargtacactggggaaggtaagtatactattgttattttacaaaggaaagtacaggtaaaagagagttcagtaacttgtttaaggtcctgtagctagtgtcaagactaaactctttyttacttgtacttcattgtcttttaatcatagcacattattaatgkggaaattgataaagacatttttgttggaagtttaattgaactttgaacttgaaaatttaacttgtagacattttactcctgaaaaagggggcttaagtaacctaaactggaaagacattaagggctggaaattttacatagaccttgaacattttaaaattttgcttaaaaactgcttaaaatgttctattatagccaagataatcacagagctagaattcattctctactatacatgggcactacattcattgtaaccaactagtgttcagtagaagtataattgggaaagaaggaagacttaagttacttatatatgtaacaaggcagcttattaagaatttactaggctgggcgcagtggctcacagctgtaatctcagcactttgggaggctgtggtgggtggatctcttgagcccaggagtttaagaccatcctgggcaacatggtgaaaccccgtctcctcaaaaaatagaaaaaaaaaaaaagccagcgtggtgtcacscacctgtagtcccagctactcgggaggctgaggtggatcacctgagcccaggagatagaggttgcagtgagctgagattgtgccactgcattccagcctgtgcggcagagtaagaccctgtctcaaaagaaaaaataaaaattaccataacttgatgggaaaatgcaactttattgtttgttctacagcattaagagaagcatacaatccatccttggggatgggagactgtccactgcattcctaaataataaatcctccttattcccaaggaaggtaaataggctcttggatggtcctagaattcatggcccaggcttttaggatcatcctgcacctaaagcccttgggagaacaaccaaaccctaatgctgttgaaagatattaggaaagacatgagggttttctttagaagactggccagtttctctcaggaaagaaggacatttcccagagacaggaagtcaaagatggcctgttttttttgcgggtagttgaagctggtgctttactgaagcagtgtcttggaggtccttatggtaggtatggctatgtgggtgttggggatgactgagcactgagaccatgactttgatatccatggtgaaggtccttatagataacttggtacggaggctgagggagggtggcatggagggtaagcagtgaatgctgccagtggaaagaagttaccttcaacagaaccacggggtttagacaatgaatttctccagggggattgcgctggacaagtgactacaggccttgcctaattttccttcattrcatcatctttgaggtccttacaccactcaaggggtgagagaagagctcttaggcatatctgatatttagatttcttactgatgtggctgactcttagctttgaagtctgaactgatttgaatttgaaaaatgaaaagatgtgacattttttgtttcttgagtcttgtggagcagttcatagctttatgtgcgtacattcattcatatacacatgcatatgttactgtatactgcatacttctctttaatacccctgtggtctttacatatccatcctgaaatgtcgtcatcctcatctgacaacctagaaaatgctaactcatcattcaaaattcatgtcaaatatcagtcttcctttctgagtatgcagggagtaaggagtctaaaaataattcttggcttcttaatttgtgatatagagatattgcctgccttgcttaaatcacagctggttatgagaattgaatgaaatgacttaccttaaagagacagaaagtagctaagggtgggagagtccaagtagcaaaagcatggtgtggagaaatttgatatgcatggggagagggcctgagggagacctgtctcaaggtagctgaggatttttctttttcggtatatgtggtggggaggaaaatagctaaaaaatatttacttcatgtaagrctagatttaggggagaatattaaaactcaggaagaggacttttaacataatgaggtggttaaaaggagacaacttctcaatagacaagggaggtattttgaatagatttttggaaatggtacacaaaattagttttattgaagagtgaaagagctggacagatgggaaaatcatcatggagactagtagattgtgagggtgaaawccatgagtaggcttaaaagtattgtctcaagacaaaaaaaaaatgggctattttggaagtaaagagtttttaattccaggaggtggccctctactgatgtaagcagactgtgatttagtatgtgaagratggatgtaccagactcatttcccagagggaagaggcagttactagattgtttagcctcttcacatgcttgtaatattgttgctttcaaaggtttgctgaagaaatgaatgaaatggcttgtcaagtattagtaagatatttctagctgtagttcaattgcattttttttttttttttttgagatagggtctccttctgtcacccaggctggagtgcagtggtgtgaacatggctcattgcggcctcgacttcctgggctcaagcgattctcccatctcagcctcccrtatagttgggaccaaaggcacgtgccaccacacctggctaagttttaaattttttgtatagatggagtcttaccatctttcccaggctagtcttgaactcctggacccaagggatcctcctgtctcagcctctcaaactcctgagattataggtgtgagccaccacgccctaccaacaaaacttttttttttttgcccgacccccagcaacaaaacttttgattccttccttatratagtttctttttaaataacttggacaagaaatgtttgcacagaatctcactgataatgtactttaacttgaagagtatgaaataatcttgagtctactatttttgttttttaatgaaaatgcattaatcatttacattttttaagatacccaatttattttggaagctatatgttattttcataaaaaattcttaacttacagaatgtccactgcttaggatttcctgttttttttgtattttaaatatatctctaacaaataatcatcacgaaggaaaagaggttacatttattgcagtcctgctatgtgctttatgcatgttatatagtcctttcaaaaacttttcaagtaagtgatactatttttattttatagatgtggatcatgagatttagagagacgatgtaaaatatagccaagataatacagtctcagtcmgaggtggagctgagatttgaacccaagtctttttggaaacaaaatttgattctcaccacatttcattccagggaaaaaataattccatcctggctctgtttttatttatagccagaaatggaccacctctractgtctccactgctgccattctggtctaggcttccctgatgttttgcctctattactgtaacatctcctaattgttttccctgcttctctctttgatccccacagttgatttttaatggctaatgcaatcctttaaaaacgtaagtcaggccrggcgcagtggctcatgcttgtaatcccagcactctgggaggctgaggcgggcagatcacctgaggttgggagttcaagatcagcctgaccaacatggagaaaccccgtctctactaaaaatacaaaattagccgggcaaggtggtgcatgcctgtaatcccagctactggggaggctgaggcaggagaatcacttgaacctgggaggcggaggttgcggtgagccaagattgcgccattgcaccccagcctgggcagcaagagtgagactccgtcacagaaaaaaaaaaaaaagaagtaagtcaggtcatgttactcctctgctcaaaattcttccatcactccccatttcacatggagaaaatacagagttcctacaatggctgaggtgatctggcgcccctttctttctctctgacctaatatctgacttcttccccttgctcattcctctctagcatgccaggcacatgtctgcatggctaattcacttaccccttcaagtcgttactaaactctcactttcacaatgaggcttactttgatccactatttaaaactgtaactccagtgggacttaagatgcaaaaatttgtgattttcaggattttgattatatgctttaaatatataaaattctctgctatgttcaatgataactactttttcatgttgacatacagaattggaatatatctaaaacaccaaaaacatatacttataagtagaatagtaaagatacacataatgttttctaatcgttgactgtatctcattgtaagaaatacattttattgtgacctcgtgtatctatataaaatggaaataaaagttttataaaatacttagcatttctgtgtgttacactcatatagtttctgttgaattccattcctttcttttccattatgaaaatatgttggtcaagttctacaaaatttatttcacaactcatttattggttacaacctatagcttaaaaatattgggctattcttcaaatcccattaatgcaggagataagatatgaattttttgcattaacttcttgaaaacatacactgcagagggtgatgattgaaaagtcacttatacttttgagttattgggcatgtagctattactgcattttgcatattcatgctcagattaacaaaagtaatatagattaggttgcataaatatgtaattaaataattataagtgcttatattttgtmaatattatttgctaatggtagaactcttatattagaagtggttttttccatccagtggatcaggagatttctatcttttttcccccctaatttccaaatttcagtattttaatttttgatggattggtgcttattttcctatctttattgatattagatactgacagtgaagaawaatattcaataataaaaatttgtgcttcattttaaagtattttaaatgaataataataataawcatataaccctacatagcttattgtacatttgtttattagtatcttaatttcttmgcactgaaaacattaacagatacctctataatattctctaatatggtgtattctctaaatttgaaatttcctaatgtaatctttcttraaagtaggagatatatattccaagcttatcttttaccattgtcctcttacatgtaatgctatagccatattaaatgtggcctgtccctccctccttccctacttcccttccttccatctttccttcctcctgcctttctgcctccttccttttcttcctccctcccttttttccttccttttaactaatatttttgaacacctgytatgtgccatgtgtagtagtgggaagaaaataaatgacatagtctttgctgtctctgaacttaaactggatactaacagtcccagttatgaaagtgaaaacagaaagctttaagattatttagaaagtcagaggtggtggctgggcattgtggctcacgcctgtaatgtcagcactttgggaggccgagctgggtggatcacttgaggtcaggagttcaaggccagcctggccaacatagcgtctctactaaaaatacaaaaattagccaggtgtggtgctgcatgcctgtaatcccagctacttgggaggctgaggtgggagaattgcttgagtctgggaggcagaggtttcagtgagccrcgccgagattgtgccactgcactccagcctgggcaacagagtgagactctgtcttaaaaaaaaaaaaaaaaaagtcagaggtggaatcagattctgtgaagaattagaagaggcatcagaagacactctttagtcttcgtattttaaagatgtagaaactgagtctcttatagattaaatgatgtggtgaggttacagctgaaacccaagctggtttcttgactagtgctctttccataccacctcttctctcttgactatcacattgcctgcccagatcccatgttgtcatatatttttgtatgtagtttgtgctgtcaargacctcttttcaaaatgcacacactcaaccatagactgttaccgttattggttttgttacttgaaattataattggaacaattagagatgcgtcagtggaaaggcaatgaaagaaggccattaagtgytaataaatgcctctcctcatgggaacggagatcttttcttctctatgtatttgagctcttttcactggtgcttttaagtggctagaaataacacttgccacacgcttgtggaatactctggatgccagggggttcattttattctgtatttgaattgagcacactgcggttggaatgtgtgttgattcttttgttgatttaagcattcattccatgttttgcattaaccttttctcatggaagacagaatagtgagagctcttagagaatgaagtctttaggtagctgatgactttccaagaaacagatgaaaaggttaaagttgtaagtgtttatgttgatatattttccttttcayaacaccctaaaatctagatacaatagtcttcccttatctgaagttttgcactctgctgtttcagttacccatggtcaattgcggtctgaaaagactcaatggaaaattccagaaatacacaatttatgttttaaattgcatgtcattctgagtagttagttaaatctcttaccattctgctttgtcccacatggaatgtaaattatctctttgtctagcatatccacatggtatacactatctgcctgttagtattatagagtcaggtactatctgtggtttcaggcatccactgggggtcttgggacatatcccctgcaggtaagggggagctactgaacagtgtgacaaattggatgtagccctccctaaagctacatgcttacctgtggctagcaagagataatcactacttgttgatatggtgatatattagcttcagaaacgaatttaggtaaataatgaatgaattccagaataacttaccaatactaaaaatgatgacaatgatagtaatgatgatgataaggataatagcagctaatatatttgactacttactatgagcctgtaagtctgtgccttatagaaatgagcaaggttgtcctgtcctaagagaggctacataggagaggatttgacttgggctcctggtacttttggaaaaaacaggaggggcatctaaatatgccggcatatcaggaaatgcttcccacaggaggctgcatcaacatgtctttaagagtgagttcattcctcaataaagaaagaggcattagacaaaggcttctgtggttaaggagtcaacactgaagtgtgaaattagtgtagaatcccttgggagccagctgttctgggaataaaaagtttgcgtgggggaatcatggatgtggcttctagagagtgagagagaagctggatccaggaatccacttaaatccttcctggttaattggaaaatcagattccattctttttaaataaacaggatgtgaccatggtagtgctccattctgttttagtggagaaagcaacctacacttttttggcttccaattaaatacctcactttaccccaacatcttttttttttttttttttttttttgataaagagtttcactcttgtcacccaggctggagtgcagtggtgcaatctcggctcactgcaacctccacctcccgggttcaagtgattctcctgcctcagcctcctgaatagctgggatattacaagtgcgtgacaccamgcccggctaatttttgtwtttttagtatagacggggtttcgccattttggccaagctggtctcgaactcccaacctcaggtgatccgcccgcctcggcctcccgaagtgctgggattacaggtgtgagccactgtrcctggcctctagcatcttaaaatagtgaaaacaaaagagtacactattggctggagaagctcacttctaccctatccacgctcttcttttccagcctcctgccaaggagctggtaatgtatattcaggaccaaggacagtaattgggccccatttcttcatctgaagccttagcaggggaggggttgacgtgagctgtctagaccagaactgccctggtcagcgggtaagtgttctcttgctgttgcttcttctcactggctggtttgtcttccacaggtggaagacaaacttttctagtcactgtcgtgtcaaagaaaagtctgagattcatgtatgggcttcgtggagaggggcaagggaggcctttgagcctctttggtaccaggccttagggctacctcttacctaggccaaatgaggatttcatgtggtccagcccatgtttccaggrttggaaagggaatacattgaagtttgcagcaaaacccagctcagtttgtcctttccacatgcatttcttttagaaactctgcaggaaggggtggctaacagaactgaatgtttagcatcctgagttttattttttgttgatgtataatacatattctcagttggggtgatattgcccccaacagggcaaaaactggttcttgggggacaaaaagagtcttactctttttatgtttaaagcgcaggtgtatgtagagcacatatactggtatatagtatatctatgatattaaacttaataggggaacatttaatggggaaaaatatcaaataagtttcattaggggaaccataatgaaaagaagggtgagaaacactggcttaaatcattgtctgtctgtctgtctctctctttttctttgtctccttcctaggtagtacaaggctggttccagtgacctataatgtcatcactatcctactctttgttcttttctgatcttccatctgcacaattaccttgtagtattaaggtggttgttgcagctccactatcatatatagctgacagggagacaaaagaagaggaagggtaaaagttacacattaacgaaatcagaaccttttaaaggaactcttctgatgtcactcaaaacctctaattacatcttactgggtagaagttagtcatgtggacaccccatttgcaagggaggctgggaaatgcagattgatttgtctattaaagttgggcacattgccattcccagcaaaattgggattctgttaataagaaagggaaaatagatattaggtaggcaaccagtgatctttttactagtgctttttgccattcgttttcctggcagccaacttgggtaaaatataatctgtgatttggaaaaagtgaaagctaagtgcctttattttatgccaggactcattcatctggtgctttaaattcttgaacagactgacttagtgcataagcaaataaaatggattaaatattaaggcattaagttcttcagcatgtttcctggtggggagaacacttagtatttgtaaagtgagaactgacttctttgttcagtttatagatccctgactcagaaacttttgcattctaaatgtttcagtgggaaccattaattattgattatttagatttcatgaaaatatgttgtttagaaattttgaattttgtgaataaaagcaaaatattgggattcttaaagatgtcaacaaaaaataagtaaaagcattgtatttcctgcaattgaatttgtagatatgtttttcagataaaattatgatggtattgagtacttcatattatagagtagctgacagcatcaaaatatgattctttgtaaatctgtaagtactaatattcttaatatatgccaataatttagagaaaaaaagtaaactkcagtagaaaatttccaattaaatctgtagattttggtaaaattacttcctctagcgattaaaattgcattgtaatggttggcaaagttcccggatttgggcatgaaagtacagagctattttaatagcaccattgtgttcagggtgtggaactggattcttgacctcagtgcttcttggagcagggggtgggcagtatttgtgtsatttgtctgtctttctcttcctatctcctttcttttgcctgtttccctttccttgtttctttttttgttggatcagtatattgaaatattgtgagatagtactcctataggaattattttggtgcacagattttttttttagacagagtttcactctgtcacccaggctgaagtgcagtggcatgaacatggctcactgcagcctcgacctcctgggttcaagcaatcctcctgcctcaggctcccgagtagctgggactacaggctcaagccaccatgcccagctaatttttacattttttgtagagaagggagtctygtcatgttgctcaggctggtctggaactcctaggctcaagtgatcctcctgccttggcctcccaaagtattaaaattacagatgtaagccactgtgcatggccagaaaattgtattaaatactttgaaaattaagttttaaaagagatttctctgttttttggtttttgtttttgttttgttttttttgagatggagttttgctcttgtcgcccaggctggagtgcaatgatgcgatcgcggctcaccgcaacctccgcctcctgggttcaagggattctcctatctcagcctcccgagtagctgggattacaggcatgcaccaccacgcctggctaattttgtatttttggtagagatggggtttctccatgttgatcaggcttgtcttgaactcccaacctcaggtgatctgccggcctcggcctcccaaagtgctgggattacaggcgtgagccaccrcagctggctgagatttctctgtttttaaggaaaaaaattttaaaaatatattggttctggatttttttttaaattttattttcttccaattctattccatgtcattagacagagtcaataatattggcccacctagtattccgtattttgtaatttggtgaatatatttgggtcttaaatgttcataatatcaatttaaatgaccccagcaaattactggtgagttgagagtcatcttgcctattcttttggtccatataatgccttgtagctgtctgccagttgtgaattagatgtaggattgttttctctctatgttatgactatatggaacaatgacgaatcttcttgaaagggtatgtagaaagtgtaaaaaatatttagtgcctaggcactgaaggaggctctgagggaacacacaagggtgagggagcagacaagtgtgtgttgagagcttaggtagagacatgtgggggtggggggacctcgagaagactcccagagaagatgacatgcagctgagtgttgaagatttagggggatagggatgtgcctagacacgaagtctaagagcacagatgcrcacagagacttacactagaggacaaggctttatttctgctttgtttactgttatatctccagtgtctaaggcttcatttagcttgtagtagacacataatgcacatttgttgaattaataggttaaattaattgtaagaagttctatgcctctgatgtagggtttcacttggagaatgttcagaaataaaatattttgtaagtgatactaagatttggatttcatgctaaagatcctggggagtcattcagtgatttaaagtctggtaatgatgtgatagaacttacatcactgttaaagttggataggaggstgctcaaattagatgcagggaaattagttgtgagattagtgtagcagtttatatgatagttggtggaagctggagtgrtgatccaaatagacaagagrgggtgaatttaagagatattaagatagaatcaacaggacatggtgaccaacttggagcatgaggatagaggtagaaggaggatggatgattcccaggtgctaggcttggcggacatttatggatgctgatgatgtggattatgattgggaatgaaggaggagaaacatttggatagattgtaatgaactgtagagatgtttggttccagacacctagtggagatgtttaagaggttaatatgattgtaatgagttgtagggatgtttaagaggttaatgtgattgtaatgagttgtagagatgtttggttccagacacctagtggagatgttaagagttgtagagatgtttaagaggttaatgtgattttgagttctagtgtttggctacctctctggtagctcstttctattctctcagttccacttctttcaggtacccattaaatgttggtatttctgagagtccatattaatcacttgtttccactccattcctactcatctgttcctttggcttcaacttcctgctctgttgctcactgtcaaattattgtctccagacaagacttttgtcctgagtgmcaactgttcagtctaactgcctacatgttgtttcaatcagatattccccaggcatgtaaagatmaatgtgtacaaataaggaccactcattttcttcccccatttcttttacaatgtagagaaaaatggtcaagagcacagatgctagagttagactccctagatttgagtcccmtatgtcacttactagctttgtgaccctgtgcaaattatctgacttttttgtgcctctgttttctcatctgtaaagtaagaataacaatagtaccttcctcataggatgttatgagatcaaacaagttaatgcatataaagcaatcagattggtgctggcacatggtaagcactatattaatcagatcttcctttatttcctgtcctggttagtgataccattgttcaaccagctacccaaaccagaaatgtgacatttatcctaactcttccatatcactacatcagaaggagattcatcagaaggaggggcatcagaaggagattccacatcaaagcaatcattaaatcctgccatttgtcttctttccatctctaccattactgccttggacttgacatttattrtcttctttctgaatgacatacaccggctactgactagtgactcatcaccctgtctttgatctttctcttcttcaacgttttctatataatccccagtgattattctgaaatgcaaatctgatcacttaaaactctatagcgccttcctgttcccacagaaaatagacaaacacaaactaccagtaaagacctctgaggtctgttctggcttccttctgtagactcttctctgtctcattctgatctctctttaatgtttacagttctgtgatgttttgtgctactctggtcttccatgtcttcgtatatctgattttctgtggaatgcctcctacctcatatttcttctcagatattgtttctggcagctcctccaagcaggatagatattctttgctgtatgttgatactctaccttgggtggagcttaagcatagtacctgttatgcttattatagttatttatttgcatgttgtcctcctccaaggctgagcttgtttatttttgaataaattggctccatgaatcaacttctaggaaactatgagttatgcctcccatcttcagttaagggcagatgttaaacatttatttactgtacagattatctggttaacaatcatttacatctatattgaagaaaccatctctgtagttactttatttgctgccggggggaattttttttagttttcttgatacagctagtgtgttctttttcaggcttccaaagatcattcttttcctagtggagcaataactatatttcctggtaactcagttactggaagagccaataagaaatgtcatcaaggtggttcttaaactatagtgtgggaattgtactctatttttttgtctaggagtcaggaagccatgaaagagcattaacttactgcctgaagaccagctgttaacactgaagattaacgctttattgagatgggttgagagagaagaaaggcatttgatttgtagctgtcatgtggcatccagagggaagcactctctctgactgaaaatctgtacagttcaaccacaaataaggcatttgggcaatataacagaatcaatttaataacactgagtcttcaggttactttttgaaggtacattttgcaggaaaaatggcatacatattttctttttatatagatatattagaaaataaatttaaaaatatgtagtctaaatccaaagtaatgctaaaggaatagtcattatttttccagcatttatttaaaaaatgttttcccataaaacatgcttacaggttttcccataaaatatgcttacgggagaaaacctattgcacagaaaatgatacaattcaattggatggtggtgctcagtggctaatgaactattcaatattgttcgtgtcagtgctttggctccctgttgctgaaggcaggcataagtgctttccaaacccttgcaggtgatcaacaccaagaggatagttcaaatggggtctgtggctcctatctccaaattccattagcaaaatgttaaaatattgtatgtaggcacttagttttttaaggtaagcgaatactacaatatcagggaaaacacactgtggctgtgttatatcaaaaataatagtaacatttttccgtggtgcttgggttttaaaacggttggcgtttgttgcatttcttttgatccatacaacttgggccatagttagcattatctcagtttagaagtaaaagaaataggttcggagagaattttgcccattcagtggtaragctaatattcaaaggaaggttctgtgtttctcattcgaggactcatctcctgagctcacacagcaagagtgtgctgggcatatggttttcattttgctggaccatcagaaggagacatatctttaggatgttcagattaggtgctcattcttcagaagagagaaacttttctttagcactttgttgtacttcagagatgcctgtgaaacaggatagacttcgaaatagtaaaatttgattatcaaaatttttggcttttggtgagaatatatctgtcagtggtaggactggtgagagccatgaagggaactagtaactgtgagttaataagaagggggttggatactggaatctatttattactcttaatgcaaagttctgtttgcttaataaaaaaaatgtagagaaaaatgttagatgtatctgtgtatttttagtcaacacataattatttgctatttataatgtttgatacattctattttgctttaacaacattcacagggattgttactaaatctacatataaatatatggtcacaagcatgaattgaaacaggtctcagcatgaagatataaagtgactaaacctttttttcttctttcttctctctgtcctttcttctctgccttttttcttgaagaaaatattttattgacttgttaaatggcattattcaggccattcatcatttttccttggcattttatacatcctaaaatttcactcatggtcctcacggctcaaacagatgccctccagctctttttatttttatatcctgacttaaattttttttattattatactttaaagttctgggatacatatgcagaacatgcaggtttgttacataggtatacacatgccatggtggtttgctgcacccatcaacccgtcatctacattaggtatttctcctaatgctgtccctctcctggccccccaccctctgacaggccctggtgtgtgatgttcccctccctgtgttcatgtgttctcattgttcaactcccacttatgagtgagaacatgcggtgtttggttttctgttcttgtrttagtttcctgagaatgatggtttccagctttatccatgtccctgcaaaggacataaactcatccttttttatggctgaacagtattccatggtgccctccagctctttactctggagttytgcttttttccctccctgcattcattttgattctcaaattaacctgttcctttttggttaaaaataaaacaaacaaaacaaagtagatgctttgtttattttgattaaattttaaatgattgttgaagccatctaaactagcagttattctaatatagcgcatgaagaatattaaaagtgtatttagttatatgtatttaaatatattcaaaacatcattataaagagagtattgttctttctcttttctgaactccaatgtagtttatcttcccttctttratggttttcatgactatgttttgttcccattaggttccgaactcctggtgtctacccagcatgagtccatgcccacagcatctccctagcacttcttaatttctcagtgaattttttttgatgaataaataatggtatttcagtcgcattttcaaaagcacatacaaatttgtaayttcactattttctattgtagtcatatacgttgacattctaaatgaactttggtccttgaagtcaatgagaaaagtcattaacttaaggttgttcagtactatttcctctgtcagaacacacagtagcacttgccaaataaattagttgtagtaggagaaatttggcttgattttatctttttgactctccattccaaactakcagtgcagctaaacacttgggttttggagcattctcactgtcctttgcctattttataagctgctgttcattgaaatcccatctgtgttgaagctctgttctgccaaatttcctacaaaactcatagcacgccacatgccattattgcccactgaattgttgagtaacatatcctgacttgaggccagtggttttcaaaccttggtgagcatcagaaacatctgggagcttgttaagagtacaaatgctgcatgccttcccctgaatatgatgaatctgtagcttcaggatgagtcctgggtgtctgtggttataatactttctgatgggcctggaaccacattttgagaaaaactgccactgagtgaaaagtttattttgaatggaattctgtgatgattcctctaaaagttgtgagacattctaaatgtgtttaaaaactgtgctataggtatgtttttgaattcttcgacattgcagaatcagcaataatttatgtggcattgcagatgtaatattatgtagtactatctttgctgcagttttattagcttagtgtttattaatatgtcatttaaaatatgatctttatcaaaacgtccatttatcaggaataagaacaaatggaatgagaacaaacaaaactcaatttgcaatgtttgttttctgctgttaatttctatagacaaaatacttatttctacttgatcccacattttatgtgtccttttttttagacaagagtctcactctgttgcacaggctggagtgcagtggtgcgacattggctcactgcaactctgcctcccaggctcaagcgatcctcccacctcagccttctgggtagctgggactagaggcccacgccaccacgtctggctggctagtttttgtagggtttttttttttctttttttttttgtagcgctgggtttttgctatgttgtccaggctggtcttgaactcctggactcaagcaattcaccagcctcagcctcccatagtgctgggattacaggtgtggaacactgtgcccggccttgtttccttttattggagaaaagtgtcagtatatttagaggatacaatctaatgtgcctttagtagtggtatatgatggtgctaatattgatcttgaggccaaagagcgtactgggttttttaattatcaaaaagagtttaagaattaatttcagtatcacatattttctttaatgctgattctctgaaaatcaaaattcattgataatacacagaaactaagggcaaacttttatcagtttcagctagatgaatgaatgacatattccagtgaagtcattatgataatgtacatggatttctgtgcaatataaggccctcctcctccttttttttaaatttgaaaatgcttcttttattaaratgggcctatcattgtttggataagcgatacattgaaaggttgggaattaggagaattgctgtggaacttggtttatgaatgtacaggtgataagaattccttcatgccttaatctgtatttcttactttttttagggactttctccctcgagggtcgggcattgtaacaagacgacctcttgtgctgcagcttgttacttctaaagcaggtaatgaatgaagatgtttaccgcatggatgggcacatcctgtggccccttttgccttcataggtgtgggattgtacaaatagaaacgtttttgtgatcgccccactgtgggcagctgcccacatttctctccagaatgctgccttcttcattgctcttttcattcctttgattacattaaaggggatattttcatagatttttttaaaatacctacttaaaaaaatgttttattgctcattgtaatccatctatataattttacagtacagcacaaccactaatactcctttggtatgctttgtgtgtgtgtgtgtgtgtgtgtgtgtgtgtgcgtatgtgtgcatgcacatgcacttggggattaactcataaaattcaacaaccatataatatctgtatggatgtgtatgtgcgtatctatatttacactgtgctatgcttccttctctctcttacatcatgataatttgataggtaaatgatgctttgtttttattttcattttatttcagcaactgatgatgttgaatttttttttcatgtttatttgccatttgtatttcttctctcgtgaattggccatttttctttttccccatttctttttggggattttactagttttcctatcaatttctttgaatgcttaagactgaagcacctcataaaaatcatctatcataaattgcaaatatttttaatagcttgttaaagatacagtttacataccatacaacttgaccaatagaagttaacagttgaatagattttrgtcttttcacagatatgtgcaaccatctccacaatcagctttagaactgtttgatcactcccaaaagaaagcctgtatgtttctgctgtcacctcttttcataacacctttccccaccactccagcctaggcactactaacctatgttctgtctctatggatttccctattctggacatgtcatatgaatagaatcatttaatatgtggtcttttgtaataggcttttcttgcttggcataatcttttcaaggttcatccatgtygtagcatgtattagaacttcatttctttttatggcctaataatattccattgtctggatagatcacattttgtttgtccattcrttaactgaggagcatttgagttgtttccaccctttggttattatgaatgatgttgctataaacattcatgtacatgtttctgtgtggacatgtgttttcatttctcttagaaatatacctgagtataattgctgggccatgtagtaactctctgtttaattgtttaaggaactgacagactgttttcaaagcagctgccccattttacattcctaccggcagtgtatgagggttacagtttttctatatccttgctaacccttgtgggtaagaagtgatatctcactgtggttttgacttgcgttttcctaatgactaargatactgagcatcttttcatgtgcttaatgatcatttgtatatattatttagataaatgtgtattcatttcctttgcctagttttaaatttggttatttgcctttgtattactgaattgtaacagatatatattaaatacaagtcccatatcagatatttgatttgcattttttttttctattttataggcccttttcattttcttggcrgtgtcctttgaagcacaagattttttattttggtgaagtccaatttatctacttttttctttcatttctcgttatttttgtatatatctaagaatcctttgccaaaaccaaggttataaaactttattctatgttttcttctaggagatttatagctttgatcttmcacttaggtctttgatccattttttaaaattactaatttttaaattttaaatttcattttagatttggggataggtacaggtttgttatattgcataatgtgtaatgctgaggtttgggtttctagtgaaactatcacccaaatagtaaacgcagtccccaataggtagaatttcaaccttcacccctcttccactcttcccccttttggagttctttgcatctgtttttcccatctttatgtccatgtttacccactgtttagttcacacttgtaagtgtgaatgtgtggtattttatttcctatttctgttatttctcttagaataatggcctccagctcagtccatgttgctgtgaaggacatgatttcattcttttttatggctgcatagtattctatggtgtatgtgtcccctgttttctttatccagtcaactgttggtgggcttaggttgattccatgattttgctgttgtgaatagtgctgcagtaaacatacaagtataggtatctttttgaaataataatttcttttcctttgggtagctacccagtagtgggattgctgggtcaaatggtagttctatttttagtcctttgagaattctctatactgttttccataggggttaaactaatttacattcccaccaatagtttataagtgttcccttttctctgcagccctgccatcatgggttatttttgactttttaacaatagctgtatcagtctattttcacactgctatgaagaactgcccaagactgggtattttataaaagaaagaggtttcattgactcacagttcagcatggctggggaggtctcaggaaacttacaatcatggtggaaggcaaaggggaagcaaggcaccttcttcacaaggtggcaggaaggagaagagccaagcaaaggggaggagccccttaaaactatcagatctcatgagaactcactatcatgagaacagcatgggggaaactgccccccattaattacctccacctggtctctcccttgacatgtggggattgtgaagattatggggattacaattcaagatgagatttgggtggggacacaaagcctaaacrtrtcaatagccattctgactggtatgagatgatatcttattgtagttttgatccgtatttctctgatgattaatgatgttgagcattgttttcttatgtttgttggctgcttttatgtwttcttttgagaattgtctgttcctgtcctttgcccacttttttttttccccctttttgagatggagtctcgctcttcttgcctaggctggagtgcagtggcgggatctcggctcgctgcaacctctgcctcctgggttcaagtgattctcttgcctcagcctcctgagtagctgggattacaggtgcccaccaccacgcccggctaattttttgtatttttagtagagacggggtttcaccatgttggccaggctggtcttgaactcctgacctcaggtgattcacccacctcggtctcccaaagtgttgggattacaggcatgagccaccatgcccrgccctttgcccactttttttaaattctttttattttatttttatttttgagacagagtcttgctctgtcacccaggctggagtgcagtggtgcgatctcagctcactgcaagctcygcctcttgggttcatgccattctcctgcctcagcctcccgagtagctgggattgcaggtacccaccaccacacctggctaatttttttttgtatttttagtagagatggggtttcatcatgttagccaggatggtctcratctcctgacctcgtgatctgcctgccttggcctcccaaagtgctgggattacaggtgtgagccaccgtgcctggcctttgcccactttttaatggggttatttgtttttttcttgttgatttgtttaaagttcttatagattctggatattagtcctttattggatgcatagtttgcaaaaattttctctcatcctgtagatcgtctgtttactctgttggtagtytctttkgcagtgcataatgtctttagtttagttaagtcccgtttgtctatttctgtttttgttgcattgcttttggggtcttagtgagaagtccttttcctaggctgatgtctggagaagtttttcctaggttttcttctagaatttttatagtttgaggacttacatttaagtctttaatccatcatgagttaatttttgtatatggtgagagataggggtccagttatattcttctgcatatggttaggcagttttcccaacaccatttattgagtaggatgttctttcctcattgtttttgttgactttgtggaagacgtgttggttgaaaatatgtggctttacttctgagttctctgttcttttacattgatctatgtgtctattttcatacaagtaccatgctgttttggktactatagccttgtatagtttagtatagagtagtttgaagttgggtaatgtgatgcctctggctttgttctttttgcttaggattgctttggctatttgggctctcttctggttccctattaattttagtattgttttttctaattctgtgaaagatgatgttggtaatttgataggaattgcatagaatctgtagattgctttgggcagtatagtcattttaaccatattgattcttccaatccatgagcatgggatgtttttccatttgtttgtgctttgatccattttgagttaataattttatgcactaagtgtcaaactttattttctgcatgtggatatccactagtcccagcacaatttgttgaaaagactattctttcctcactgtaggatcttggcccctttgtcaaaaatctgttgaccagagaaatacaggtttattttgggactctcagttcttttcgactgatatttatgtctatccttgggccaatagcatactctcttaattacccttgctttgtggtaagtttcaaattgagaattgcaagtccttctactttattttttttcaggattgttttggctatcctgggtctcttgaagttcaatatgaatttcagaatgagcttgttttatcccgggaatgtaagattggtttaacatctgaaaatcatatcagtggaatgaaaaaaaatcacagaattacctcaatagattcagaaaaagtatttgacaaaatctaacatgcattcatgataaaactcttagtaaataaaggggaaggaacttcctcaacctggtaaagggcttatatgaaaaccacatagctaccatcatacttaatggtgacagactggatgctttctgtctaaaatcagtaataatacaaggatgtctgctcttgtcactcttattcaacattgtacggtaggttctaaccaggacagctggggaaagaaagaaataaaaggcatctaccctggaaaggaagatgtaaaattatctctatttgaagatgatgtgatcacatgtatagaaaaacttaaagagtccactaaaaaactgttagaactactaaactatgttagcaagatttcaggatacactatcaatacacaacaatcagttgtattttttaaacttttattttaggtttgggggtgcatgtgaaggtttgtcrcataaataaacccatgtcatgggggtttgtggtacagattatttcatcatccaggttttaagtccagtaagcccagtgctcaagttatcttttctgctcctctccctcttcccactctccaccctcaagtagaccccagtgtctactttttccttctttgtgttcaaaaattatcatcatttagctcccacttataagtgagaaaatgcaatatttggttttctgttcctgcgttagtttgccaagggcaatatagcctccataaagacacacatatgtgaatgttcattgtagcactattcacaatagcagacatgaaatctacctaaatgcccacgaatgacagattagatttaaaaaaatatagtacatatacaccatggaatactatatggccttaaaaaagaacaagataatgtcttttgcaggaatatggagggagctggctatattgtccgttattgtaattcttagtttccttggattgggttttgccatcctcctgaatctcaatgatctttgttygtgtccatattctgaattctatttctgtcatttcaaccagcctagcctggttaagaactcatgttggagaactggtgtgattgtttagaggacatataatactctggccatttgagttactggagttcttgctttggttctttctcatctctgcatgtgggtgttcctttaactacagtgtagattgaatacagttgatagacttcttttctggatgttttcagcaagccaaggctttgtgcagggtygttctttgaagctgacttcttatctctggcttcagggtggggtatgttagtgaggtatttttggtgttgaagctttggggtgtgatccagtaggtggcacttaggctaattaatcaattggtagacttttcctcagttatgtggctcccctatttttcctcacagttgcagctctgttccctctcaacactctgaaagggtgggttcttctccctcttgagtgctggctatagactgtggcttggcattcctgggcttctcactgccactctggtgtgatctcagtacttgtgttccctcctccacttggaggcagtggaggaagggaccttagtagtgattgtggccaagggtcttttgcttggttcctgggggctccaccccagagagatgcaggtcagcaatygcttagtgcaatcagcccagggtggagggtctgtgctatgggaccaagccaggggttccctgtctggtgatgagcastggagggtgtgtgggacccatgtgagacagtctggccttcctccttaggtcaaytgcagcttgctggaggtgtgaataaggcacttaggatctttgcttcttcattagtctgagggtagcaagggtagttccactgcagaggcagtggcagagaggcttttagttgctcccggaggctttgtccagggaattgccaagctgctactggcttgattgctctggcgcagggtggctggaggaccttcccggtgaggagatatgggaatgggcacccatctaacagtctggctgctttttcatagagctcttgtggtatgcttggtgcctgctctggtccctagtcactttgaattttctagtacctggaggtatcaccagtgaaggctgcaaaacagccatgatggcggcctgcccctccctctgggagctccgtcccagggagttacagacctgttgccagcccaaacactgtaggaggtggctggagaccctggttgggacgtcccttccaggaaggaagaatgggattggagacctgcttagaaaagcggtctggctatgttttcatagagcagctgtgctctgttggggcatctgctttagcccctggttgcctcagacactccaaagcctgaaggctagaatggttatgttgcccaaacagcaaagatggcagcctgactttccctctgggagctctgtcccagggtggtttgaaacctgtgtcagccagagaacaccagtggggatagctagagaccctggttaggaagttgcacctggtggtgaggaacaggattgcggacacattttaaaaagcggtctggccatgtttttgtaggacagctgtgctgtgctgggggtcccttcagtccctggttgtcttggactttccaaagtttgaaggctggaacagcaaagtcacccaaacagagcattggtgaggatggctggagaccctggttgggaggtcctgcccagtaaggaggaaggggactggggacctgcttaaaaaagcagtctggccacatttttggagagtagctatgctgtgctgggggaccgcttccacccctagtcagcttggattctccaaagcccaaaggctggatggctaagttgcccaaacagcaaagatggcagcctggccctccctctaggagctccatcccagggaagtttcaagtctctgttggccagaaaacaccagctgaggtggcagaagaccccagttgggaggtcccgcctagtgaggaggagaaacagcattggggatcctcttaaaagagtggtctggccacattttcgtagagcagctgtgatgtgctgaaggacggcttttccccccagttggcttggactctccaaagctgaagtctggaatggctaagtcatccaaatagcaaagatggtggcccacccctccctctgggagctctgtcccagtgaggtttcaaatctctgtgggctggagaatacaggtgtgggtgtctgcaggctctggttgaaaggttccacctggtaaataggaacaggatcagggaccaggttgcttagaaaagcaacctggccacgtttttgtagaatagccatgctgtgctgggagatcccttctgcccctggtcagtttgaactctccaaagtctgaaggctggaatggcgaagtcaccccaacagcaaagatggtggcctgcccctccccgcagagctctatccagggaggtgcaatgctgctaccagtggctggctggatttccaagccagtgggtcatatcctgtgaggtgccgtggaattggggcctgcagacagtcacttctcagccccctggattcagcctctttcctagggttatgtatgggggtctatcctcctgctttgccatagttgcagctgcttttgttggaaagcctgggtatctaaggctcctggtctctgcatgtgcctgagtggctgctctgctgagattccacaaagctctgtgtgtcagactgaatgccgtggtggagtgggttcatgagggaatctcctgaactgagggttgcaaagatccgtgggagaagcatggatccctggggtccctcatttactcaccgcttccctgggtgggggatgttcctctggctctgtgttgatcccaggtgggccattgtcctgtcttagttttctccgttctccacgggtcaagttgtttccttgattagtcccagtgcaagtacttggatgtttcagttgagcgtgctgtatttacttgccccttctgtgcctctccatgagagccacacatgctagctgattctagtcggccatcttggccacctctcatcaattgtatttctatacatttgtgatgaacaatccaaaaacgaagttaagaaaataattcagtttataatagcatcaaaaagagtatatcgcttagggggaggtgtggtggctcacacctgttgtcctggcgcataagaaggtaaggccaggcattagagaccagcctgggcaacataggaagccctcatctgtataacaaaaagagtataccacttaggaatcaatttaacaaaagaaatgaaaaacttatgctatgaaaactataaattattgttgaaagaaattagagaagatctaaatatttggaaaaatattccatgctcaatgactggaagacgtaacagtgttaagatggcaatgccttaaaaactgatctacaaattcaatgcaatccctgtcataatcccagctgatatctggagaaatcatagatattttaaccatttttataatgttataaaatctgtattaagtttgattcaaaggacaggctcaagtcctgtcatttgaaaaaagtaaattatttgtaacactgtttgtggccctgaggatataaaagtgattaggacaaagtttctgtacttctggttatttatattctggatttattattttaaatatatagaagttttactctatggttatgaaatctgtayatttagatttttaaaaagtaaatatttagcacagtgctcttcactttcataggtaaaaaattttaaacatttctttactttatctgaaatttgttttcatgtatgcagaaacaattttttccccaattccctttatcttatattacagtgtggtaactactaccatctatttctgaatatctttctgttttattgtaccaattccacagtgttttacttttgtgggtttataatttgctttaaatatctcacctggcagggctgtagtcctctcccattactttttttaaatttaggggttctattataattgtgtggaaaagtctagaaaaattttgtaaagatgaaactattgccactagaattattttaaaccagtagatttactagggaataactgataccttaaaaatatttattatttttttaatccaaggaccataatgtatcttttccttccctccctccctcccttccttccttcctccctcccttcctccctccctccctctccctmtccccatcccccaccctccctccattcctccctccctccctccctcccttcctcccttcttcccttcctcccttccttcctctctctttctctctttctttccttctttcctcatttttgagatagggtctcactctgttacccaggctggagtgcggtggcatgatcattgctcagtgtaacctccaactcctcagctaaagtgatcctgctgcctccacctcccaaatagctaggactacgggcatgcaccaccaggcaaggctaatttttaattttttttttgtagagatggggtcttgctatgttgctcaggctggtcttgaactcctaggctcaagtgatcttccgaaaacaatttacctgccttggcttctcaaagtgctgggattacaggcatgagccactgcactccccacccacctcctacctttttctttgtatttcttagtaaaaaaatttttcccttccctcacttcaggcatcctattaaaatttttgatggttttatatagtgttcatgcttttctagatagggtattcatctttattttttattgttcttttagtttaggttattttacagttatattttcaaactccttattgctgatcttaaaagccrttgcattttaaactttttaattaaccatcttattctacatttggtagattaaagcattttaaatttattctcttgggtattttagttatacagccatttcatttgcacttcttaatttattcagtaaatactcatcatgcaaatactggaatggctgagaaaagagacattgactagaatattaataagtttctttgcagtggggaccttttggtgagtatagacatgggaaaatattcttacatattgagctccttcaagaaggcctaacgtgcttctttcccataactttttgcctcgtgtcttctaagtccttgaccattccttctttttttttcctgttaatcagtgaggatcatagcacacatagcacctcacttttcaggcaaaatagactagaaattgtttcttcagggaagactttctgtctacagtctttcaggtacctcaaaatggggtttttgcattacagcactccactctggctggtgtcagctgaaaactgggctaatttattttcatcctaagtgaacttgttcatagagaaatctcatgtgaccgtagacttgggttgacggtgggcyaataaaatgggggaaagaagcgatctggggtgtgtgttcactgctcatgcagtttgcttgtgccttcagatcttaattgggacataatataagtatgacttccttttgattcattcatttattcaacaaatatttattgaatgattactaggtgccaggcaaatattactgtcatcatggggcttacattctaggtggagagaaaccaacaatgaacaaaacaaatacacagaatgttaggtgataaagaaagtgagtgttcaagccacgctgatatttatgtaggcagaggtaagttagaaggttgtagatgggagcggcttatgtgtttgaagtttagaaaggaggcaagtggggctggaggtggatgagtgagacggggtggtaggaaatggggtaaagagagctactgttgctgcaacagcaagaaagctgattggggagggtcttgtgagccagggatgatgaaagggaacatgatagaaggattagcatctgaaagtgggggccactgactgtaagtaaaataaaggatagtgtgattgagatattggagagtgagctagggtaattcctttacacacaaggaggatgggaggacgcctcctctattgcaaccaaatggaaaaaggaaaatgtgggcagctgtggttatgtctgtacttttagcggtagagagttaagggattcttcatttactgactttattctctccaggaagtagaagataaagtatttgctgatagtaatcattttctcttctcatttccattagttctgtctctcattcctcttcaaagttttattactgttggctaggacttcagaacaatgcctttctcctagttgtgatgaaaatgccttttgtgttatactatgcatatattacttactgttcatttgtcctggtgaggaattattttattttagattttaaaaagattttaaagcataacaaataggtgtgtaattttcttgagtgccattttggcatctattgagatgatcacttaaaaaactcttggacatgtttacccttacatttatagatttcttatttaagcatccttgcattcctaagatatacttgattatagcaattaatacttttattgtaytgttgaagtaattccactaatttatgttatttgcatttcattgtctctgtatacatttattattgtcaagttattgaatcaaagctatactagtcagcatagaataagttagtaactctccctctgcttctcttttactttcttctattagcttttgcaattcttaaaagcccagggatgcattttagtctctctttccaattaaggagcgctactagccttgttttttacaaagtgtatgtctttgactcagggcttcagaactagcagctgtggtaagagcttaggcaaggttagacctggggatgtggtggcacctgggtccrgaggtgtgggatgtcaggacactcagggactattcaaaaccatgtggatactgagtgtccaatgcagtgactttgtcataaccctagaaagtcttataaagagattggcaggctcaggacagatactatgtgggaaactaaaatgatgagtagctaccattttttgagcataatcagcattatcagcactgcacattttgatgctattttcatttagtccttacaaaatcttctgggatagatattatgatttccttttagaataagagacccattttagaaaaagagacttaagcaatttatccaaagccgcactgttggtaggagtggggaattttactcgtatctgtatgatactgctaatattgcatttttaaaagagaaaactcctacggcttgcttttatatttgcagaatatattgtatattttatagtatatttttaatgtaaaggagaataaatatataaatattaaatattatttggttaattcagaattactatctaatttccaacacaatgcctatttagtaatatttaactgcttgtctccatctgctgttgtattagttgccaaaccgagccaaaaaattagaggccctaagccttattcggtgtaatttgttataggacatttagtacttagtacaggaaagcattccaggaaatcacgtagtattgtgagaaaggtgaggaaaatcatggcttcttttttattaataaaggtaaaaattttaagtgctaggtcaaggtaatttggtttcagagagggacatttctgaaggtgtggcttgggaggacaagagatgtacaaaacattgatgaggtcttgggtgatgactgcagtgtcatgagcaagggagcaggagagggtctttgtaagacaatgggacagtttcagtgcgttgtggcttcctccagcgccatgttgaaactggcttatgccagctcctaagatctgattgtgtgcctctctttccatgtccatattcagtgacatcatgatggtagctagaaattagtcatggttggagtatttacacttcagaaattggcaaatactacaaatcaaaactttttttttttttttttttttttttttgccyctagggagccagttgttaagcatttaccaggacaccactaattcctcctttctcaatacctgatcttactgtttactggttaagccatgtgtcaaactgaraaagcaaatgtgcctgagggtaatttgatgaactcctgagcacatttaacgtattacagtgttgctaatttaaraaacaatccatttggaatttgatatgccccctgaagaaggtgttttttttttttaagacaccagaatacaagtcactctttgcattaaaagttactgtaggctgggagcgatgggtcatacctataatcccagcactttgggaggccaaggtgggcaaattacttgaggtcagaagtttgagaccagcctggccaacatggtgaaaccccatctccactaaaaacacgaaacagccgggcatagtggcacatacagctacttgggaggctgaggcaggagactcacttgaacccgggaggcagaggttgcagtgagccaagcccaagatcacaccactacactccagcctaggtgacagagtgagactctgtctcaaaaaaagaaaagaaagaaagaaagttactgttggcgggttataacagtaaagtctctgggtcaaggttaaggacaaatggttttgtctcctggataatttttctgttaaaatatctctctaaatgctactatattgtttactctgctttatttcaatgacattagtataagaaaggaagatactaaaataagaaatcacaaagtaaataagttaagggtaactttaaattaccaaagtattctttcttttgtagaaggttttcttgctatttcttcctttcatggatgttaaatgtattattcatttaatttaccacctttatattgtatctattacataatgtaaagggtgtccatgttttaaaatttttacatgacttggaatttattagataattatcagtattgagtatttgggatccttggctggaattgctataaataattattttaataaagaaagatacccagtaacagaaatcagaaaacttgtttggaggcaccaagtaagcaatgatgaatcatcacattctgggagaggggctccacaatgggggtcatgtttagagcagccttagagcactgtgagtctaggcagactgagcaaaagggaagagatggattcctacaacaatactcaggagtcactaatatgagaacaatgtcaacttttcaccgatgagatattttaaggatgtttatagattagttagactttgtcttgatttctgtacaatgtcaaggacttgttctctagtttcataaattagactgatacatagcaaaaacattcaaatcttgttttgaataacaacattgaaaacactttaaaactacatttctcgctttgttttacatttaagtgtctgaatttaattaaaattgatattttagaataagataatctgcttttgcaaaggatttatgtttttttttttccattgtaacwaattaacctcatggtaataaatgtacttctgaaaacatttcttcttaaactacagctttgaccttgttctgcttcactgctggttccctattgctgctaaagtgcaggttacagaattcatagtttaaatctctttaatattgttattcttaaattttaatgtgcacaagatacactgggtgggcttcttawagatgcagactcctggacatcacccctgggaggtttgattcatgaagtctgaggtagggcccagagacctgctttatttacttatttatttatttgagacacggtctcactctgtcactcaggctggagtggagtggtgccatcatggctcactgcaaccttgatctcccaggctcaacctattatcctacctcagrctccagagtagctgggaccacaggggtgtgccaccacatttagctaatttttctattttttgtacagagatgggtttcagcatgttgcccaggctgctctcaaactcctgggtttaagcaatcctcctgcttcaatcccagcaagcctcctaaagtgcttttggattacaggtatgagccacaatgcctggccagatctgcattttcaaggactagtatcagttgcttctaaagctgttggtctttgaatcacattttgagaaacactctcaacagtttcatcaaattctctcactattgttttctttctctagacacctttccttcttccttttaatagagtttttttttttttcttgaaatgagcaatcgttctttttatgattttctaaatgttcagtcatggcatctgtatagaagtctaagcacagtgctttgaacataaccaggcactcattcaatgttgaactgtgttctcttgccacctgggcatctagctcagacaccagcacccctggctgtggtgtttcaagacctttcactatcagaggttgaaattctaatagcatcaaggttttttttttgtttgttacataaccaacccaccttccaggcataaacagagataaaaactatcctactgaaatccctgtacaaacaagtggtgcatatacacttgtccctcggagcttggcatctcctccttgatttctgataagccaaggaatttccatggtccccatggagtgtcagacagttctcaagcacataattttaaatctggaaaatgtaactatcaaaataaattaaaatatattttgtggaggagttggataatgagaatgatgaattttctaaaaagtttgaggatcactggaatagaagtgttcaaaggcatttaccttttgggcagatgctttgtaatatttttccttgaatattggacacaatgtaataaataaatgaatctccaaagttcccagttggaaaaacatgcttattagatggagagagatgcagatacatcatacatatattaaggtcggacttggtccaaatattcccacatttgtaacctatttcattgagaggtcaaaatggttcactttctgaaatcttataagccttgtttttgaggggaaaaaaaggtagttggtgctatctgggactgtcattcagacctactttaaatcttatttgattgtgttttttcaggtcactgttcttttaatatttgcatagcttaatagattcaacttacctttattttatgcctggttattgggataccactgtgaattgctggttatgttaattttttcttccttttttttccttactgacaacaccccaaaacttatttttaacccactttcttttgttactttttttccttggcttaagcattgattacacatttattaatagacaaartttctagtagtcaattatgtaccttccaatattgagatcaatttttgctcaattctcaaaattttgagaaaagcaactgatccaaattttatttcttcacagttaaatcactgccttttaacaccacatacatttccatttattagggaaattactaaatcaaaggtattatatttctctttgaagtaaatgaagaaataatatatttcagtagaattaccactcatgattgtgaggttaaagtgatttttgaattggtgwttatttgttctattttaggtttatttgtctcttgtctatttttggaggagatatggaggtttgtagctgccttgagtttccaaaccaacgattatacttctctgaacttagttccatttggtccatgtaatgtctactccagaattaatgtctgctaaaagagatcggatggaagaaagacaagttccttagttttaggacttttcttttttctattcccttcctcattcccatttagaaaaaataggttgtcttgaaatagttgatattgaagagaactaaaagacaaactgtagagttgttaatatctgtttaaatctgagaggaagaagtataatttttttaaagtaagaaaatgaatagacttgttttatatcacgcctgggtctatagttgataataattgttacttacctacgccttcttactcttattgcttccccttgggcctctaacaacagaaatcatagatcacagatgcccctgtatttgcatttgttagatgagttggagtagtctggaaggcattgtctctgtcttcccttcctcagggggcatgctttatccttcctgctgctacagcctgtcttcctccccatgatactcttattgatcagtagtcactgaccacgcagagaaggacaggttatttcatttattgctgaatgatatgatcagtgagtttaagaagttggttgttagggtgtctgaacagctaagaacagacgataattgggttattctgctgatttataagatggttttgtactcactctaggtgtttatttttcaaagtgaactaacttctcattaagtacttttcaaataattgtgttagtttaatattaacagtctcctgcaagcctggtggaatttttttctcattattttcccaaagtgtatttgtttcataaatttttatctttaagtttttgcattcatttattcattcatctcttcattaatggattttgaatgcctgcagtgtgctgcacaacagagaggttgccagtttgtgtcttgcagaccatgtttcagttgttttcctgttactctcatcttggctaatatttaaagagacctgagtttttctttttaacctctgcataattaaaacactggatgggattgtttccctcagttagcttcagtttttactgttacattacattgcaatttggggtgatgcaattctttacaagcactataaaaagttggacttagaaagaatgtatctctgtaaggcatgttgaaagcaacttgagagtctgttcttggaagagtctttaatctaaggcatatcaactacaatttccattttaaatgtctatttgcccttgtttctctcattccctatcaaaaccctttttcttgacatgtatatgatatacctgacttttcatcattgtactattttaacatttttatttttctgtgtacatgtctaccaatatttatattagataccatgtaggcatttcattgatcatgtactagtgcagaattcagaataaacataaatatatttaaatatgatactggcttattttgatttagaatgtaggtgtaatctttaaaaatggtctcaattgtttattattgtctaaattgttgtttgctttaaaataaaattttaaattattttgtatctgtgctattgagatcattaaacttgagtattcattaaaaaaactcatgaagaacacatacttaacaaatgtttattgattacctttcctcatgtgaaagctkcatttttttaggtttctgaaggataaacaaagctacacatatgacaaagtgsttacactaagcgggttatactatagtgtccaacaggtatggtgagcatatgttcaaattgaggatggctaggaaaaaaatttacaagacaaatacatggtggatttagcaaaggtggcttgggtatttattctcacctgttgggcactacagtataacccttttaatgcttagccaaatccttaaatacttcctggatactmtaatagcagagttacccacaggagtgatatgaagaaataatatgactgaggaaggtatacatactgcaactgtagagtgaggaagaatagtggaggtgaatgtttagaagtcaggcctggagaatactccccctcaggaaaagtcagccctcttcctctttgtgccgccccacttctggactgagatgtctaccatagagtccatcttggtgtgctattgactggtatatttgtgttcatcctaacaggatgtttgcttctcaagggcagagaccagtgtgtaaagcttaatatccttgttcatagtatccctactttatgggttcattgttttccccacatattaattaggraagaaagtgaatttattgaatgaacccctaaccaaaccacacatatttcccatttctgtgtcagtgctatcattttctaattatgcccaacagcagtaacttgtaatatgtatataataaaactgagtttctgtggttaaaggaaaacactcagatatcaatacatataaacccatatgccttttttgcacaagggggtttgtgattaaggatgacatactaagatttatattttgctattttttatattggagggtgacttctttgcattttcggttataaaaatctgtttgtattttttgttcatatgtttgaattgaggatggctaggtaaatgattcacaagactagtacagagtggacttagcaaaggtggcttgggtatttattgagcaagctgttggggaaagatatttgatgtcttagatccagaatgtttttaaatgctgctcacttgawttttttttttttttttttttttatggaataagggatctgatactctttttctgcttggagtctggacctcagttactgctctctgagatactggcacagagttaagcctattccaaggaaccatatgttaagtcctagttataagttgctgaaatgaaagttgtagagatatacagcaaacttttatgtaaggaaataagcatatgcaaaactaatacatgtatttaaactaacacaacctcaaaggaatraaagaacgtaagtggtacaccagtgcaaagggaaataataggtgaatattagatgttaattgaaaatttcattcattcattcatttcacaaatatttattgggagcttctatgtaccagacacatattgaacgaagtgggcaattttgaatttatggggcaagacacgcaataaacaaaactaagtaaattatgtagtattttagataatgttaaatgctatggaaggcaaaaagtttagggtaagggaactgggagtactggattgcagttttatggagtttttgtaygtcactaagtcttcctggagctgaaagggtgatccaagtggctatcttgaggaagagtattccaggcagaagcaggagccagtgcaaggctgggtgcagtggctcatgcctccaatcccagcactttgggaagctgaggcaggaggactgcttgtgttcaggaggtttgagactagcctgggcaacatagtaagacttcatctctacaaacagtcaaaaattagccaggtgaggtggcatgcatctgtagtcccagctgctcaggaggctgaggtcaggggaccacttgagcctgggtggttgaggctgcagtgagctgtgatcctgccactgtactcagcctgagcaacagagtgaaacactgtctcaaaaaaaaataaaaataaaaaataaaaaaagaaaaagaaaaagcctgtgcaaagccctaaggtggacacatgcctggcttactgaggaaaagcagtgagactagtgtggcctgtagcataggaaattcttgtttttgtcaaccaaaaataaarttctaagcccaccaaccatttgaatagacccctcttcttggccaagggcattccaaagttaacctgagaaactagttcaggacatgatggggaggggtagggtagtcatgcctcattatacccacctccgttttggaattaccaatagaacagactctttaactctgataagaaatatttacaatctattatctctaaaacctgctacctggaggcttcatctacatgataaaaccttggtctccacaactcttaccttaacccagacattcctttctattaattctaagtttttagacaataacttaactctttcaatcaattgccaatggggaaatctttgaatctacctatgacctggaagccccctgcttccaattgtctcatttttctggaccaaaccaatctatatctgatatgtattaactgatgtcttatgtcctgaaattgtataaatcatgtgtagcctgaccaccttgggcacatgttttcaggatctcctgagggctgtgtcatggccattggtcactcatatttagctcagaataaatatcttcaaactttttatagtttgactctttttatcaactttttttatgtaatgggtgaggattagaatgtcttggctgattactagtctggctaagagggagtaatcatttcccctatgaatgtattattgatttttgatagaataaattcaataaagtatattttaagaaaaaaaaagttgtttgaaacaggggtcagcaatctatttctgtaaagggccagatattttaggctttgcaggacatagtgtctctgttgcagctactcaactctgctgttgtactgtgaaagcagccacagacaatatataaatgaatgggtctggctttgttccaataaacttaatggtctctgatatttgaatttcatacagtcttcacatgccaggaaacactattcttaaattttttttcagccatttaaaacaataaaaaccattcttagtttagagactgtacaaaaacagatrtcagattgggttggatttagctcagaggccatattttgccaacttttaaacaatgtatttatttatttatttatttatttatttatttatttatttrtttgtttatttatagatggggtctcactctgtcacccaggctggagtatagtggcgggatctcagctcactgcaacctctgcttcccaggctcaagctatcctcccactacccgctgcagtggctgggaccacaagcgtgtgccatcatgcccagctaattttctgtatttttggtagagacagagtttcaccatgctgcacaggctggtatcaaactcctgagctcagcgatccacctgccttggcttcycaaagtgctgggattacaggtgtgagccaccatgcccagcctcaattccttacttaaaatacaattaaatttttgttaattttcagatgatatagtactctatagtgcctaaggaatgttggtccaataatcacttattattgtacaatattggaaataagttgtcttggtgtgagttcatattaaagtgtttttttttgttttctttttttttggkgtttcytttttttttttttttttttttttttttgaggcagggtctcactctgtcacccaggctagaatgcagtggcaaaatcacgtctcactgaagccttgaccttctgggctcaggtgatcctcctgcttcagcctcccaagtagctggaaccatgggaacacatcaccatgcctgactgatttttttttaaaaattattatttgtgaagggacctcgctgtgttgcccaggctggtctaraactcctgggctcaagtaatcctactgctttagcctcccaaagttttgggatcacaggtatgarctactgtgcctggcctatattaacgttttaatmctctatgaragtatcctacatcattgcatttttttttccaagaaaagaatgatgcaaaattagagaaaccaattatttgcatttttggttcacagggtttcatttaagagactattgtatagataatatatagcacagttatataaatgcatggatagtaaagagttcagaaacagaacagttaaccattggaaaaagtgttaaatccagtaasatgacaaattcaaatgtttcataaaggagaatttcagaaaatggatttttgcaattcacactytgttattgaagtcaacttcttaaaaatcttgtttagcaagtaattatgagatgttatttcaaaaattttaaatccattacatatcctcattcaacaatgaggaaatgggggaaatggaggaagttgaccgtagaagcagaggatgaacaggtagaagttgagttggtagtctaagaggttttttccttttttttggtttgaaaattactgaaaagtgtcttcctaaaatgatttttatttttatctcactcggaaacaagagacaagaggctaagattgggaataatggggattggcgtgggatgttggataacctacttcatatagggtgatcaaaaggactttctaaggaggtggcatttcaggtaagattctaaggattagcagtgatacatatggaaagtgggagagaatgttctaaacaggaggatttggtaagtgcaggaatcccacggtaaggcagtttagcatgctataggaaactaaagaagaccgacatggctggatcatagtgagaatgtaggagtgtggtgccttgcgcagctggagagacagggaggggaagatcttgcaagayctgcagttttaattttattctaattgcaatggaagtctctcaagagttttaagacaaggaccatcatattctgatttacattttaaaatttctttgtgcgtttcaaagaccatattgttaggaagcatttgttggggaggcaaaactttttctctgctctcttagttcagttacctggggcctgcaaatgaaactgacaaaagacagattagcaagaaaaaagatatttttattcatgtatgtactagagttcacagaaaaatgtgactcaaaggggtggttagaatttgggacttacctactatcttaatagggaaaggggagggacagaagggcacttactggaaagcagtcaacttttttggaagataggtgggcctttgggagaacatgggagatatgatagctttgtgacaatgtctattttggtgtggtgtggtatttggggagactggggagttgtgctaagctaatgctgattgacaggcattctttctctgcttatttgctgttggctagaagataaggtaattgtgaacttgtgataggcatgtgcttgaatattcctgtcttagtccatttgtgttgctgtaaaggaatgctgaggctggataatatataaaggaaagaggtttatttggctcatggttctgaaggctgtacaagaagcatggtgtcagcaactgcttctgatgagacccttagaaagcttccattcatggcagaaaatgaaggggagccagcatgtgcagaacatatgtcaagacaggaggcaagagagaaagagagaaaggaaagaaggatgaggctctttttaacaaccagctcttgggggaactctcatgggaactgatacagcgagaactcactcattactgccaggatagcaccaagccattcaggaggtatctgcttcmtgacccaaacacctcccattaggccccacctccaacactggggatcagattttaacatgagacttggtgggaccaaacaaacgatatgcaaaccatagcaatgcccaatgctaggcagtttggtgaactgtccgttacatattcatttcaattggtgcagtggtgggattaccttgcagtgggagctatcagaagtgacacaagaggaacagggaacagatagctattcctttaatggcagcatggtggaaggcaggtggagtttgtgatttttgtgagtgggggttgggggctgtctttggactgaggcttcattttttccctttatgtctctagccttatcactagtttcaaaatgggtgtaataggacttgtgttgtctgccgtgctgttcttatgtgaatttcttacagcatgtatgtatgttggagaaaaggatgtgcattatccatcaaggcttctaatttgactaggcttagatattttttaaaaatgttactcatagtttaagtgttttaaatttcatcataacagcctgaaaaaatcagtatttctcagcaaatactggagctgttatatttgaatttacttttcaagagcttattaagaataatttcaggcatattaataacaataacttcccttaatatttatgtagaatttcagaatttctctaagttaagataataaactagctaaacaaagtaaatttgtttgctttggccccaccctgccatttctatatgtttttactctttgcgcatctcctctctcccaggcgcctggactttcatatcttcctagcaccttgaaagcctttgcaagagcatctgataagttcatttacactcagatacaagtaactgatacattttaaagtgtttaatatcgcaaaggtctttgaattttagcagagaaaatgagaggccgtatatgttacagagatcaatctctactagtggagttttctgttgggaaagtgagggggctttgcttttgcttttcttcttgtttgtttgcttttaatctgtaggggctttttcaagctcttaaaattacaccacctatgtggctacagctctgcttctacccagggttagcacctaatggtaattccatcttcagtaagttcggagtgctttataaattatttctgttctttaaagcactctacttgtagcaaacagacagcaattacatctgtttgacagctgatgaaacaaatacaacattttagagaagcaaaataacatttgaaagcacctggaaaggtgttaatgcattatacaaataaaaattttgattggtaaattgtttaagacctcacaatttaagcaggctcactaaatttttaatcaagatactaatgtataatggatagggaaagtaggaggagttaatactgaaatgttttaagaatgatccaggttaagaattctatttatttgagtgcccaagttaaaccatcatttttattttttaggtttttgggtgcttgagaatggaagggtgatattgtaaactgtcaaatggccaatgccaaggtgaaaatgtccacattatatagataagcttacacctgaatgagcttctcattaatgaccactttagagagaaaatggatggcagctcctcacgaataacttgggtaattgaaagaaatgctgccaaggaaaacaactactatgtgttactggttctactggaaccctgttaacatacttcctcaaacagtttcctgaaagagccaaattcctgaatggtaatctgaccaaawcactaaacaactcctgtggttaaaacagaatccacaggattctgttttcattagaggaagtactaaggtcaagatttgtaaactacaactaaattatgaaaatgattcttcttcctagtattcaggcactcaagagttctgaaaaaatgcagtgttatgtgacttcttcaattatgtaatttgtttagatagattgtttaggaagtgcctcattttatttgattctcatatgaaaaagaatattcttatctgttacaatttttttaaaagagaaaagcataaagttactaaaaaataaaatcttttcttatcatacagagacctcagaaatttatcattttcatgagataaatcacttccctattcatagactgttttaatatgggaaattgtcgattatattttaaatataagtaaaatattactaatttttgtaccattaacaaaaacatattactccaccaatacctacttctagtttaagctcagtatataaatagaaatgttaggcctgggttcttcctttgaggacaaggatcaagaatccaccaagggtagggtggggagtgtggaattgcaagtgcaggcataagaaggggtagcaaataaacacatgaaaagatactcaacatcagtagtcttgagggaaataaaaattaaaaccataaccaggtattattttgtgttcgtttgagacaggctctcctgctgtcagccaagctggagtgcagtaaaatgatcattgcttactgtagcctggacttcccaagcttgagcaatcctcccacctcagcctcctgaatatatgggaccacaggcacatgccagcatgcctggctaatgaaatttttttttttttttgtagagacaaggtcttgccatgttgccagggttggtcttgaactcctgggctcaagccgttctcctgtcttggtttcccaaagtgctgggattacaggagtgaaccactgcacctggcctcacaatgatgtattattatacacctattagtatgtctaaaattaaaaagactgaccatacaaagtgttgactaggatgcggaggaactggaactcttacacactgttggtgtcaaatgtaaaatggcacaaccactttggaaaagagttttgcactttctcaaaaagttacacatgtaccatatgacccagccaatccactccaaggtacagtatttacccaagagaaatggatgcatttgtcctcacaacaacttgaatacaaatagccagaaactggaaacaacacaaatgatcatcaacaagcgaatggacaaacatattgtggaacattcatgcaatggaatacaacttagcaataaaaaggaattatgtgctcaatggctgggggaacattcatacaatggaatacaacttagcaataaaaaggaattatgtgctcagtggctggggtgaatctcaaaataatgatgcagcgtgaaagaagccagaaaaaaaagagtatatatagtatgattctgcagatggtctccaacttacagggttcagcttaacaaattgttgactttatgatggtgtgaaagcaatatgcattyggtagaaactataatttaaatttttatcttttctggtctagtgatatgtggtaggatacttggcagtcagtcaaccatgagatcatgaggtaaacactgatattcttcagcatactgtgttactagatgattttgcccaattgtgcactaatgaaagtgttytgagygcatttatagtaggctaggcttggtaggttcagcatattaaacgcacttttgacttaaaatattttcaacttatgatggatttattaggacataacttcattgtaagtcaggggcatctgtatttatataaaaatatagaaaatgcaaattaacctatagtgacacaaagcccattagtggtttttggtggaggatgggaaatggttctgtgaggaagaaggaattaccaaggagcatgattaaactttttggggtgatgaaaatgttctttaacttggttataatgatggtttctcaggggtacacacgtgtgtacttacaaattgttcactttaaatatgtgtactttattgtatatcaattataccacaataaagctatgaaaatatgtgtccatatgccatatcgctctaattttgtggcttaatcatatgcaaaaactcctcatcttcctcttcctcctcctcctccttctcctcctcttcctcctccattttttggatggggaaaggagggtgtgctgtgtcgtctggtcatgctttgatttctgttctctgggtttcccaaacacattaggtaataaagacaacatgactaattacatacatttttttaaaggctaaattctctttaagatattgtaaactctatttgcctcatatttgttcagtacttacttcaaataataaaacctggtggttgctttatcagttctaatgatcctggtgactgacattccctcctgttcttttacctaagacatgatgattactttgataaaacacacactttgatctcaaggtagggaagatgcaaatctcatattctgaactctccaaataaatgtaagacttggtgcctacttggttatcaagtgacaaaattattgaaataggagccaaactttgaaatattttacatgcggtgttttgcattatgaaagtttcgtttgtcatctacttgattttctcttctttaactgtgcttatgtttggcaaaaccattctcattctctaaagtttaggggtttatctaattgttttctctagtggtcaatgagcatcttgagagtgaagaccatgccttatttatgttgtattctaaacacctccttatagctcctgggaaattyataggcatttatataaatgctccttgaatgaatgaatgtgttcccccaacatccttactgaatactgaatttgggatcttgtgaaatcctactcagtttaagctttagtggaggtgttgamaaaaaactaagctctgtaaaacatttcaaaaggtttattatgagcccatattaatgactatagcgcaggaaacagcctcaagaagtcctgagaaagtgagcttaagtggttacagattggttttatacattttagggagatacaaattgtaggtaaaatcataaatcaatacatagcaggtgtacattggttcagcctaaaaaggaagaatatcttgaagtgagagttggggtgttacaggtcataggtagattcaaagattttgtgattggcaatcagttgaaagagttaagctttgtctgaagacctcaagtcagtggaaaaatattcttgaattaagataagggaggttgtggagaccaaggttcttgttatgtagatgaagcctccaggtaacagccttcagagagaagagatggcagatgtcttttttggggaccttaaaatgtcacacttttagttaatcctttcttaaacctgggaaaagcctggctgcattaatggagattatctgcaaatgcaaacttcctccataaaagatggctttgcaggaccatgtcaaaatatgtcaaagaaatatacttggagataaaacattttgattttctttaggatctgctatctgtcatgtgatgctacatgagtcaggttggaatttggtatcttattgccacaaagagtttgttttttcggtcttaatgatctctgttttaatggtaatgctggtcagtcagttgtgtctaaactctaagagggagggggtgtaacaagacatgtccaacctccctttccatcacggctgagaattcaaattttcaggtttctctggggttcccttggcccagaggggatccatttcaatcggttggggaggcttaggattttatttttgatttacaggggcaaatacagtagaagtttgtattccatgaaaatttaataacacaaaatttagtacatggaatttwttataaatggaaagactagtacatttattggctattttgaagagagttattttgcaatatgaatcaatgaataacttatatcattgcttctttgcttctatagaaaccaaataactttctatgactgggacaggtagtacctctatgtttaaataaytattttctcttagagtgttataatttgtatttctcatcattaatagaaccagttttactgccaacatgaataaaacactctcctttttacattattttattctctcaattcagagagttagttattatgtcatggcttttggtaagaaatgagtgataattctaggtatttccatgatagtcctttgttggaaggaaggacttcaaaactttaaaataatcaaatttcaactaaataaaaattgccatataagagatgatctgctaaggtatctagaggactaacatctatgccctcacactcatatctagttcttgcagatttatttctttcaaacatcatatgctagctgaatgtgatgcttgctatcgcctacttatcacaaactttgctgctatttttttcctttgtaattaaatgccatatgcacaccttcaattaagataattacatttatgattttagtttagtcaagtcatctggcacttttcatgatatcagttatctgacctttaaatagatgagaacttagggaagcatttagcatgccccatgcgcaattctttttttttttttttttttcctcccaagatagaatcttgctctgttgcccaggctggagtgcagtggcgtgatctcagcccagtgcaacttctgcctcccgggttcaagcaattctcctgcctcagcctcccgagtagctgggattacaggcacatgccatgatgcttggctaattttttgtatttttagtagagatggggtttcaccatattggccaggcttgtctcgaacttctgacctcaggtgatctacccgcctcagcctcccaaagtgctgggattacaggccaccatgcctgaccccaattctttattttatttacaatacatcattttctgacctcatttaaaaaattttaactgaaggatttctagtagacaggaaagttgccaagaaggtttagctttaaaagaaatgcctttataataaatggcatagaattcccattatgcttttgttttaatttgttgtaggaaagtatgggatgtgggatttagtttcctcaccgttgtggtcattgtcctttttcatatactccagtttgtcagtaaagctgttaaagcatgacatccaatactgcatgcwatccctgtgggctcaacctagcacataactcagagggactactgccccttctgttgtggacattaacctgcaattaactcagtcttagatcacattaattttggggccaggacactttattactggttcatagtgaacttgcagcccattgtaactgccaaattttttttcttttttgcactttgcctggatcctctattagcattgatttaagaacagtactttgcatgtattatcatagtaaatctcttttgctaaatttgactgatgattccagcctggtgagataattttgggtcctgattctcttttccaatttggttgcagtttctcctttgtggttataataagcttactatctaacctcgtccaaattcctgggggaaataatgcttgttagaagtgggtcaaggagtttctggaatagcatcttgttcttcctcacacattcttacccttctttaatttctggatgcaaagtatattgttccttgttgacaaaatggaaaatgaaatcctcttaagatagtaaagtggctgtcaactgtaatgctcttaaatcactttgctgcttagtgctctcacagctgatacgcagttccctctgtgggcagcggcgttttacatcagatcaccttccatttcaatttagcatgcctgctcactcctgcaaggggaggtttagtccttggtaacaagtctagaaaattctaaattacaccaaaggaaaacaccaccaggagatggaggatttttaatgaaaacatattttcacagtgtggcatttcaagtagaataactagaattgtggaaactggggcaacattgtgttatgcaatttttcctgagaaagctaaaaatatgttttcagcagagaattaatgaattgtagtgatttgatgctaagcagttctgttttaattaaaatatttaacttactaataaaatgtcagcacaatttgaaggtagagaagttctgttggaattaaattaatattctcctttttaaacacctggctcagcatgttaaaataaaatttgaagtacttctgtgggcagtactgctaagtgatagcaaccttctaccttgtagttctagctaggtgggctcttggctcttactctcttatgagtaagtgagttgctggataagtgttatcccttagccatagaatagttgccataagtttactgcttgcatggctgcattggctaaatgaactgcttaatggtaggaaagctatgcaccactgtactttagaaaatttgataaatgtgcacttataaaagataatacatttcatcatttcaaagagaatatgattccctaaaatatagttattttaacttttatggttacacaaaacaatgataaatcaactcacttttttccaatatattaagtgcactgtgtgtttccagctgtgtggcagrtataagggcatcagagaggaatatgagatagttttggcccatagaccagaaggggagtcaaagacttaaatggtacaatgtggtcaataaaatgataaagctattatctatatctttatacatatccacacacatgaccatacatatttccattcccataactataaccatgtctattgtgggaatatggaggagagatacctgccctaataggtgagaggcataggtagcattaaaggaaaattttctgttgaagagatgcctaagttgaatcttaattagtagaagctaactgggctgtattagtctgttttcatgctgctgataaagacatacstgmgactgggcaattgacaaaagatagaggtttaatggactcatagttccacatggctggggaggcctgacaatcatggcagaaggtgaaagtcatgtcttacgtggcagcagacaagaggagagaggttgtgcagggaaactcccctttataaaatgatcaatctcatgaggcttcttcactatcacgagaacagcatgagaaagatccgcccccataattcaattatctcccaccaggtccctcccatgacatgtgggagttgtgggagctacaattcaagatgagatttgggtggggacatagccaaacatatcattctgctcctggcccctcccaaatcccatgtcctcacatttcaaaaccaatcatgccttcccaacagtcccctaaagtcttaactcatgtcagcattaactcaaaagtccacagtcgaaagtctcatctgagacaaggcgagtcccttctgcctatgagcctgtaaaatcaaaagtaagttagttacttcctagatacaatgggggtacccactggataaatacacccattccaaatgggagaaattgaccaaaacaaggggataaaggccccatgcaagtctgaaatccagtggggcagtcaaatcttaaagctccaaaatgatctcctttgactccatgtctcacatccaggtcacactgatacaagtgggctcccatggccttgggtagctctgcccctgtggctttgtagggtatagcccccctcctggctgctttcatgggctggcattgggtgtctgtggcttttccaggtgcatagtgcaggctgtcggtggatctaccattctggggtctggtggatggtgaccctcttctcacagcttcactaggcagtgccccagtaagggactctgtgtgagggctctgactccacatttcccttccacactgccccagcagaggttctccatgagggccctgcccctgcagcaaacttctgcctgggcatccaggcatttccatacatcctctgaaatctagacagaggttcccaaacctcaattcttgacttctgtgcccccgcagactcaataccacatggaagctaccagggcttgggacttgcaccctcagaagcaacagcccaagccataccttgcccccttttaaccatgactggagtggctgggatatagggcaccaagtccctaggctgcacagagcagggggatcctgggcccacaaaagcattttttcctcttcagccttcacaactgtgatgggggttggggggctgctgtgaagacctctgaaatgccctgtaggcatttcccccactggcttggcaattaacattaggctccttgttatttatgtaaatctctacagcctgcttgaatttcttctcagaaaacgtgtttttcttttctttctttctttcttttttttttttttttgagacggagtctcgcactgtcacccaggctggagtgcagtggtgtgatctctgctcactgcaagctccacctcccaggttcacaccattctcctgcttcagcctcctgagtagctgggactacaggtgcccgccaccacrctcggctaattttttgtatttttcagtagagacggagtttcaccatgttagctaggatggactcgatctcctgaccttgtgatctgcctgcctcagcctcccaaagtgctgggattacaggcgtgagccactatgcccggcccagtgtttttcttttctattgcatcatcaggctgcaaattttccaaacttttatgctctgtttcccttttaaaactgaatgcttttaatagcacccaagtcatctcttgaatgctttactgcttagaaatttctcccgccaggtaccctaaatcatctctctcaagttcaaagttccacagatctgtaggacagggacaaaatgctgccagtctctgctaaaacatagcaagagtcacctttactccagttcccaacaagttcctcacctccatctgagaccacctcagcctggatttcattgtctgcattttggtcaaagccattcaacaagtcgctaggaagttccaaactttcccacattttcctgtcttctgagccctccaaactgttctaacctctgcctgttacccagttccaaagttgctcccacatcttcaggtatctttatagcagtgccgcagtccaccggtaccaatttactgtattagtctgtcttcattttgctgataaagacatacccaaggctgggtaattgacaaaagaaagaggtttaatggactcatagttccacgtggctggggaggcctgacaactgtggcagaaggtgaaaggcacgtctcacatggcagcaaacaagagaagacagcatgttcagggaaactcccctttataaaaccatcagatctcatgagacttattcactatcacaagaacagcatgggaaagacctgtcctcatgattcaatgatctcccactgggtccctgccatgacatgtggcaattgtgggagttacaattcaagatgagatttgggtggggatgcagccaaaccatatcacaggttatgatgtgtgtrtatgtgtttgtacttgtatttttatgtgtatgtgtatgtatgtggaggcatctgtgtgtttgggagaacaaggaaaagggctgtgatgttcctgaaagtgagttggaacagaagcttggaagtgagaaacactgtgaggttgctggagtatatagtgtgtctgtgtgagtttaggttggagtgggatacacaaggagctygtggacaaagggaatccatcaaaggtgttggagcaaggggatggtatagtcagctttacatgctgagtggattgctgtgattacaatgggcaggatagatggaacatggcaagatttggggtgtgactgtggagtaagctgtccagatgagaggtgatagaactaccctcacttggccttggtgatagtgatttggggagggggagatcaataaatttttagaaagtaatgtcagatagatatacctatcttatatatcttttgttacattcgtttctaagtaccacatagtttctgctaatgttgcaaatcatatttctaaaaaattatggttttgaattaattctcatggttgaatattatgtagcagtaaaactattgaactgcagccatgtgcatcaacagtaataagtctaggagcataatcttgagtgaataaagcaagtcccaaatgaatgacttcatttgtataaagcttaaaaacaaaactgaaaaatgtgttggttagagatgcacaggtatgtaataaaccaatatggaaaaggagataataaaataaaattaaaaatcatggttaattctcatggaggagaaggtgagagaatgaatacagaagggggaagtatatgggtgaatggaatggtattggacagttttgattcttatattagtggtgggttcatgggtgctggttttattattatttttcattatatatatatgtcaaatgtagtattttgtattatttgatatattaaaaagataataagggaaaaacagatacataagtagaaataagggcaagatatcctcaggtttctagcttgggttacgggatcagtgatgatatcaaataaatagagacaactagaggtttattcaggaacaatgatgagctaaggttcttgaagcacatctaaacagatggatatgcaagcctgcagcttgtgggggaaaatctaggctacatatgcagatttgtaagtcataaatatacagttgtctttcaaaccaaaaaatggataaaattgccccggaagaattaaaaacaacaacaacaaaagtgaaaagaaagtaatcctgggaagcaccrgcattgaagtgtcaggagacagagaagtccataaagagaaggaaggggtcaaaagataggaggaaaagtgagtggcatcagggaggaagccaaggaggtaaagtgttatgaagggaggggtgattatcagtgttagatacaccaggccatttactacggtgaggtctggagttaggaggtttgtgctgaccttagcgaactctgtttcagagctgtggggacagaagccaactgaagtggggagaggggtctggggagccagacagcgggtactgtggagggggtagaggaatctttgtagaaatatgagtgttctggggtgaatagtgccctcccaaaattcaagttctttctcctggaacctcagtataggactctattcaaaaataggatctttgcaaatgtaattgggttaaaatcaggaatgaagactggattaggatgggttcaaatccaatgactgctgaacttataaaatgagaaaaatttggacacagacacactgagagaacacaatgtgataagaggcagagactggagtagtgcatccataagccaagccattgctgacaaccacctgaggctaagaatgacatggaacagatgcttccctagagcctttagatggccctgccaacacttcaacttaggcttctaggctataggactgtgaaataataaaatttatgttgtttaaagttaccccatttggcatactttgttatagcagccccaggaaacaaatataatgaatgataactagtgtgtgattaggtaaagagagggctccactttttataggatggatgagacttagtacatttgcagaacaagagaargtggcagtgttgaaaggtgcggactttaagaggtgattggatcttgaaggctctgccatcatgaatggattaataccttygtgggttagtggattaatgggttaattaatgggttattatgagggtggaactgatgatttcataagaagaggaagagaaacctgagcagatacattaggagagcagtaaaggataaagataagggagaaatagggaatgcttggtggagcacaatcctggcagtcccaagagccatgagctcaggggcccaggcagagttcatcggttttaaaatgaaaacagtgtactctgtgactggaagaaaaaaagcaggatggggtgaggtggtagttagattgtaggtaagagagcaggaagtaaggaagtgcatccttgatgacttcatttttcttagagataagttcttctgctgaggatgagggtaagggaggcagttgagttggaagtagtagtggaagtttggaatagttgttcaagaccagaaggctgaccagagactacctataattgacagttggcatccaggtctcagctgagtttggaaaccattgatttgtattaaagatgcactacactgttctgagatgtttccagacagcgctcagattcctgaggtttacagcaggaaaagtggctcctagagttgggattttataagatggatgcgatggagggatgttggtacaaggaagaagagaagaggatgttggtgagacaatgagctcatgaccagcagtgcactccagcctgggtagaaaggaagaggtagagggcggaaggacatgaaagactttatggtgacagtgacaagagcagccatgaggtcagctagaaacatacttttaatccatgtgtttttgacaaggtatggccattgtcatctgtgaacatttaatatcccatactgtactcagaactaaagtacaatagaaaataataagtgctgatgaggatgtggagaaattggaactcttatgcattattggtaggaatggaaattggtacagccattgcatgaaacagtttggtggtatctcaaaaagttaaacatacaattaactataatataatacagcaattctacttctgtgtatatactcaaaagattggaaagcgggggcccaaacagatatgtgcccaccaatgttcacagcagcattttttacaatagctaaacaattgaaacaaactgtgtccatccacagatgaatggataaacaaggtatgatacatacatacaatggaatattactcagccataaaaaggaatggaattctgacatttgctgcaacaggatgaacttgaaaacattatgctaagtaaaataagccagccacaaaaggacagtaccttggttcattatctgctgcctataatagaatacccaaaaatggataatttataaagaaaaggaatttatttttcacagttatggaggctgagaagtgtaagatcaagggattgcatctggtgaggaccttcttactggtgggggctctctgcagagtcctgaggtggcagagggtatcacatggttagggggaagagtttgctaatgtatttgctcaggtttcactttctcttcttatgaaaccattagtttcatcctcatggtaacccattagttaacccatgaatccattaatccamgaatgtaatcatcaatttatgaagacagagctttcaagatccaatcaactcttagaggctcctttcactgctaccgcagtagggattaagtgtctaacacattcagtttatagacacattcaaaccatatagacagatactatatgattccacctatatgaaatactgagaataggtaggtaaattcctagagacagaaaatagaatagaggttaccaggggttggaggaaaggcagaagagagaattattgtttaggagaacagagtttctgtaagcagtggtaatggtcactatcttagtcaatttgggctgctataacaaaatatcacagactgggtagcttaaacaacagrcatttatttctcacggttctggagattaagatgctagctgattcggttcctggtgaggcccctctttctggcatacagatagccatcttcattccatgacctcatgtggtagagagaaagcaagagctataagaagagaccactataagaagattcatgagtactcccctctcctgatttcttctaaacctaattacctccccaagtcccctcctcccaatatgattacattaaaggttagggcttcaacacatgaattttggggagacacaaacattcagtctacaacagttacataaaactgtgaatgtacttaatgtcactgattgaacacctatcagaatggtgaaaacctaaaaactaacagtactaaatgctagcaaggatgtggagcagcaggaattctcatttgttgctggtgggaatgcaaaaacagtacagccactttggaagacagttcagcggtttcttaggaaactaaacatatccttaacatattatccagcatccttaccttgccatttactcaagtgcgatgaaaatttgtgtcyctacagaaactggcacataaaggtttatcacagctgtattcataattgcccaaacttggaagcaaccaagatgtccttcagtatttactttatagtaaataaactatggtatacccggacaatggaatattgttgagtgctaaaaagaaatgagccttgaagagacatggagaaaacttaatgcatattactagtgaaaggtatcaatctgaaaaagctacatattgtatgattccaactatgtgacattcctgaaaagacaaaactggagaaagtaaaaagatcagtggttgcctggggttaggggagagggagagatgaataggtggatctcagaggatttttagggcaatgaaaatactctgtatgatactatatggtggatacaacatttgtcaaaacccatagaatatacaacaccaagagggamccctactgtaaactatggactttgggtgataatgatgtatcaatataagttcatctattgtaacaaatgtcccactctggtgatgcatgttgatattgggktaatgcatatgcaggggcaggaggtgggatatatgggaactctgtactttctggtcaatttctctgtgaacctaaagctgctctaaaaatggtctttttttwaaaaagtggtgaaaataattatattatctctatatagatattatatatattatctctatatagataacgtatatatatatataaaatcacagccaaaaaaaaatcctaagagattgttttcaaagctgtttaccatgtaaaccaaaaataaaattccaagccccccatccacctgaatggatgactctcttgtcaaaggcattcaaaaawcctgaaatactagttcaggccatgataggaatgggtggtcagaggtgtctcattatatattcctccccttgaaactcaggcacagctgaccagcattaacattagaacagaacccttaggctgacaaaacagaccatttttgcaataagataccaacatgacagttagcaggccctaaaataaatcaaagtattttaccccaaaatatatttctttgacatrttttgaaatggccctgcaaagctgtctcctgtggggaaaatctrcattctgtaaagaatgctgttccctttccaggtctttttcctgatccaggagagaattaagagtctggcacctttttaagtctgataagaaacatttacagtctattctctctgaagcctgctactggaggcttcacctacataataagaacctcggcctctacaacctcttatcataacccagaaactcccttctgttgattcctgtgtttagataaactttcaaccaattgccagtcaggaaatctttgaatccaccatatgagctggaagccaccccctccacccctgcctttccagaccaaaccaatgtacatcttacatgtaccgatggatgtcttatgactccctaaaatgcataaaaccaagctgcagcccaaccaccttgggcacatgttctcaggatctcctggggctgtgtcatgggcaatggtcacccatatttggctcagaataaatctcttaaaatattttacagagtttgactcttttcactggcaactttagtgagaataccttgattcatggtattctaccaaataattaaaaactatactttgtatttttgatagtattttagtttaagtataaccagaaagtcgaataaacaggacacaagaggggcgaaaaggctttgtctagcttggtcccctcagtgatttctcttccctgggaacctccgttgtggcacctttttttttttctcccaactgatggaaaactgtgtctctgcttatgacacttctaacactgaatgtgtggattttctaaccaagcagttttctcaattctctgtggacaccagctgggtgtcctacaatttaattcaattctgacactaactattcagttaacacagactccacaggttgatgtctcagtcccacaagactgtcccgagttcaaatgccaatctcaagtagtgagtccccaggtaatccacacttctgtgcaatttgactaggggttcacatgcaaattaagggttcacatgaccccttcctcagattcaataatttgctataacagctcatgtatttcagggaaacacttttgtttactggtttattaaaaaggatattgtaggctgggcatggtagctcatgtctgtaattccagcactttgggagtctgaggtgggtggattgcttgaggccaagagtttgagaccagcccatgcaacatggcaagaccctgtgtctacaaaaaaaaaaaaaatacmcaaaaattagctgggcatggtgacatgtgtctgtagtcccagctacttgaaaggctgaggtaggaggattacctgagcctgaagaggttgaggctatagtgagccatgattgttccactgtaaagcctggacaacagagctagaccctgtctcaaaaawaaaaaaaagggttgttgcgggggatggatattataaaggatacagatgaatagccagaagaagtacatggggcgaggtccagaagggtctgaagcatgagcgcttctgtccccatgtagttgaggcgtgtccccctcccagcaagtggatgcatttaacaatcttgaagctgtctgaaccccttcagtgagagtttttatggaggttcattatatagatgtgattgattaaatcattggccattggtgatctatattcagctcctctcccctccctggagattwgggggtaggagtgagaattccaactttctagtcatgtagttggattctctggcaacaggggtcaatgaagaatccccccattagcgtaaacttaggtatggttgaaagggatttgttatgaataacaaacgatacttctgtcatccccatgactcaggaaattccaagagctttagaagctctgtgtcaggaaccatgggcagataccaaatatatatttcttcttatgttgcattcaccacttggtccatagagatactccctgttgaagtccccttgccctcccaggtggccctcccaaacaacacttaaatgtcttttgggcagcttcttttcccacgtggcccacatctgttctatgggaatttttcacatattctatcctttgccctgatggtgcccagtctactcccacaggcttgagctttctctggcctaagccaggcacagaagcttccctctccctcagctgcaggatctcaagctctctgaaaggtctctcactaagcatgagggcagaagaaggcatcttcctcacttgcccttcatgggcagagggtggggttcacagatctccacttctcctgatccttgtattattatattctcagaagtgttaagggggcttgtcatccaaaagaccaccaggrtggctaaatagtagaaagaagagctttattagcaatagcagtttgcaaatcaggaagagagtctctggcatcgacccagggtattctccctttgaagtgggaaggtgcaggttggattttatgctccacagagttgtattacacaatagagtcatacacattcagaagtttgagagaaaagctatccatatttacaagaggagccaagtgcatatgcagtgggtaccatgtgtaacatacacactatgttcactttggggtggagtttcagcattaaaatgaggtggaatttggctctttaaatcaaagggcaaactataggacacaaagacagtttgtgtgtaacctctataacctggctgaaattggcttaaggtttgtagttgcttatcagagaaaaatgtttataaagccagccttctgttcagtcattgagtcgtagttttctgggttgtaaatcagagttaagagtggtcgaatagctcctattgttatggagtgtagcaagggtgtggtttttcttgtagccttaggaatttaggaagttgtcatgccagctgagccctgaaccctagacctgtaggtaacttttgtttccttaaccttagggtttgtcttagttgacaaaagggaatctattttggtctctcagatcacaggcctaagaggtaaaaaatcagttctgagtcattttttatgtcaattctacatatggtggcagtctcatacttacagatttccactggaactaaaacacttttcatgaagatgtgacttggtatggtgaagtgagctctggaccagtggtgaaatgacctgacttcttgtatttctaccattttttagtttgtgactttataaagaaattactttgttggggtgtagaaaacarttccccaaaatctagcttgttgacatgctgagtgctttgaaaatgaaaaggccttagaaataggcctcagaaccaaggttctgactttcctctgtctctctcatcctccttattttcccaagaagaagagggggagagattctgtctggaatttccttatctaagaaagtgtatttcacaaagaagtgcagttgttttaagagcacgctccctagaaatctcatcaaatatccaggaaaaatcaaccttcagagaaacagaagggattgggaatcgtcaccaagtcactatgcccagacagacttttcatctgttcttctgagtgcarytccaagaaattaactggggaaatttatttgcataataagacaacctttgttctgtgcagttctgtccaccccttaccttcccataacttgttccatccagctttcaaagacaatcatttacaaaataatatataccttacaggtccttatgtctctcctctgtgaagagagatttgaagcctcaatcatctggaccctctttgagtctcatactttgtatattgcttctgtgtttatgcaaattaaattttgtatgcctttttctcctactaaactgccttttgtcagcttatttttagcaaaccttcagtgggcacagaggaagccttccctctgccactacaacttaatctctttgatgatcactttccataaaatggttttgaagattgaatgagatagagcaaatgaagatgctttgaatgtatacatgtgctaaacacacggaaaatgctctgttgtgagttcaaagtactttctctgctattgaggcttctaatcagtatgattctgtgatgacagaaactcaaaagcttacctttttttttcttctgatactgaaaacttccatcttgtcaaaagacaaaattacaacaaatttagcttaaagatcttaactggcttttatttgtgattctagaatcaggcaactcctcattttacaaaatagaatgagtgttcccaatgaattgagcagaggttggtttaatagacagaaatggaccaagaaggcagaaacggaaaaccaaaaaaggctgggttgtttcaaggttacttttcttgcaaaggttaaagcagaggggacttcattatcatgccagctagcactggcttgtttggaaatttggctattatctctctcctgataycatggaaggttagagaaataacttagtgttggcttggtggtgtggaacttcagcttgagtgaccccattttggcttggtatgtgttgggcttagtgcaggagctcagtccaaaccgatggcctcctataacggtcttaaggaattattatagttggagcgaaagtccagtcttctgtcccatttgcttactaagctatactaagggaaaaaaaatgggactaaatttaaatattgtttttaattttctgttggaacaaatgagtgattgctatataaaggtgcatttcaagtaccaaatgcaaaattatgctattgttgtgttcttcaagtgtgaactttagtggttacagctgaaactcgtagagatgtctcagattctgccttcaattggcttatttagctttgatggaaaaacactttatttcttagaaaagctataataactgttatcattattttaataatgacatttacacgagctttagcatgtacatgctttctgggcacttgtctaagtgttttccaaatgtggggagagaaaggaggtgatccctttgctcctcatcataaaggtcatggctgacactcctataaaaaaatgacaggttaacaagagaaaagcataatgatttattaatgtgtataagcatgggaaccataaaaaataggaaaactcaaagaagggccacatggttgatgctaaagtaccctcttcactgggttaagagaagtagaggtgtaggagtaattggtttttagggggaatgaatgagcacaaagaacaatgataaatcatagtcaggatgaagttcctgtgagctctgagggaggcagtgggaacacgaggggctgaacttcactgtgaacaaaagttgtcttattatgcagatagcatctcccaggtaatctctggagctgccctaacaatagatgagaagtctgtctggacatgstgatgactcctagtctcttcattgggattcctagaaacggggggtcttaaaataattgcatttctttgataaagaagctttcttggtcatataaaggaaattctagaaagggtctctcccaatgtgcttcagcaaaaaaagattaaagaaacagataggcaagtgaaggccagagagagaccttggggctgcttctttagttcagcatgtcaaaacaccgtattttgaggtattgctctctgggccctaataaatatatggtcttatctaatcctcacaacaatcctaggaggtaggtgacactatccccattttacatagaggaaactgaggcacagagaagttacagtttacccagaacagtcagggttgtttggagtattaacatgaaataatgtgtgtgactaaaagcttggtgtgtagtacagcagattctcagtcatttttaatttactctaagggtcaagagttagtaaatatagaagtccatgtgactttggggctttcaytgggcaaaaccacaagttttggcggaaacagataaagataagcacttattcttatttggcatagatagttccttccttctgcatcctactgctattttcattttatmgatggaatactttgaagcacgaaaaatcattatatcttgaaataatttttaaaataatccaataacaaactcagaactactgaagaataataaaggtaagacaatacatattaaacattttaagggtaacatttttgggaaattgactttttttagctttatggaatattattatcattattatcatgatcattattatttccattctacataggaagaaattgaagcacagagaagttacaggttagccaggagaatacctattttccagaacttttgtggggtattaacagtacttaatatgtgttaatttacatactaacttaggtaacaagcgtgtgttaagaatawgtatataaaatgtgtttttggattcaaattttattttaaatgtgatagatagaaatatttttgctaagatatataattatcctccaaattatttttaggatgagtatgaattttcatatgcaatgcagttccatcttatgtaagcgctgtattctaaaattagcttttaaatcaaatatagggtatagtaagaatcatcattaggaccactgagctcaatattgtatatatgatgttgtgtatacaactaacattccttctaactttttactggtcactgtttttcaatgggtctcaattggatttttttaaaatttcttctttcaggatgttaacaaagaagaatcaagtagctattatcagaattcagttttgttttctgtggaaatctctttccctaacaggttataacaatycagtggtgtgcttgtcaaatttcagcattacctttatgttgaacatttaaaaaaataataacagtagcctacattttaaatatacttagtatgaaatgggcattgtattaaattctttctgtgcattatcttatttaacatttaaccacaaagaggaatgcattctatctcttacacttcttcataaatgctttatgctttcacttgttaatttcacacatttttatttttaaaaatttggtatgtgttcttatttgcccagccgtatatctcctatttccttttgttttttctctttggtgcttttgttaatcacttgtttatagttttaaatattctcttttctcctcttggttttttcccaattatatgaagtctcctaagtctaattcagattctaccctttctataaatcctttacagatcactctaccctaaaaagacctctccctttgtgaaatctacatagcattcatttgacaattattcattaagctgcttatcttgaaattttatttaaatcttttgcttaattttcacaagtttgtcttcttttccaactttggtaagttcttcaattatgaaatatagcttaacactttgtttccctatagtagtagttctttaattctttaatgagtagcagattttcatatggccagaaaacgccactcccaattgaaaggatatattacagaatggaaaataatctgaactttgtaacctaagaagcaaaatagtctgaattctgcaacctaagaagcacaatgtgtaattgaaggcttgctaaaaaaacaaaaacaaaaacaaaaaacccagaaaaccttatcacaaaagccaacacaggttttgggaaattgaaaatataatattttcatggtattaagcttcatacgaaaatgaagtccagacagcaacaacatactcttgagagtcttatcctgagttagtctctataactgattagaccagaaggggaggagatggctcataaaaagatctgcttctaaaaggaaagtctgagagattttgctctagagtgttggttcatactgaacgaggaaaagaacactggaagttctaaaatgctgaaagaggtattcaagacctcatagtctttgaaaaacagcaaatagtagttcagttttgacttggaatcattcattcatttattcttgtaatcatttctgtatccttaaggaatgttaaatcaaagatgtagaagacatagtcctactctctaagcactttctttgtagcactggagataaaacacaaacaactagttactacgctgtggaaggcgtaatacatgttatatgaatattcttgaacgtgttacttagccttctgggatttagtttctttatctgtaaagagcaagcactggctttggtagaaaatctttaaggctgtttctacatgcaaaatcacgtaagtagtacattcacaagatcttgaaaagctttagaggagaaacacattccttatagtggagagatcaagggaagtttcttagtggaaatgatatttgaagagggccttgttaggttgttttgataggcatatactataatagtgataaaaccagttattgagtgtttgctgtgcagaaggcagtatgcgaggcactttaaatacagattcctaggcttggcgcagtggcttatgcctgtaatcccagcactttgagaggccgaggtgggcggatcacctgagatcgggaggttgagtccagcctgaccaacatggagaaaccctgtctctactgaaaatacaaaatcagccgggcgtggtggcgcatgcctctaattccagctacttgggaggatgaggcaggagaatcgcttgaactcgggaggtggaagttgcagtgggctgagatcgcaccattgcactccagcctgggcaacaagagcaaaactccatctcaaaaacaaacaaaaaacaaaaacaacaacaacaacaacaacaaaaaccccagattcctgtggggaagagggtggagcagagttctctctcaataccctgaagttatttgcacaattctgtgtatatgtaagttagtacatttttatggggaaagtttccgtggcttttctcagatgcttaaagtagtcataaccccagaaacaagaaccgcagtataaagagtaggagatatgattcctatattttgggaaatgcccatatgtagggggcgggggaggagggatagtggtgctggtggaaagaatgaacagttgataacaaagaagatgttaaaagctaagaattggaatcaaagcctcttggaggggagagcttgaagtagtgacacacagttaatgtggggtggctaacagattgtaactgggagtcagaatgtctggatttaaatctttgactggcatctcctacctgtgtaacctcaggcaatttgtttaacctstttgaggctaaggcttttgctatttagattaattgttacatatttactcaattctttttttttaattaagggtttactatgtgttaaatgccttcattcatatattctttgatacagtatgaatttgttgagaccctatacctagttactgggagaattttggtgaatgaagcagaagaattcattctcttgccctcactgaaacctatgaaagagacactattttgcagtggagggaactgaggcttggggaagttaagtaatttctcagtcttgtgataaagaaattgcagamccttcaaacatgggtctgactccaaaatctttttttttttttttttgatacaagatctccctctgtcacccaggctggggcataatcttggcttactgcagcctcaacctccagggctcaagtgatgctcccacctcagccttccaaatagttgggtctacaggcatgtgccattatgcctggctaattttttggatttttggtagagacgggatttcaccatgttgcccaggctagtcttgaactcctgagctcacgtgatcctcccgccttggcctcctaacgtgctaagattataggcatgagccaccactcgtcgcccaaagtcttaatcactagtgtttttgttttttttttaatcactagtgttttttacttcagaatactgtaggcatggctgactcttgtgaggttaacaagaagaaacttactttatttcaggagtaatttacatataaactcaaaggttgagagagggatgctgcagatattttggatagacttctaaatttatgaaactactaagtattattaaataatgcagtatttcaaatcagtttttcatatgatgacacaatcagatcactgagtagtcactacactgttattgaaattgcagttttcattgtgatctatattattcatattaaggaccctctaaaatgagtgcacttgcttttcaagtaagatagtttttttctcatatatttttcatgactgtctatttttccactcccataattttatctattttgcaaaagaaattgattacttttcatatttaagtcccttttgaggggctctctcttttgagggtggttgtccttgtgagagagttttccattaagttcccattgagaaaattagtgactatcatagctaagtattaatttacatacaaattgagttaaagaaaaccataatacaaagttttggatccgaactttagtttgttttctttataggtgcatttctgttagcatcatttaaactgactgcataatgcattaggttttactgagtgctggctattcttgtaagaatcctctgggattaaaaacaaaaattatctaagggaaacttctaaatattttaagtttatcccaatttagataatttatacactagttgacctgttccattaattgagttttcttcatactarggacaacctttggttcttcttttttctcctcctccttctccccctcttcttcttctactgtttttttttttgagttggggtcttggtctgtcacccaggctggagttaaaggctcactgcacccttgaactcctggactcaagcaatcctcctgtctcagtttaccgaatagctaaagactgcacgtgcatgccaccatgcctagctaatgaaaaaaagattttttttttttaagagggagtcttgctatattgcccatgctggtcttgacctcctggcctcaagtgatcctyrtgtcttggcctcccaaagcagtaggattataggcatgagctactgcacctggccattgttttgctttttaaaaaactttcaagaaatgattgggttgactctattgcctgagtcatagaattatttctaccatttctaagcaaaagcgtcttatcagatgaattggctcggcattttagttttatataaccaattgtcatatgtccaagaatttccatgatatttacaagacaaaatctttatttttatttgtttagaccttttaatgtaagaatatgtactcttattaccaagttatactgtactgactaggtcgatgttgcttgggacatcattgataataaatatttttgtaggaccccaaacaatacttaagtgacttctctattagtaaagcgtttagaatagatatcactccaagttataagaatctgtgattttgttaaagtttaatacgtttatcagagcaagcatcatgggaacatacttgtgcttttagcaaaacatgttgtggttatatatgtgcaagcttgagccagaagaggaaaatttttctgaatgatgttacaatgttgcagataaagattcaaaagatagattgttttgtagaaactgacaagctgattctaaaatttatatgaaaataaaagaacccagaatagccaaaacaactttgaaaaataacattgaggttggagaattaacattatctgatctcgagacttattatacaggttccacggtttgtgcctgtaatcctagccagcagagagactgcttgagcccaggagttcaggctgtacagtgctataattgtgcctgtgaataaccattgcacttcagcctgggcaacttagcaagaccctatctcttaaaatgagggcttataaagttacaataatcaataatatggcattggcataaagagacaaatagatcaatggaacaggatggattcaaaaaatggatctacacatatgtagacaatggattttagacaaaggtacaaaggcaattcagtggagaaatggtagtctttccaacaaaggttactggaaaaaaatagatatttacatgcaaaaaataaactttgattaataccttccaccatacacaaaaattaagttggctgtttccagctgctaacaactttcaggaatttgtcatgatgactgttctcatactgctagtaaagacatactggagattgggtaatttataaaagaaagaggcttaactgacttayagttccacatggctgaagaggcctcacactcatggtggaaggtgaatgaggagaaaagtcacatcttatatggcggcaggcaagagaacatgtgcaggggaactcycttttataaaaccatcagctcttgtgagacttattcactatcatgagaacagaataggraagacccacctccatgattcaattacctcccactgggtccctcccatgacatgtgggaattatgggagctacaattcaagatgagatttgggtggggacacagccaaaccatatcattgacatttaaggagcttaccaaaaacacactaaagatctccttcaaatatttagatgaaataatgttggcggcaacttgtgtataaaattacatactcatagaaaaagttttttgtggttttttgagatattataatgtatccagcaatgcatattgtagctctgatattttctttaaaaattttttagttacgtatttatatacttagagttctgatacaactactacttaaatctcatttataaattttgttccttgtggccaagattctgtggggaaacagtattttcattttgtaaatcttagacttyctattgtatttttttgtattgaaatctgattatttgaattttcatgacaaagtctcatcattttgcttttaattactctatagatttttatttggcagatcatcttatttttcattattaaaacaaggactgacatttgctgtctcagaattagtacattcaattattcttaaaaaacattggaataactccttattcagaaactctttttgatattttcagtttctaaacttagctgattatcaagaggaagcaaaaaagagccttgagtacccaactgatatcacaaagtctttgatgtaaatctcatgcattacagggtcccagccttattctggcctttccagccttattttaaactcagaccatgcatactgggttattggatttctcagtctagagtaaaatataaaaccacaagtgagaatgggaatatggcttaaaaacagatgtgttgcgaacagcaagaagtgacaactgtaaacttgatagcaagggaagagacacaaggggagaaaaaaagcataaaatagcacataaaacactttttaagtaaacaaagtaatctatagccccaaatcattgaaataataaaaagtgtttaaattttctatccaattggaattagatagaaattgagcatctactatacggtttcctacatccttataattaacttaccttgccctttcaacagcttttgacatcaattctttcttgaaatttactctatgtctttggcttatatgaaaaatattcctggttttccttctatctctttgtttactctttcaggctcccttgccaatgcattatcttctatctggcctttaaggttgcatctgcccaaggctcctttttggttgtcatttcatattcttcttttgacaatctcttccacacggtggcttcaattacaacctgaacattacaackctcacatgtatagttcctgggctaaactccagactcatttttaactgactgtttgaaactctacttggatatttcaaatgtatttcaagctcagcatgtcaaaagccatatttataatcattttttttcccttatccacaaacctcaagcctcctccaaggtttatttgttgattccttcagtcatctactcattcatttatttattcatcaattctacaaatatgcaactggtttagttactggaaatacagcaggggtaagacagataatgctcctgttctcatggtgcttatatkccagtggatgaagacagacaataaaaaacaaatacgaaaaacttcagacagtgaccatgtgcaccgaagaaaaaaactgggcaatgtaataggatgtgattaagagatgctacttactttgtccagtcagggaaacctctctaaagagatgatattttggatgaggaaatgacaggaaggagccacacatgcagagatcagagggacaaacattccagaagaggwgcagcttatagagaggccctgaggtaggaagggacttggtgctcttgagctgcagaagggaggccattgcaagcagagcgactgagtaggtaggatggaggtagtgatagagatggcactggaggcagatgggtggcagactgtatcggactttgtagagtaggccagggtgaggaatctggatttttctaaatgtactggaaaaccaataaaaggctttaaacaggggagaagcatgatgtgatgtatgttttaaggagatctttccagctactgggtggagaatggattcaatggagcaagagtggagtcagaaagaccagttaggctacttttatggtagtacaggttagaggtggagcaggcttagaagtagcatggccatagtggaggcagtgagacggtgtttggaagagagctgaggaaaggaagctttgaacaggtatattttgagatatctattagacatctgagtggaaatgtcagttaagcattagaattagatatagacaaatctggaattcaagggagaggtgaatgtctgagatgtgaatttagaggatatatatataaaattttaaggcaatgagattagatgagatcacttagagagagaggatagagatgaaaaagagggtaagaaggtctagaaacaagtctggtgtactccaatatttagaagtgtagaagagaagggaaggaacagtcagcaaagaacsatggagaaagagcaatcagtgaagatggagaacaatcagaagagtgtttcagggaagaggaggacaatcgtgtcagatgctgccaagacatagaataattataataattatatagtttgcaacttttggccaagtgctcagaatgcttctttcctgttttctgtatttggaatatagtttatcttttataaaaaaattttgtgggtacatagtmggtagatataccctaaagaaaggaaatgagtatattgaagagatatctgcactgccatgtttgttgtagcatggttcacaatagctaagatttggaatatagtttatctcttgattgtgttttacgtggaaataaactatgagtataaaatagagttgatttttgttatactctttgagctcctttggaaaaaaatatagaactaagttgagctatgtaggtatcaacagctgctggattctgattgttgttttggatacttgtggtagaatattctgtaaaagtcccccatctctgggtatttctgtaagtgctggccttggtcttgtccaccagcactattccagttacctggggccccttaaccttcacctcttggctaagccttatccaggctttagaagcagaagaaaactgtaaaggctattgttcagcagtaaatttcaagatggcattaatattaatctctcttgaccctgaatactgttcaactggcttcggctttgtatcttgacaaaacagctctgccttccattccatgactgaatttgcatcttggttttctgcctagtttgcatttggagttttgttttaatttcctactttgccttgagagtaccagagccctgatcttaaaccctggtctctgtctccggtctgatacctgcttggcaccagctttttgtcttttatgaaatcttggcaccctccacttactcccatctcaccctattgttcttaactctcctactgagacctctaacttttacccactgcaggactccctgaggttaattgttttcttctttagatttcctttttttttttttttgattgctagactttccctgtttattttagcaatacagttgagttctgttttatatctgggtcctatgtaattaatatataactaaactaaaattctaggatcttgccttcaatttggaatgacttgatgggagcatttagaaattactatttttaattaacacataataattgtacatatttatggagtacagtatgatatttcagtatatatataccatgtgtaatgatcaaattagggtagtcagcatatccatyacttcagacatttagcatttcttagtgttgggaacattcaaaatcctctcatctagctatttgaaaatatacaatttattattcttaactgtagttccccttcagtgctacagaactctggaagttactactcctatctagctgtacttttgtatctgctccccaacctctccctatctcctttgccycccaacacttctcagtctctagtaaccactrttctactctctaattctatgagatcaacttttttagctttcatatgtgagtaagaacatggagtatttattggaagcattgttatatccaaagtattctgctttaaagaagaaagaaatctacagatttttttttttttttttttttgagacagagtctcactctgtcactcaggctggagtgcagtgacatgatctaggctcactgcaacctccacktctcagattcaggtgattctcctgcctcagcctcctgagtagctgggataacaggcacctgctatcacacctggctaatttttgtatttttcatagagacagggtgtcaccaagttggccagtctggtctcgaactcctgacctcaggtgatccacccgcctcagcctcagtggtgggattataggcgtgagccaccgtgcccggcctacagatgttctttactctaaatataataggcattagggaaacacagaagagtaaaatgtatctctgcctttgaggaaatatgtttttaaatatagtcatacatagatgctttatacagccagtgaattcagcttgttgcactgaagacagtcccttatgtatatgacccctgtactctgttttcactggagccctgtgctcacaaaacattgctattaaaacatttcagaaataagaaaactccagttaaaattttgaggaaccttgattcttagaataaagatggacaagagatcattttttcctagtgctctataataattcctttctacttaaccttgattaattaagacatatacatatttttactcatggaaggggcatattggaaatatttaaattcttacagtcatgctgtgcttttcacagatgattggaacattgcccaggcataaatgcatctcatccttcccccaaacagtttgtcagttgtttaacctagcataatttgtttttcatgaccagtaaaaatgacagtgctaaaatgttttaaaaggaaataaaaataaaatagaattatagctctgattttttaaatattctccttttttccttcctaatcattctttgatatagtaatgtatcttaacctttgcttcaattgtaggctatttttaacattgtaaaaacagaaaataatcaaaactaggagttttattttgtgaaaatgaaaacagagaaattttattttgtgaaaatgaaataaatttcaataagacaggttatactgcgacaaaataaaatttcacggatgcgttatcacggtttcaatgcttatgtacacataaccttcatcctttgtatgactttgtggctaggagatttaatgcactgactactcacattgatgctgggctgaagcctcaagttgtttgaggaaaagaccatttcatgtgcccaactatgaagcatttagaatgaaaggaatactgagaacatgtcaagagagctcatgccactggaaattgtacctttctgtaagaaagaatgtatctcaaaactataagatgagattgtgtaaccttcagacatgttagttcaccatagtataaaaccgtggtaaactatggtatactatggtttaccatagtatactatagtagaagacacacatttagcagctattaaaagatccagctattgatcagytagtacaactcgttctatagagtttgacttagatgctagaatttccttcatccccaaactacaattatcatcatagagacaagaggacacagatctatgagtctctggagctaggtagaagacagattacaggtagccctttcctgaaaagccaggtcagcttgttttgctgaattttccatcctgtaggttgaattcttttccaggaggctctttggtttccgtagaaaaaagtactttgtggttcctgccctatcggttttccagataggctgggcaggtctgaaccccagtgatggacatagattagacccaaattgtcatccctgctgtgattactctgaggtcactcatttaggatcactttttgcatgcatgtgtgtgtttgtgtgtgtgtgtgtgtgtgtgtataatgcattttgtatttatacagtattatagtagtatataaactgtwtaatagtacttatacagtttaaccagtgagatggttaaatggttaacaagtaaaccacatagttaaccagtaaagatgtaaaatgacttcagacaaatatgatcaatctctacagtcccctgatgaatttcacaggttcccaccaccatcagttctacctattcatctcatccatgctcattgttctgcctctttcctgttcctatggatgccctggcatgtttgtttctttctttctggcctcctatttccctcccctcagacatcacttcagcatctgtgccttctcacttcccttatcctgggtgttaccatttcagcctatgagcatgccattaatttgccatctttacaaaattctctcttgacttcacatccctctgtagctgccctctcccttctctcctcttctttacaacaaaactccttaaaagaactgttggctgggcacagtggttcactcctataatcccagcactttcagaagccaaggtgggaacatcacttgaggccaagaggtcgagaccagcccaggcaacacagtgagacctcatcactacaaaaaataaataaaaattagccagatgtggtggcacactgcctgtagtcccagctactcaggaggctagggtgggaggatcacttgagcccaggaggttgaggctgccttaaacctcctcctgaaggatcctcaagttgccaaattctaagatccattcttagtcctcatgttactggacatgttggcagggtttgatggacgtctcctcttttcttggctttgttttccccttactgttttctcctaccttctaagtctccatctcctgacctctaaactttggaaaacccagggcctggtactctgacctcttccctgtctaactcttgcttagtgatctcatcacttacctgacttgaatgactaccaaatatatatctctcacttggacttctccatgaacaaaagatgcatatatctagccgtgaagatatttttgtacaaattagaaaaagctgccctttcctcaagcacatgactgccatcttctggaaatttttcagagtagagacacctatccaaagactgaatatgaatggtgtctccttcagctgtgtggtcctcaaccttagtagcagtgctttttctcaacttggatgggtgtgtcatggccatcacaagcttagtaggtcccaacccacatcccatcccatcccatcccttctcatcctcttcccttcagtctttttctatttcaaactttttctggtggcttaggtcaaaccctttgaagttatccttgatgcttctctttctctcatatcgcagcttaaatccatcagcaaattctgttgctttttctttcaaaatacattagaatttaaccactcatcaccaccccactgttgccaccctggtctaagcctcagcagctctccccgggatgatttcaatagtaagcttcctttcttgctcatcattgtctgtcctcaacacagcatccacagttgtttcaaacctaggtcacagcatgtttctactctaccccaaatccttcagatggtctgccatctcactcagcgaaaaatcaaagtccttaaaatggtccacgggccctccacatccaggcctgtccacagcactggccttgtttcccacctccctcccctccacaccgcccggtgctccagccacgtggacctggctgtccctcaacatgccgaacacacatctgctttaggcactctgcccggatgcccttccatacagcatggcctgctgccttcctttcttgagtcattgctcaaaggtcactttaccctgtcatggaagccttccttatctataccacataaccaagcaacccctttcccagagcatttgctatccccctgctattttattttctccatagcacttagcatcacacacacacatattgtttactcttttacctgattagaatttaagcttcgtgagcctagagacttattttccccccttaattatatcccaatttctaaaacagttcttggcaagtagagtgatctcaataaatattaatcaaataaataaatgaatacaggaatccttgaatctgtctgggggacactattctcaacaagacactgcaaattgaccaaggggttgacaaaataaataaaaatacacaaaggtttgagatggtcctgaacaattatcatctcttgattccaagataaaagtattttcaagagtttgagaactcatttaaatctaatttgaaaattgcattgattttacacccttccggaagggcatgtttcctgcagagaaagcaagtaggtgccatctagtggcaacaaaggagatccacatttgtgttaactggaatgtatcgattagcagtgattgaaaaygtagttcctgatccagaagcttatgaactctatgacagaacagttgtgatagccataagtcttgaagggtgcattttccatggaatatatggcattgaaaaaaacacagttccatttcttctaaattatttctaatttttccttttaatttttgcttgttttctgggatttgacttcttttgttcttttgtttttcgtattgttttgtcctctacttatctatatactcttacattcacatggtactggcctaggctttgaatgggtaataaaataaaggctctatcttctgggaatttatattctaataaagacagtgcctatgagggtaagtatagaagaacatgccttatcttgatgaactgatctcttcaggccagatttctgcagcctgttgaggctttactgttggatatacttccagcattagaggaatgagctttcgggagacttagcttgctgtttttcagaaagtggcacattatatggagaaactaagatagaaagagaaatactcatgtccatgcatgttgtcaggaaagacagaaattaaatccgtctctgattctcattctaacatccaaaaagctaggtcatttcaattctttggtaaattaaagtagaaactttttggtccactttgggagcttgtgacctttccagccagagtggctggggttggtactgggaaatctttgccaccagagggcctgagtggtgatgtgacaaagcaagataagggtgtgaggcccaggaaggagacaaacttagggtgctgacactcacattaatgcacacggccttttcacagctgagtagcaccagaggacaaaagttggactagtggaatatgacaagaaagcaggtttcataccaaacataaatattttccaatcagagctttttccaatgagatcaaagtttctgttacccaatagtggatgggtccragcagagactggatgacaacctgccagatttgttgaacctatgaaggttctctgattctctggaagacctctttctccctgcacatgtaaaaatcctccctactgttcartattcagtccataccccacttccttttttgggtaccacagcttaaaatcatcttttctatctctacctttcttatcattttaagagcaggttagcatttacattatgctacctgcattaatgttttttctcagtggtctaatccttagctttttgagttaatgctaacctgcttgaagacacggaccacatctgagctaagtgacaaatgattctgtattgttatcttttagcattgaaggtgtatgtaagactcttttatcctttccacacagtgttaaatctaacccttgttgatctacctgcagtaactaaagtgcccgtgggagatcagccacaatagctctcttgctattgaccttgccatttcatcttcaagagtgaatattaaatgtttatgatgggtaatggtagtaaagctaccaataattgccacatctggctttttttttttttttgagatggggtctcactttcttgcccaggctggagtgcagtggcatgatcacagctcactgcagcctcgacctcacaggctcttatctggcatttgggtccaagatgcttaggcatagtctaagtttagtkgtacaattcttcattgagatattagataaactaaaatctttgtggagatttgtttctttgttagatttatactcatttaaaaaatctaatagtactgtactagcttttcttttaaattgtggtgttttttacatacctgatttctctcaaagtaggtacagaaattgataatacaccagcttgtaggatgttactgaaaatttaaaaacccagttttgttatttatgtagttattttagtgtttttccctctgctgagggatttttttaaaattttacattacaggtaaatatttgctttgatataatactctataacttttttccttgagaaattgtctttrtataagttgatgtggtattttcaatagtgtgtttttaagctaaaggattccatatattatttatttttaacaaattaaatgatttcccttaacttattttgccttctgaagatatatttatataacttggcattccatcctgatgaaatggtgatactgaagaggggaatgctaacagaactcagaggtatcccagatctaatgtctttaacaatcaggtgctgttgtttgctttatyatttggatagccaaaattttctttaaattatttaataggctagatggtttagggactggttttagtatttaattgcttatctgaaaattggcaaatttagcatctatagcatttgtactatgtttaatatttctaaagtattaattgtgattcttagtaactactgtgttctgtgggatgttcatgaaggaagaagagagaatattggatastttgacttataattaaagaaacttttataattatggcaaaaatgcatgaatttaagttgtgtcattttggttttatttttgtagaatatgcygagtttctacattgcaaaggaaagaaatttacagattttgatgaagttcgccttgagattgaagcagaaacagatcgcgtgactggaatgaataaaggcatttcctccatacccattaatttacgagtctattccccacacggtaagtaaaataataaaattccaaattcttctcctcaaacatttatactacattaattaacatacatcatttgtacagaagatacaaatagtgctgggtttctagggtatcctttggatactgcccattaatgttatggttcaaagagctcttaagacatttaaggagaggcagtaggagatgactttaataaaaacagaattgagttagtcatcaaattttttcttcatttttattataagcttttagaatttgagaagggtatatatgaaaacttccatttttcagtctttgctgaaatcttagaggtacatgttactatggttgcatcttcccctattggatgtcttgcagccatatatagtcctatttattttcttcctgagaaatcagctctgactttttcccccagactatcggtagaaacttataaattagataaccaatccataatgtgtgatgggaaataacctgtatgctgactaaatttttagtgggcaaattttcatttcttattccctacttagctctattgcttttaaaacagaatataaatgacataagctcaattatgacttcccaagggtacttggtgccaacattgtttatatggagaggttgggctagagtcatgttgtcactgactctgtttgtacagctgattcagtaaacccagggcaccacgaatggctaacagctttctactaggctaagtggttaactttctattaaaaaaaaaaaatgatactttttaaggaaagggcagtcttaccctgtgagtttttataccacttgaaggcaatgtataagactggcagatagcatatgcatttctcatttggtgttttaattataaccccctagttacagatatgacagctttctgagcaaactgttaggcatgcaaatcagtgcctttcaaattatgttaaagtgatcatttggcatagcacaatcatatcataaaaatagagaaaactagcaaaaccatttttattttatgctctttattctacacacatgggttggagttgttcagatacacaaagtagaaggctgagctaagtgacaaatgattctgtattgttatcttttagcattgaaggtgtatgtaagactcctttatcctttccacacagtgttaaatctaacccttattgatctacctggaataactaaagtgcctgtgggagatcagccaccagatatcgagtatcagatcagagaaatgattatgcagttcatcacgagggagaactgtctgattttagctgttactccagccaacactgatcttgcaaactcagatgcgctgaagctagctaaagaagttgatcctcaaggtgagtgtgtgactactaagatgagaaggaattaaagtgtcaggagttttggtatctttaaaggtaacataaattcttaagatttggtttcattataaataaattagccattattaatgttgttaaaccttttgtattttaaatagaaaattcagtatttaatattaaaaaataataaataattttagtaaagatttactaaaataatgaaatttatatagtcaaaatctatataaatctaagaataatgagatctaagaaaacaggcatttctaagcctcatgggctgcatattttaaaaagttggtaaaataaacttctggtacagcagaattcagacaatctactaattattatgagttacctgcatatgcttccagtgaaaaacctttgtgttttttactttgtcttgtttctttaaaataggaagctctaatgcatgtaagatattatttagcttataattatttgagaaaaaatgtacgtataagcagggatttatttggtattgtcatctcaatatccagaaaaggtcctttcttatgmgtatgtttaaactttttacttctctaagttgaataacgacagtttatcttcagagacctcagtgctggccttggtgtgtgtctgtttaaagtgattgtggaagggcattcaatgatgtgccctttcaatatggagatacatgttcttcagttctaggaatttttcttttttgataattaattgtcccaatttctttgttctttttatctgtagttcttattarcatgttagaactcctaaatgaatcctttatttcaatctttctcttctataatcatttctttgtctttttgttctactttctgcaagattttatcaactttatcttctgctcttctgattcattttagaggttccaaaagcatatttttactttgtgaatcttatttttattttttaaaatagcatcatgttcttgttttcataaatacaatatcttcctccaaggactttagtgagagctttttgaaggttttcttttgtaatctacattgtctgaatctattgttttctgattgtttgtttttgtctctgtctttgatgttagagacctttttcaaatgtttgtcgatcttttgccgcttgttcgtgcatgagagtggagcaccaaaaagctgatttatgtacatgacagggattcattgaccagtgggttttcccatggagtaactgtgctgagagttgaccattttgttaggagacttcctcaactgttaggttckatgagtattttctcctgagctggtctggtataagcctgatgtctagtgttcttggagccaagaattggtgggtcaggggatggagtgggaggaggatggttctcactattcagtgtgtacacttttaattaattcctctgctttcatgatggcattcctgaaattcttctggagtccagagtccctctggttcaacctcttttgaagcaagtcttcagtactctgctgaggttgaggaagggtagctatgtgggtgtgtcctctaggagccttcagccaattcttttattttcagctcttcctataccctagcattggttctccaattcttaggcctttccagaattctgcaatggtaactgtttttttcttcttggtttcctccaccatccctgaaactggggcttgtaacaagcaggtagaggctccagatgacaagtaaggaccatcaccaggactccctttacagcgtcagtggcttggaagagtcagattataaactgggactggaatctagttataaaaatggtgctgaaccattcctgtcttacagccttctttcccataggagattgagccatggttgtctgattgggacagagagagtcataccatcagtgaattctagtgagttcagcccagtcacattcctgaggagtccacacgtagtccacgtagaaaaaacaaactcagcttctcctactatattctcaaacacgcttctgactccagatgtgtggtgatttctccctactgcaaacaagcaattaattcttttctgcagcagacatcagctaggtatcctctgattaaattttattctgatactatttacctggaaatagcatcagatcacactgattgagggttcagtcccacaagatgacccccacttctgatgccagttacaagatccaggttgtttaccctgtgctctgactgactggctataaattggggtttctacaaccttcttcttgtgttctattaatttgctagaggggctcacaaaactcggagaaacagttctttgttataaagaatattacaagggatacagatgaagagatgcatagggcaatgtatgagaagcgatgtggagcttccatgttctctccgggcacaccatcctctagaaacctctgcatctccagctatccagaagctctccaaacccagcccattttggatttttatggaagcttcattatgtaggcatgattgattaaatcattagctattggtgatcaacttaaacttcagcccctcatccctcctaggaggtcatatctgttctttctagtgaccagtccacttgctgaagctatccaggagctgccagccacttaccaacccattagcctgcaaaaagatacttatcactttgaagantccaaggactttagtagttgtgtgctggggaatagggaagaagaytaaaaatgcgtaccgcaatatgacaatccagatgaagcttcatggaggactgcaaatgataccattcagtccctgatttctctttcgtcctaccttggttcagcctctttgaaattgtttcttttttaagataaattcttttcamgggtgacaagatggctatagatatcctgtctcacatcctcacaacttccaatcywgtagaagaaaagccattggagaatattttatttrtgtgtattatgaattttataataaatgtaaactaaaaaaattggccaactaataaatcttgtaaagtgayttcttaaaattggtttaacatattcatgctatattttacccctgttgtgcacatagggaatattaatgggcagtaactacatctcatttctcaggcttttcagaagaagattcatttatgacctaaaataaactcatgtgatcacagatcattaggtgagagcaatgaatgtttgtggagggagtcatcagtttgccagaaaggaatcaatatccacaaagtcattcccagtatattcgatgtgttgttatagcgtaaggaaaatatagcattgactgtcagtcaggagtatgtcattttatgccacaaatctactccagaaagttaaatgagattaaaaaaaaactatcataggcttggcttatttacaaactcatttttattaggtgccacttagaaattgtcatgtaaatgttcatgaacttacctaaaataaatctccttttttgtggatcattagaactgctgctccaccatttacagacctacttgcccccagtttttatatcctatatatggtggtcccaagaggagacttttgaaagttttggtaggagtcattactgatgagatagaatttatgtgtgctattttgccattctttttgtgtatgtcctatgtmtttttgtttctctatttctctgctactatctccttttgtgttaaatatttattttctagtatataattttaattccttggtcatttattttacttttttgttattttcttagtggttgccataggattacaattaacatcttaatttatagcaatctagtttggatcaataccaacttaatttcaataatacacagcattttgctcctatatagctccactccctccccttcctatgtgctattattgtcatacaaatcacaacttttacattacatgcctatcaacacagaaatataattatagctttatatgattatcttttaaatcagatatgagaaaaaagagttacaaacaaaaatacatttatattgtctattatatttaactatgtagttaactttactggtgttcttcagtttttcctgggtatttgagttactgtccagtgtccttttttttctgcctgaaaggctctcattagtatttcttgtaggctatgtctgtcagtaagggattctcttggtttttgtttatcttggaatgtcttaatttctccttaaattttgaaggataatttttacttaaagtttttttyctttcatcaatttgagtatgtcatcccactaccatctgacctccatggtcaaaattcagctgtcaatctcattgaggatcctttgaacatgattttcttctctcctgctgctttcaagattcttttttttttttttttgtcttttggcagtttgattatgatatctgtaggtacagatcttgttgagtttatcctacttggagtttgttgaccttcttggatgtgtagattaatgctttttaagtcaaatttgataaattttcagccattatttctycaactattctttcttcctctttctctcctcttctctttctgagaatcacattatgtgtatgttggtatgtatgttggtaagatgttttcaccaatctctgagactttgttcatgtttcttcattctttcttttgtctttcttttccttagactgggaggaacaatctcaattgatctgtcttcaagtttgctgattctttctgcctgttcagatctgctattaaatctctatagtgaatttttttatttcagttattttatctccagattttctatttggttcttttaaaaaaaaatttctgtctccttactgatattctgtatttggtgaaacattattctcatacattctttttgttctttagattattatttttttttagtttttaaaacatatttaaaatagatgatttaaagcctttgtctagtaatttcaatttctgggattgttcagggacagtttctattgactgtatattttcttttgggtgggccatactttctttgcatatcttaaaatttttttgttgaaaattagatatttaaataatgtgatgtggcagcactagaaaccagattcctctctcccttccagtttttgttgctgtttattgttgctgcaggtgctatttatttggttactaattttcatgaaccaattctgcaagtctatattctttgtcgtgtgtggccacttaagtctttgctcagcatttttttttagtggtcaggacagggatcttcttaaatactagagtcagtaaatcgctaaacatttaccaaagctctcaatgygcattttggggtatggcttcaatgctcaggcagacagtttacaactctgccttaatcctaacttcctgcttatgcagagctcaaggtgagctagaggtgagaatttaggatcttctgaggtctttgctgtgtttgcacaaaaccccaaacatgcatgtggctttctagattctaggttgtacatatatacaaaattttcaatggcctttgtggccatctcattcccaagttttccttttaagttttttggttagttttttctttctttctttttttttttgccccaattgttattgctccctgagacctgtgatgttgaacaattgccactgattatttttgacaaattttttctggggaaagaggcttttcacactgaataagctytgagtcaggtcaagtaaagaaaagccctgtgaatgggggtttttagggaactgctagacaggttaaatagttacaattgtctgaaaattgtatttttgatgctctccaaccccattctgtcccctccaggggtttctagggttctgattttcatcatgactgtggtgtttttgttttcaaggctactgtagagatgagagggggatgggcatagggcaagttcaaacaccatacggcttgttgttcttactgaaatccaggttttttttttttttttttttttttgagatggagtttttgctcttgctgcccaggctggagtgcaatggcacagtctcggctcactgcaacctctgcctcctgggttcaagtgattctcctgcctcatcctcccaagtagctgggattacaggcatgtgccaccacatccagctaattttttgcatttagtggagacagggtttcaccatgttgctcaggctggtcttgtactcctgacctcaagagatccacccacctcgacctcccaaagtgttgggattacaggtgtgagccactgtgcctagctagaaatccaggtgtttttttttttgaatatttactcctcagattgttgtaagcctttggttaatttccagagttctgaaacagttggctttaacaatttttgccagtgttctttcttactgcctttatggagaagtggccttttcagaggtccttattccagcattcccgtttatattcctcattctggtcctatacaactgtaataacaacaaacttttcatataacagtcatttgagttgggatggtgagggcaatctggttatgacatctgttaccctgttggtcttcaggaatgatttggttgactgtgcaagtggcctgttctcaccacttaatgtacatctttcctgatattttgcccttggctaagcaggatgacctatttagatagtagaggaccattcttcattctttatttatctgaattagaatcttatccaccaaggtacataattatcgtcttctgagaggtagtgtattttaggcagtagctactttgtactaaattaaatctttttgacaatagacaggcaattttcacctaaacgggatttgagtatattggaatatatgcttgggaagacagctcatcttgataagttaattataaattatttgcataataatattcagattgaaaacttctataaaataagtattattaaatgttgggatgtatttacatatattttatattaagtttcacatgaaattattctttcagtatatgtagaatgtcacaaatttgtggctagacaaagttcaagctcatcttttgcatcatttgtgaaaaatagttttactgagtagaagagggtttttagcataatttcaaggggaatggctatataatttgaaatgtcaaactcctagccatcagaattatatgatgttttgaatatatttttctctgtatagtggtctttacttttcaaagtgctcttacttttgctttagtttcaccagaatactagaggttggtatgggtgagatcctattttggggtaaggaagtttttctaggtaatatatacagtggttgaataacatacctgtaaacacaccatgtgcttatggtatagcccctcctctcctcctccagtactttttccacttcatcagaccattcctctgctaggtgccttattaaatgatgtagataaaaataaacacagggcttggaagcagatccatcacatcctgattgtgtgtccttgggcaagttatttaacttctttgaaccttattacttaatctctaaaatgaaatgaaattatcataacccttacctcaaaagtttgctataataattaagataaattattataaagataataattggctcggcatggtggctcacacctataattctaacactttgggaggccaaggtgggcagattgcttgagcccaggagttcaagaccagcctgggcaacatggtgaaaccccgtctgttcaaaaaatataaaaaaaattagtgggatgtggtggcgcatgcctgtagtcccacctacttgggagactaaagtgggaggattacctgagcccaggaggttgaggctgtggtgagctgtgatcacgctactgcactccagcctaggtgacagagtgagaccttgtctcaaaaaaaaaaagataacacttagtcgaaatagctaaccaaatgctagcagttattttcctcttgaaaataattaaaggaaactttaccaggctttgttattttatttgttgtatagaacttataaatttaataagcttttctttaaagcaatcagttatatttcataattcaaactactgcccacacccatatgatttaatgaggcttgataatactaaaaaatagaattgtaatagaattattttgaatattttagtaatgtgttatgcaataagcataatttcagattcatctgcaaatggctagattaactataggtgaaagaaggtcttaggtaggttggggctggggtgggatagaaggaggattatcctgagcttggcttgatttgcttcaggactatgctagctgctgctcatggatttagagtaaaggagcagactaagattcctagcacagtctcgccatagagagagcgttcagtgctttctcaaaggagcacttcctccagctattttgtttatttatttattggcaccccagatgggacaggaaccattcagctatttacagtcgtgctcatatacactaacaattcagtcactccctttgttagtttattaatttgttgcttaaaagacatttatcaggcatctgttgagccagcaaaatgctcctggtcagtagtgtaagttcaatgtgctgtatcacctggtagtacactagactagcaggtgctcagtacgtgtttctgattatcttcttgtttctccaccattctaaaaaataggctattggtttacatggcatcttgtgtgtgaagagtcacagaagtccctggatgatcagctttatgaaatgaacattttcatgttttaggggatgtgatttggcctgcagcatatattaattcaagtgaaatgagttgtgtaataacaccatgtgcatatgttataatccaaagtatgccagtcaggtggcatcaccccagttttctataggtggaattgagctagagaggtcatggaagttgatcactgtcaagcagctggtaagaggctgatgcatgataaaagtgcctgtctcaratgccaatagtgtaattctttccattatatcatctatctctgtctgttataagcactttattcagcgataatcatgaacacatgttagacttaaaaaatataaagaagccaaaatatgaaattttacaatactaaatatggtgaaacactgttaaagttacactgtggtttgctctaaacttytagatcaaatattgtgaatgcaggaaaaacaattggtttaggagttcacacttatgttactaaatgaatgcttcttgattacatccmcaaagcactcagtgagcattgtcttcaattggtttaatgtaattttcacttttccatatcagtttttaatgtggctacattgctttaattaattttaaaagattattctagttgcttgttcatttatttaacaaataatgaatgctcacttactatgtgtcaagtaccattcttatcawmaggaatacagtggtgaagaagacaaaattcttggccttctagagcttgtattctaatgggggaaacagccagataacagaaaacccattagtataatgtcaggtgttatgaagraaaataagtgctgcaaagaaaaatgaaacagaatacgggaagagagattgattgggaatgctgtcttagacagacggcctaaggaggcagcatttaagcagagaactgatgaagtgagggaataagccctgtgaccatctggaagaagagtgttccaggcaaaggggacagtaagcacaaaggaatgagagtggaactggcttgacatgttgaggaacagcaaggaggatgttgaggctggaactcagcagaaaagtgtggttggttctgcaatcagagaggtaggcagggcccagatcatgtggggttttgtagatcacaacagaggctttgtatttttttcaaagtgggctgagcagccagtggagggttttaagagtagagaggcaagatctgactgatgttttcatagtcagtgtggctgctgtgagaagaaaagactgaagacgggcatgaatgtaagcaaggagaccagttaggttattctatcagagaggtccagtagggggtgaggtgatgtgctttggaataagagaggaatggtactgagggaagaagttgtctgattcaaggtacactgtgaaagtagagctgatagactttactaatggtttgcttcatgtgtttgaaagaaagaagtcaaagatgactccaagggttttacccaaaggaacaggttaagtggttgtgtcatttactgagattaggaatattcagagaagaaaatattgtgggagatcaagagctctattttggatatgtaaaatctgagatgctcattaaacacctaagtggtggtattacatataagagactggatccagttcaagagcagagtttcaagctggagttatgaatcattgagttatcagtctatagtggtatacaggtttaaactgtgctcctcaccyctccaagaaagatatatgtaaagcccaacagtctactctcccccatcccatacctgtgaatatttggaaataaggtctttgcagatgtttttaagttaagtatcttgagatgagataatcctggatttagggtagaccctaaaatccaataactgatatctttataagagaaaagagagagatttaagacagagagagacaagayagaaggccatgtgaagatggaggcagagattggagttatgttgccacagccaaagaatgctaggagtcaccagaagttggcagaggcaaggaagaaccctcctgtagaggctttggagggagtcagcatgacactaccgacagctggattttggatgtctggcttgcagaactgtgagacaacaaattcctgttgttttaagtcacttgtttgtggtaatttgttatgacagccctagggaattaattcaggtggtgtctacagctttgagactagttgaattgagattacttaggagatgagtgtaggtagaaaagagaagagggccagagacagagccccggrgcactccagtattttagcagtggtgaataggagggaaaatagcagaggtgatgaagaagcggtagagaatcaagtgactgtggcattccagaggacaagagaaaaatggcttcaagaagggcaatgtaattggccatgccaaatgtggctgagagatagaggagggtgatgtggcaggtcaaccaggcctactgcttaggaatgtgaggaagcccagtaacagctagattgctcccaacctaaagacgtcaaagacagagcacccatatttctttgtccctctggcttgtcagttttccccagttctcacaggctgtattggacttcaaacttaaaatgctgctctctgaggagccaggaagatgctgagaagctgcatccattcagtcacttgtattcttagctcctgattcctttccatccactgctggaagattcagtagtaaacagaaagaaaacaaccttgaactcggtccaaatcatcctcacctccaatctttgtatcaaaactagacttttatgtttcacccaatggagataagggtggagaactgaccattggatctggcacttgaaggtcactggtgaccttgataagaagggtttggtaggaaagtctccttagagagggttcaaggaaaacttggctgtgaggaagtgaagacaggaattatagacagctcttcaaggcccactgtagagggaaacagaaaaatgaaacactaacaatagtagtgtaagatgaaaagaatgtttctgaaagatgggagatattataacttgtttgtgttttgatggaaatgatgtagaagagaaattaaattggtgatggaggatagagatgagataaatgcaggagaatgggataaaggcaggaaaaatgagtgagaaatgtccttgatttaggagaatgaggatgggatacagggcacctgtgagagtcctggccatagattgaagagaattggattatttttccattttaatcataggaaaggaagaggacatggagacagatgaagttagttgataaattgattagtggggagatagcttttgatcgtattgagtttatttatgatggctgaatatctgcctatcctggtaagttctaatgattgtataataaagacattatgtttacactgctgctcaaggtgcctagcagtgtcactgacatctgcttgttttatagatattgctataccctggctgaaccgttcacccttgagagacattcacatttcctgtatggaaagcagaggagttagtggtggtgttgattgattacttgatcatgagttcattacccatgaagactataactgtgccttttatcttctgagcacagcagtattttagcattacccatccagtttgtcatctacaatagagggctgttcaaaggcctcgctagggaggcaaatgtgtctggaaatccctttcacggtgatttatttcacagcaaatgaatttcatttctaaatctagcatgaccagaggtcttcctagagtataaaaccatcccaagaggaatgtgagacctctggctgggaaagagggcaccatcttctcttgagatgaaattcgtgaattgggccagaattaactactcagctggtggcagacttttaaattcatcttatgggggtgtgtccctacatacctccttcagcgtttgctttttgatatctccctcttaaatctggaaaatgttaaaaatccatgggtgatgtaaactgatattcattgacctttggcaacatttagcagatatccaatctgctgtctggtcatagagatggtggaggtgctgcttagttgagcagaagcttcaaacatccaggcattgtcaacactcagaatataaagaatatgtttataaactgcaaaaataaaaacaattcatggaggaaacctattttccaggtactatatctgtctctgcacctgttcttcaccccaattagatttccattttaccttaaaattctttgcttatttgaccaatttaacaaatgtaatagatgctaattaattgcattgagcgcccaaatgctacttgatatttattgaatcagttaatatgtatgaaaaaatcagattaaaaaatgacttcatatgtagcttatagaagccatgttttgacttcttcaggaatatgtttttgagctttttataatatggttgagacccataaactcaattataaaatagaaacaaagactaaacctgaagggtttggagtctttgaaaaatttgttttacaagttctatccaattcattgttcttttaaattgagaatttactatgcattgggcttgaacaagacaaacgctaagtcatgttataattcagcttgtttgcaaagagtagatcatttatctgcatgttgagaaatgggcttgcccaagtatagaggaacactttcattttaagctttaaaaaagtaaattgagtcttatttagatttgaaaatatgacaacaaacacattagctttataggcttaaaaaagctttttatgaaagtatatattctttgatatgctgatttaattgggaaaatgatatgattataaaatttactgtgaaaaaaaggaagaatatttttaggacttgaatgtgaatgtgtgagtgtaaaatttggatttttaaaaagtaagaacaaaagaaaaatgtgaaggcacaatgataaagtgaatgtgctgttaaaatagagcttgttattatcatcaatgtaaaaggcctcaacgtggatttctaatgcgttcattccttttttgccactgggggtcactgtaaagacgctgcttgaagaagttaaaaatktccctgatgctctttgtggagtttgaatgtagaaatttaatgtagaaaagaaacactgttcatgaaaaagacttaaaaaagtaagaagataataaatatattctctctttttctgaatttaattgccaattagtaacatgaatcttcatttttttcagaaattctctttatattaatatatggatgttgcattgctattcmaggtaaaagtgtttaataatgatgactttagtgttacagaataattgtgctcttatgtctttcttatttcaaagacattaaaacacaattaatagtttcctatgcaattacatcttactcctggattctgatgtgaccatgagtttctaacatttccattaatgtaatagctcttttaaaagttgttataaaaacatattctacaagccatccccagaatatataattaaactagattcatacagttattttgttggcagtgtaaataaaatatgacaatgaaaaaaagcgaaattcttctaaagttctgtaagaactccatttttcattgctgagttttaggatcttcccctccctcctctcctgccccctccccttcctctttttcctctatttcttccccctccccttcttgctctccaacatttcttgagtggctgccaggtaccttgaatacaagaaaaactatttttttccattgagataagagtgaagtaaggaagtgtacatgaggcctatatgtagatatctggagaggtatttgaataatttattgcctattgacatagattttttcactgtaagtggggagcaaggctatcagctgaggaagaactggggtgggggtgaggtaaggatgataagagagaagggggttgtgtaagacatttggggagaaatgtattttgaccagctgctgtggagaaatatggaaggagaaagtgggcagcactgggggactctattgaggccatagtgcatctgcaccaagcttagtggttgtgtaattcccaaaaccactcagcagctgggaggttgaagaggcaaatacttgggttgcttttagatcaggattttgcagggagggttgaatggaagataaaagtgggcaaaagagttgaggatattggcaaaataataattggaaagacagactgtgaaatacttggaagaaagtgaaataaaaaagaatctgtatgttttgaggaagatgaaatggtttcagggatgggcttctggacaagattgaagaatagcaatgtgttcctataaagagaagaaagaaaaatgggagaataggagtttgtggttaaagagatgtatattagagtttatgatttacagctggaacaagtccaggttataaatgtccaggatgtggtcatgggaggaaattgctaaaatggcctgcagttgaaaaattattgaatagaagcaggcaaggaactcaatagccagcggactggatacatcgtcctcatgcacattgctgctgcttggataatggcggaactaaggggagtgaggactaacatgatgatgctaaaaccttcaaaaaatgtgtgtgtgtgtttgtgttgaaaatgggtgttgtagacatttggtagaagacagcaacaagggggaatagaagctgctttacccagacgatgtcaggttccaaagcaatgttttaatgtgaaggtggaagatttgggtttggagaagcaccaaggagtaagaaaaattctttaatctctactcttttcctctaaccctgggctctgtggagcatgggagaatatacagtctctacctgaaaggcataaaaaagagractcagtttaaataaaggcaaggaagtgagagctattgtttagacaagagtgtgagtgtgttggagtaatttggtgacaataaagatggttccagatggcacagtgaaaaggattggcaaataggcagcaagaggaggaagcaggcagcatgttggaatgaaagtacaagctgttctgctaaagtaacagagaaacattctgaagaaattttgctttaataagaatttgcattaataaaaccataaacatataaaaattacattttaaaacagtacagcccccagtggttaatagcaccactctggagccaaactgtctgatttgaatcatggctccaccatttactagttgtgtgaccttgaacaaatttcttaatttctctgtgtctcagtttcctcctctgtaaaatggaataataataataccttccttttaggactgttttgatattaaatgagttaatgtctgcaaagtacttagtacagtgtctggcacttgataaactatataaaagtgttacgtaaaaataatttgttaagttggttaaaaagcgagtttgtggctcatggatttcagacttataaaattatttttctatcaggaattgttataaaggctttaaaaaaccaatagttttagcagttttaggaagcatatagctgttaaacttaaatctcactcagcaatgttgaccattgcattacacttccttctttcccttttctcctagggctgccgacactatcactcgtctaaggctccttgcacattgatgggttataaaggtgataaccaagtatgatgcacaaagccagagccaccctttcaaaaagcagcygtgttacctacacaattgtgtgtgtgtgcgcactggttgttttttaaaaagccaattacaattacaattattaaaagaaaaacagaaaattacaattttcagtaacagtgcctgtagaggtctgtataatgaaaatcacgttcctatttagtaggtcccaacaaaaccaattgacttaatggaaacttttgctgtagtagaaattcctgatcatggaggacagatgaccagaggagcttggatttggtttgtgagtgaaggacaaaattgactgagaaagatctgatggtactaactgtttacaagttaaccagctggaaccagttaaaagagtttcctcctgttgctgataagaatcactggatggtgttctgagcccaggacattttgtggtcaatagtcactaatatgaggtatgtgttcaggattccaaatagattgctgagggttgtgtgtggagcttgattagttattacctgaaatgtaaactcccatgagaaagcaagactgggaaatacctcacagtcccaagtccacagcagtggtgggtgcctacagggcaggcaattatgaagtctttctatgctggcagtgagggaggtttcttgattaaatcctaattgtgctttctaggaggaacgctcttgtctgttgtctattattcttcctgtgttcaacttgtgaaagtttcttccttgtccrttatcttctttgacatatctgaagaagaaatgggggattgtgaccttcttgagagattcacagctttcacagcctgccttcttcttgtaaaaacttggggtgatgaaagttgttttaagactcagaggctttttcaggccaggccttttgtttctttgtgaatttagttactttaaaaactcagtaagcttctctactatctgcttcttgttaattccatgtacaaataactgtacccaatgatttttcctagacacagatcttaaatctattttatttatttatttttcatgtggccaataccctccacccccttcttctgtctctttcaacttattgtggttaccttgaggctacctgagacagtaggcttgggtggggaagtatgcattctaagtgtaaagtttgatgagctttgacaaatgtcaacccatgtaccagaacattttcatcacccataaaatctcccttgtgtcacttgccagtcagtgtctattctagtatccaactcctggctccaagaaaccattgaactgttttctgtcactataaattagatttgtcttttctagagtttcatgtaaatggaatcatacactaagtactctttgtgcctggcttctgctcagcataatgtttttgagaatcattcatgctgctgcatgttttcagtagttcatttttttaaataggtgaattgtaactcattctgtgaatataccatattctgtcttccatttatctgttagtggatctttaggtcgtttctagttttgggctattgcaaataaagctgctgtaaatattaatgcacaagttttccatgttcatatgtttcatttcacttaggaaaatacctaagagaggaattgcacatattaaaaaaattttaaaaactactaagctgttctccaaaatggttgtacaatttttattcccaagagcaatatgagtgtttaattgctccacattctcaccaacacttggtgcttgttagttttattttcattgttttcattgttatgtctgtgaggcagcattgatgtgcatgtctctgagtgtcatcttagcggtgatgctgagcatcagttcacgtccttataggccgtttgtatatctgctttgtgaaatgtctgttcaaatcttttgcctattttaaattgagttgtgttcgtcttcttaggattaagtaatgagttaaaaatatttctgatacaaatctttcattatatatttctaatgctttctcatctatagtttattttctcatattctttaactgtatcttttgaagagcaaattttacttttgattatgcccaatttatcaagtttttatatggctcttttgattatgyccataatcacattagactttgcctaacccaagtttgcagagattttttcttttatgcttttatctagaaattttgtagttttaggttttaaaaaagtttaatttatttatttgagacagggtattgctctttacatatactggagtgcagtgatgcaatcatggctcactgcagcctcaacctcttgggctcaagcggttctcccatctcagagtcctgagtagctggccaggtgcatgccagcttcaatgtgtttttcatttgcatttccctgataattattgacgttgagcatttttttcatatatcagttagctatttgtacgtcttcttttgagaaacatctattcgggtcttttgcccattttaaagtcagatggtttgtttgtcagctattgagttgtttgagttccttgtatattctggatattaccatcttgtcagatgcacagtttgcaaattttttttttcyattttgtaggttgtctctttctctgttgtttcctccggtatgcagaagttttttagtgtgatgtaatttcatttgtctgtttttgcttttgttgmctgtactttcttattcttatccaaaaaatctttatctagatcaatgtcacgaagagtttctcctctgttttcttcgagtagttttttataattttgggtatacatttaagtctttaatctatttggaattgatttttgcatatggtgagagatcagagtctaatttcatacttttggatgtggaaagctagttttttcagcaccatttattgaagagactgtctcttctccaatgtgtgttctttgtgccttcgtcaaaaatcagttggctgtgcgtggatttatttctgtgttctctattttgttccattggtctagttttagccttaaatttaggtctgcaatttttttttttttgtatatggtgtgaagtaagagtcaaagttcattatttttcatatggatatgtaattactccagtaccatcatttagtttgaatggactgtcctttctccatggaattacatgggcatcttttgtctgaaaccaattatgtatgtttacgtatgtgtatgtttatgcatatgttataggtttaatatatattaatatatataatatataatatataaatattaatatgtattatataatatatattaatatattatattatattactatataaatmatattaatatattatattaaaatattaataaatatatcatattaaatattatattaattaaatattaataaatatattatattaatatatttatatattaaacctataacatatgcatatacttatttatatataacatgcatgtacttatttatatatacaatatatatwtatatatwatataatatattatatgtatttatatatwwtatatcatatattatatgtatttatatatwwtatatcatataatatatatatttatattatatatattatatgatatataatattatataatgtattaatatatattaaacctatatttataattctggactcactattttgtttcattggtgtctgtgtgtatctaaccctatgccaataatgtactatcttaattaccatagctttatagtaagctttgaaatcagatagtgtattttttatcattgttttttaaaataatagtttatctttttatttgaatttgtaatcagctagtcagtttctgcaaaaagcttactgggattttgcttggaattatgttacatctgtagcatgtactatccaatattctagcctttatccacatgtggctattaaggtttaaattaattaaattaaaatttaattaattaaaattaaaacttaataattggttcctcattcacactaccatatgtcaagtgttcaatagccacatatggtcaatgtcttggaaaagtcaatacagtacatttccattattgcagtaagttctgtcaaacagcactatcgtagaccgattaggagagaactgacttaacagtattggatgctccagtcaatgaacatctttttttttttcatttatttcagtagtctctgcagtatattatagatttcartttacatattttgcatatattttattaaatgtataacggtagaagtactattattggatgatgtgttctatagatgtattttaggtcaagtttgttgatagtgttgtttaaatctcgtatacctcttgatttttttatttacttgttctttgaattactgagacaggaatgttatatccttaactatatttgtgaatttattcacttcttccttcagttctgttaacttttgcttaggtgctttttaaaaatgaaactttcaatctctgccttttaattgtagcatttagaccatttacattcaatgtaattatcaatatcagtttatttaagtctgaagttgtgcaatttttcctctacctatattataaatctttctatatacaaaacacatgctatgttttctgcatatgttttaaatgacacccggaaagcattgacactatttttgctttaggttatctttcaaagatgttaaaaatgagaaagaaatattctgcatttatccatacacttattatttgcaaaggtttttttaaatacctttgtgtagatttcagttaccaacttgtatttccttcagcttgaagaacttacaatttcttgtaggacaggtctctgacaacaaattatctcagcttttctttgtctaaaaaagttattgcctttatttttaaaatatattttcactggatattgaattttaggtgataatctttttttttttgttagcactttaaatatgtcttctaatgtcctcttgctttcatagtttctgatgagaagtctactgttattagtatctctttgtgtgtgtctctcttttttccctctctgctattatggctatttttttttttttttttttttttggtcactggtgtcagcaatttaattatggtgtgccttggtatgttttgtgtgtgtgtgtgtgtgtgtgtgtgtgtgtgtgtgtgtagctgatgttctttgagctttagaatctgtgagtttgtagttttcatcaattattttttcttttcattccttttatttactcatgttcgtgttttattttatatttttaagaattttgtgygtatttgtaataactgtttaaatgtcatttgtgaattccattgcttctaggtaggattctattgacagatattttttccctgacgagaggtcatactttccttattcttcatgtatctagtggtttttggttgaatactggatattttgaattttatgggagtgctgaattctacaatattccttaaaaatgtgttggattttgttttagcagatagctatcttacttgaagatcaatttcatattttttgatgttcattttttcatttattaaagaataggtccatggtagagtttactgatatcaacctttctggtgtctctaataaatgcaacatattcaataagatctttccactgtagctggtgggaacttaaatgattcccatccctttgtgagctctgggaattatttggcttacagcttcctgaaagttcttttctcccctgccatgcatgtagaattactccttttgtaacctgtataccatgcatggatttaaaaaagacataatgggacccctatgaaaatttctggacctcctttttatctggcacactgtcctgcaaagtctagtaccttggtctccatgaactccatcgatgtctcctcaatttagcatgtccaatgtttaattgatggttatctccttggatttttcctccttgccttgtggcccagaaattacctccaagcagaaagtgagtaatgtctgaaaatgactgttttatatattgtatccagttttctagtagtttacagaagaaagatatgcctgaactctgttattctcttatattcagaaacagagatttccaaaccctgggtttaactgaaaattcttagtgaacctttgttgcttagagccttttcagtctcttcttctattgtttgtatcacaaaaacaggttagctttttcaaaaccaatagatccaaatttttagatgttctctaattcctttttatttccacttgcaaaatgataaatttctcatgtgaactcatatcattcttaaatactctgctttaagcatcaaggaacaatcaagacaaattgacattctgaccctttccaacagcttctcctttcaaatccaccttaaatgttatcacatgcagcaggtttacaaaatatgcaactactgcataacatgaatcttcatctttctaatttgcaacatttgtttccttaccatttaactttggtatgccagcttttcattatgtcagctctcttcttcacagtaccattgtttytgctaataacaccacaataagtagactcaaacatgtaatggtgcaaacaatagtcctaggtgaatgttcagggtgctgtggtatttcttctccatgatgttttgcagagatccagaatcctttcatcttgtcacccttagggrcgtagggagttattatagttagattcagcaaagggaaggcaaagcagcatgcaggagcacatgtgggaagttatatggaccaactctaaaagtggcacatatcacatctcacattccactagctagaattcaatcacaggtataacctaagggagattgtaattcaattgtaagaaggatttgcaaatgtaacttagctgtgtgccaaagataagaagaaaatagattcaggtagacaaagagcagaaagatttaagtgtatgtggattcttttttttgttgtttcttcatgtctcagtttattttggagtgcaaattctcagagacccacttcacatctaaatttccttatttttgaggtaattcttctcttgcctctttcccttttctttttccctctctttttcatgtctcttttttctacaaatattaaatcttccaagtactttgctagaatctggactatgttggtaagcaaggtagagtccctgccagcggagtgacagtaatttttatgttttctattatttacctaatattttacctagcatcatatacagtaatattacctgatgatttttaaaataaaaactgggttattcagaattgttgaaagtaacaagaaactactactcagggaaaacttagagaaaaaaagacaaaactcttcctattcatcacygtttgctttcagaattaaaatattccataatctttgccagacagaaagtaacaacattgatttcaaatcaccctccctgacaactcccatcaaaacccaaaacaaaaaaaaatgcattaactggaggacatctaatttcctaagtctgtttttaattttgctgtatacatttttatattaactctatattgatttttttcattgttgttgttccagtgtacgcagtgttccagattacttttctggcaactgctgatgtggtttgtggctatgtttcgtcccatttcttaattagatgaaatgacaccccacttataatttagttacataaaaatgggagaaatgtcagtgtttttataggaaaatcaccgtgctgacaacaaatctaggtaacatggtagaatggtatcatatatcttctctggattttgtatttcaattcttgggtgatcctaaaacaatgaataagcttattttaaaattaatttattcacttaataaatatttactgagttcttattctgtgtttggcagctctgtgaatagcttagaatatatatgtagttcctgtttttgaagagactatgccccggtagggaaaatcgaaatataagcaggctcctagtgttgtataagaactatgatttcagtgtacataggaagatttaagggcacaaagaaagggctctgagttatgcttgtgggatcctgattgaggacccattaatgaggtctgaaagaaattttgaaggataggtaggagttgaccaaaaaaataaagagaagggtatttggagctgatgggaatgggattataaaggtgaggggggcatgtgaagaagtaaaagtcattgggtttgactgaggcttagtattggagtaggttgaagatattgttgagaaatgaagctggtgagatcacaacttttacttattgaatgatttttatgtaccacatactttacaggtattatttaaattaatacactttattattttgagcagttttaagtactcagcaaaattaggcagcaagtacagagagttcccatataacctcatccccaccgtgtgcaacctcccctactatcagcattccacaccagagtggtatattgtaatcaattgtcccacagacacttgaacacacatgtttatagcagcacgatttgcaacggtgaaaatatggaaccagcctaaatgcccatcaatcgagtggataaagaaattgtggtataaatatatatgatggaatactgttcagccattaaaaggaacaaattaatgtcatttgcagcaacctggatggaactggagactgttattctaaatgaagtaactcaggaatgtagacataaaattttaatctatttgggtaaatacaaaggaggacaattactgaatcatatggtaataatatatttagttttgttagaaacttgcaaactgtcttccaaagtggctataccattttgcattccctccagccatgaatgagagttcctgttgctccacatcctcaccaaatttggtattgtcagttttgtggatcttagccattctaataggtgtgtagtggcatttcattgttgtttgaagttgcaatttcctaatgtaatatgatgttgaacatctttttcataggcttacttgtcatctgtttatcctctttgrtaaggctgttcaggtatttttctcattttttaattgagttgtttcttgttgagttttaagagtatttttgtgtattttggataacagttctttataagatgtggggtttcttttgcaattgttttcttctagtctgtgacttgttttcycactttttaatttttttttctgagcagagcttttaagttttaataaagtccccttattgattatttctttcatggatcatgtctttggtgttgtgtctagaaagttattgctgtaccagggtgatgtaggtttttatcctatgttaacttttaggagtcttttcagctttgtgggtctattayccaccttgagttaatttttattaggagtgtgaggtttgtgtctatattcatcttttagcatgtaggtgtccagttttttcagcaaaatttttttgaaaaaactatctttgctccaccatattgcctttgtatctttgtcaaggatctgttgactgtatttatatgggtctgtttctgggctctattttattgttttacatgtctattctttcactagtactacactgtgttgattactgcagctttattgtaagtcttaaagtcagaggtgtcagtcctccagctttgttcttcttttatattgtgttggctatcctgggctctttgcttctccatacaaaacttagaatcagtttgttgatatccacaaaataactgactgggattttgattgagatttcattgaatctatagattaagttgggaagaacyaatatctttgcaatattgagtctttctacttgttaacatgtaaatagctcttcatttatttagttcttctttaatatctttcatcagagttttgtagttttcctcatacggatcttgcatatattttgttaaatttatacttaaatatttcattttggggggttctaatgtaaatagtaatgtacttttaatttcaaattctgcttgtttattgctggtatataggaaaatgattgacttttatatattaaccttgtattctgtaaactctctataattgcttattagtttcaggagtgtttttgtcaatacttttggattttctatatacataattatgtcatctgtgagcaaagacacttttatttcttcctttacaatctataaagagttatttcattttcttttcttattgcattagctaggacttccagtatgatgctgaaaagcactggtgagagagaacatttttgcctttttcctgatgtcagtgggaaagctttgaggttttcaccattaagaatgatgttggatgggcacagtggctcatgcctgtaatcccagcactttgggaggccaaggtgggtggatcacctgaggtcaggagtttgagagcagcgtggccaacatggtgaaaccccatctctactaaaattacaaaaaaaaaaaaaaaattagccaggcatggtgctgggtgcctgtaatcccagctacttgggaggctgaggcaggagaatcacttgaactcaggatgcagaggttgcagtgagccaagattgtgccactgcactccagtctgggcaagagagtgagactccatctcaaaaaaaaaaaaagaaaaaaaaaagaatgatgttaactgtaggtgttttgtagatgtagatgttctttatcaagttgagaaagttaccctctatttctagtttgctgagatttaaaaaattatgaattggtattgaattttgtcaattttttctgcatctttttaagtttttctacatttattaataggatcatgtgattttttcccctgctttatcctattgatgtggtggattacattaattgattttcaaatgtttaactggcccagtatttctatacttgggataaatcccactacattgttggacttgacttactaacattttgttgaggattgttgaacctatattcataagagatattggtctgtagttttctttgaatgtctttatatggttttggtattagggtaatgctggttttatagaaagagttagtatttcctctgattctaacttctgggagagattgtggaaaattggtatgatttctttcttaaatatttggtagaattcatcagtgaacccatctgggcctggtgccttcttttttggaaggttattattaatttaatttatttgatgaatataagcctgttccaatcacctatttcttctggtgtgattttggaaaattgtgtctttcaagaaattggttcattttaaatttatttttaattaattattgaaaaaaaaccatcttaatctgtcacccaggctggagtgcagtgttkcaatcatagctcattgcagcctcaaactcctgggctcaagcaatcctctcacctcagcctcctgggaattggtccattgtatttaggttttcaaatttatgggtatacagttgttcataatattctcttattattcttttaccrttcatgagacctgtagtcatgtcctttctttcatatctgacattagtaatttgcatgctctctctttttgattacttagtctggctagaggcttattgattttataaatcttttcaaaaaaacaggatttagttttattttctgctctagttcttattatttctttcatttccttactttggatttaatttgctcttctttttctagtattctaaggtagaagcttagattattaattttagatgtttctttttttctaatatcttattcaatattatacayttccttctaagcaatgcttttgttgcattccacaaatttggtaagttgtattttcatttagttcaaactgttttttaagtttctcataagattttttttacccatatgttatttagaagtgtataggttaatctccaaacattttgaggttttccagctatctttctgttattgatttctattttaatttcactgtgatctgataacagacattgtatgatttctgttcttttaaatttgttagggtgtgtttgttagtgtctatcttcgtgagtgtccatgaacttagtcaagttcatgtgaactagagaaaaatgtttattctcctgttggatgtagtagcctataaatgtccattatatccagttgattatgttgctttttagttcgactatgtccttccttacggattttctgcttgctggatctatccatttctgatagaggagtgttaaattctgtaactgtaatagtggatccatccgtttctttgcagttctttctgtttctcctcaggtatttttatgctctgctgttagattcatacatgttaagaattgttatgccttcttagagaaatgacctttttattattatataatgcccctcttttctcttaataactttccttgctattaaatctattctgtcggatgttaatatagccaatcccagtttcttttggttagtgttagcatagtatatctttcctcatctatttacttttaatctgtgtgtttttatatttaaagtgaattttttgtagataatatatagttgtatcttgttgtttgatccactctaacaatctctgtcttttaattggtgcatttagaccattgacattcaaggtgattactgacacagttgaattaatatctattatatttgttactacttctatttgttgcccttgttttctttccttgtttttgtatcccactctttttctgccatttgtgcctttagttgagcattttatgtgattccattttatcttctttcttagtatataagttgcacttttctaaaacttctaagtggttgctctagaatttgctatatacatttacaacaattcatgtctactttcaaataacactatacactccccgacttatgattatttaacttacaattttttgactttatgatggtgagaaagtgatagaaattcagtacacttcttgacttattatggtgtgatgtcccaattacaacyccattgtaaatacaggagcatctgtaccactttaagagtagtgcaagtacctgataataacaaaataattttaattctttcatcctgttccttgtattgtttctgtcaaatattttatttacatataagcatatgaataggaataaaatacattgttgctattattttgaacaaactgttatctgttagatcaattaaggattgttaccttacttattccttctctgattctcttgctttctttatgtagatctgagtttctgacttaatattattttccttttctctaaagaatttcttttaatgtttccttgtgaagtaattccactggcaacaaacttccccaatttttctttatttgagaaagtctattactccttcacttttccttccccttccttccctccctccytccttccttccctccctccttccttygccccctcccttcctccctcccttcctccctcccttcctcctttcttccctcccttctttccttttttcttcctttcttcctttgttccttccttctttactttctctctctccttcttcctctctgtcctctcttttctttctctctttccttctctcttttcttctttatccttccttccttccttttcctttcttttttcttttcttttatttcatgagtactggtgcaccaggatctccttcacttttgaaagataattttgcagggtacagaattctaagttgatrttttatttctcagcactttaaatacttccaccttttcttttgtgcatggtttgtgaggaaaattctgacataattcttatatttgcaatcctttacttctttcaagatttttatttttgctttttttttttgtattttaaatatactatgcctagttatagcttttggggggcatttatcccacttgctgtyggagcttcctgaacctgtggtttgatatctgatgttaatttggggggaattctcagtcattatttctttaaatatctgttcctttctctctctcttcttctgcatatgttaaaccttttgtagttgtctcaccattcttggatattctgttctgtttcccaccctaccccctagtattttttttttcttttcgattttagatgtttctattgaaatatgctcaagcttggtgattgtttcctcaactttttccagtccagtcaaatgaacccaatcaaaggcattcttcatttctattagtctttttgatctccagcatttctttttattctttcttagcatttccatatctctgcttatattgcccatctgtttttgtaggctgtatatcttatctactagaactcttaggatgttaatcacagtttgttttttttttattcccagtctgataactctaacattagagttagagttctgagtctggttctgatgcttgctctgtctcctcaaactgtggggtttttttcttcgccttttaatatgccttgtaattttttcttgataggcagactgggtgctatatgatgtactgggtacaaggcattgtggttactaagctatagtcatgtagtggtaagatgtggagcgagaggaagcatgctgtagtcctgtgattagatctcatgtcttttagtgagcctgtgcttctggactcacaagtctcacaagtgcttcttagttcctgccccacccctttaggtgggaccggatggctacagtggactagagttgtgtatttttcttcccctatatagaaggctagagcaagctggagttagacatgtcctttgccctaatctgttaggctctggaaaaccctcagtagtataggttctggttaaatgacttctcttaaggtcagaccttgataagaagaacagaatggaccccgcgcggtggctcacgcctgtaatcccagcactttgggaggctgaggcgggcatatcactaggtcaggagatggagactatactggctaacatggtgaaaccccatctytactaaaaatacaaaaaaaaattagccgggcatggtggcgggcgcctgtagttcccagctactcgggaggctgaggcaggagaatggtgtgaaccygggaggtggagcttgcagtgggccgagatcrygccactgcactccagcctgggcgacagygtgagactccgtcaaaaaaaaaaaaaaaaaaaaaaagaacagaatgttgtgggatatttccagttgatcactttcctcctttccctaccagaagcataaggggatttttctctttaatttactgcgagaatttatttaatcctctgaaggcaaaactcaggtccctgaagctcatccactctgagccttcaagcgattcatggattacagtttaagttttcctgccccagcattgttttccrtggaggtttctgctcttgggtgtctgctctgttgagttgtgattctctatattcacctgtctctccaaattttgggaasagctaattgtctgtgatttcacttcwctgacagatctaagaagggttggtttttcagtttgttcagatttttacttgttgggatggaatgatttccaagctccctacatgccagataggagtcctgctatttaattttatctttcataaaggaagccttggctgggcacagtggctcatgcctgtaatctcaatactttgggaggccaaggcaggagaattgcttgaggccaggagttcaagaccagcctgggcaatatagcaaggtgctgtctctacaattttttttttttaattacccaagtatggtggtgcatgtttgtactcccagctcctcaggaggctgaggcaggagaatcgcttgagcctagtgagctatgactgagccattacactccagcctggcaacagagtgaaactctgtctctaaaaaaacaaaacaaaaccaaaacaacagcaaaataaaaaaggaagtcttttgagagttaaagggggttatttttaataattatcccaggacaaaaaacataaactgtaatgtatgattactgtattgatgcagttgcctactgatgaggaaactaatatttcagagctaataagaggtataggtgggatttgaacccakgcagtctgatccctgagtcagtgcacttatctctatattatgtcacactcacacttttggggtaccttgtgtagcttttcaaagtcttcactaggacctatcaatactcatcattgtggttgttctttcctgaagagacacataattaaaacacaatgtcacaatgatttattagctcttaatttattatttttaatttccttttattaggagggcaagaactgtgttaaattattctttagttattactgcatataacctcttctaaatctgcaagtttttctccttcctggaattctgtacttgccagagacatctagtcaaacttagttctgtaaacagtcttagatgatataacttagttggaaataacatagctaatcacttgtaaawtttagctaagacttakgaggcagaaaaatttagtgattaaaaatggaattaggttgctggatttgaatgccagtttcatgccacacagtctgtgactcttaggtaagtgtgattttcctctccaagtctcactctcctcatctgtatgcttgagaagataatagtatctatctcttggtggttgttttgaatcctatatgagcctggcacataatcagggctctttattttagctggatctttaggtttctagtgaaatgctttcaaagcatgatgactttaaaatcctttctgacagtggtttttaagatctatcaatgtaggtattgagtctgccagcaggagttcattgattattttaagctgcctatttgtgtaacttaatatagataagaaaatggtcccctttgccattttggtatatcactaagtatagatctagcttccttttcagatataagggagtagtaaagaaaatacttctataatcaacttttatttttattagagctataaatatatatagctttcttaaaagaaaaagtcagtgcaaaaggcttttaatagaaacaatcagtcccttgcccacccctcctgactcttgattattgatttccagaggctaccacttacaattcttttagctattgattttgatagttacctccatatttctatgtaatctgtttatattactattttttatttttcttagttttagatactctcttttgacttctcactgtagagaaggaggatttagctgtcttatatccttctcctatacttatgtatactcacacactcacatatgcacttatcctcctacattctactaaaagaatcatattttgctgaataaatttttataatcctgaaaatgttattcatagctgagctatgtggtaaattttggttattctttcttccatgatattgtcttttttgaggttgataattatctctgtttggtttgtttgcatagttttctgtacatctatcactaacgtattcccaatctcccctacagaagtctcaatctctcagtactttaaaaacattctggattaggtagttttatgtttattttcttggtagaggaagaaatctcttcaggactctctgttctctcattcccatagatatcaattgctctcttggtctcatactgggatctataccatcctgaaaacttccttcttttcttggttgtattcctgcttcctggatctcatgtcttcctctttattagtttgctcccttgttttgtagaacaygttctttaacagcgttcttaaaaaggtgaaagggaggtaaaatattttgagatttgcaagtctggaaatatcttttcctactgtcacgtttattgaaaatktagaattctaggttagaaatgatttttccctcagaatttcaaaaacattgctctattgttttttagtttccagtttgctgctaggaagactgatgctrtagtgattcccaatcctttctttgtgtcttttctttaacttctctggaaactttttagtatcttttatcagttcccagtattttgaaatattttactgatatgccattttgtgtgtatgtgcatgtgtgtgtgtgctcatttcctgtttggcacttgttgagtttgttcaatccataaattcctatcttttacttataggacattttcttgaataggatctctccaaccccaaactgtttctgtttgattttctctctttggaatgtcagttattcaaatatcgaatcttctgggccatttctctagttttaacaatgtgkttttttttttttccttgtttacttcttttttttttctttcattttctggaacaattccttgagtttttcttccaaccattttactaacattttaatttctgctctcctrttttcagttattgagattttttgcctggtgtttctgtttatggccttctaattttgttccatgaatgcaataagttctcctttctctcagaatattagtaaaaatgatcaagttgtattctgtattttacattatctttttttccttcaggtttcatattacaatgtttatttgttttggtctctgagaatctttttggcttttccttctttcttttcttttctttttaaattttcacaaaagtttctattgtgaccaacaataaacattcaaaaaagtaataatatccattgattcaatatccttcagagaatagaaaccatgtaaaaaaactgttaattttataagaataggtaaattttggtatccatatctgacaatgccattacaagaagggaaatttacagaccgtgatcctttttgaactaaatttatatatcctattcaaaaatccagctatattttataaggaggttatataatgaccaaatgtggtttatgcaattaattcagtatgtactaattcctgaataaagagtaataatagtctcaggctggcaagctgaataggaacagctctggtgtgcagctgccagtgagatcaacgcagaaggcaggtgatttctgtaatccaactgaggtacctggctcgtctcactgggactggttagacagtgggtgcagcccatggagggcaagccaaagcaggatggggtgttgcctcacctgggaagcgcatggggttgggaaactccctgccctagcaaagagaagctgggrgggactgtgcctagaggaagggtgcattccagctcagatactatgcttttcccacggtcttcacaacctacaggcaagagattcccttgggtgcctacaccaccagggcctggggtttcaagcacaaaactgggtggctgtttgggcagacaccgagctagctgcagcagttttttttcataccccagtggcacctgggacaccagctagacagaacaattcactcccctggaaagggggctgaagccagggagccaggtggtctagctcagcggatctcacacccacagagctcagcaagctaagatccactggcttgaaattctcactgccagcacagcagtctgaagttgacytgggacgcttgagctttgtttggggaggggcgtctgccattactgaggctggagtaggtggttttcccctcacagtgtaaacaaagccactgggaagttccaactgggtggagcccactgcagctcakcaaagccgctgtagccggattgcctctttagattcctcctctctgggcagggcatctctgaaagaaaggcagcagccccagtcagggccttatagataaaactcctatcttcctaggacagaccacctgggggaaggggcggctgtgggtgcagcttcagcagacttaaatgttcctgcctgccagctctgaagagagcagtggatctcttagcacagcattcgagctctgctaagggacagaatgtctccttaagtgggtccctgaccaccgtgcctcctgactgggagacacckcccagcaggggttgacagacacctcatacgggagagctccggctggcatcttgtgggtgcccctctgggacgaaacttccagaggaaggaacagacagcagtctttgctgttctgcagcctccgctggtgatacccaggcaaacaggatctggagtggacctccagcaaactccagcagacctgcagcagaggggcctgaccgttagaaggaaaactaacaaatcagaaaagaatagcatcaacgtcaacaaaaaggacatccacacagaaaccccatctgaagatcaccaacctcaaagaccaaaggtagataaatctatgaagatgaggagaaagcagtgcaaaaaggctgaaaattccaaaaaccagaatgtctcttctcctccaaaggatcacaactcctcgtcggaaagggaacaaaactggaaggagaatgagtttgatgaattgacagaaataggcttcacaaggtgggtaataacaaactcctctgagctaaaggaggatggtttaacccaatacaaggaagccaagaaccttgaaaaaattttagaggaattgctaactagagaaaccagtttagagaagaacataaatgacctgatggagctgaaaaacacagcacgagaacttcrtgaagcatacacaagtatcaatagccaaatcaatcaagcggaagaaaggatatcagagattgaagatcatcttaatgaaataaagcatgaagacaaaattagagaaaaaagaatgcaaaggaatgaacaaagcctccaagaaatatggggctatgtgaaaagaccaagcctgcatgtgattgtgtacctgaaagtgatgggaagaatggaaccaagttggaaaacacttttcaggatattatccaggagaacttccccaacctagcaagacaggccaacagtcaaattcaggaaatatagaaaacaccagaaagatactccttgagaagagcaaccccaagacacataaccgtcagactcaccaaagttgaaatgaaggaaaaaatgttaagggyagccagagagaaagatcgggttacacagaaaagaggcccatcagactaacagcagatctctctacagaaaccctacaagccagaagagagtgggggccaatattcaacatgctttttttttttttgagacagaatcttggtttgttacccaggctggagtgcagtggtgcaatgttggctcactgcaagctccgcctccgggttcatgccattctcctgcctcagcctcccaagtagctgggactacaggcacctgctaccacgcctggctaattttttgtatttttagtagagacagggtttcaccatgttagccaggatggtctcgatctcctgacctcgtgatccrcccacctcagcctcccaaagtsctgggattacaggtgtgatcaacattcttaaagaaaagaattttcaacccagaaattcatatccagccaaactaagcttcataattgaaggagaaataaaatcctttacagacaagcaaatgctgagagattttgtcatcaccaggactgccttactcttaagagctcctgaagggagcactaaatatggaaaggaacaactgataccagccactgcaaaaacataccaaattgtaaagactattgacactatgaagaaactgcatcaaattacaggcaaaatagccagctagcatcataatgacaggatcaaattcacacataacaatattaaccttaaatgtaataaaagggttaaatcacccaattaaaaaacacagactgggctgggcacagtagctcacacctgtaatcccagcactttaggatgccgaggtgggtggatcacgaggtcaggagttcgagaccagcctggccaagatggtgaaaccctgttactaaaaaatacaaaaattagctgggcgtggtggcatgcgcacatagtcccagctactcaggaggctcargcaggagaatcgctggaacccgggaggcagaggtggcagtgagctgagattgtgccactgcactacagcctgggtgacagagcaagactctgtctcaagaaamacacacacacacacacacacacacacacacrgagagagagaaattggatacagagtcaggacccatccatgtgctgtattcaggagatccatcgtatgtgcaaagacacacatagactcaaaataaagggatggaaggatatttaccaaggaaatggaaagcaaaaaaaagcagagattgcaatcctagtctctgataaaacagactttaagccaacaaagatcaaaaaagacaaagaagggcattacataatggtaaagggatcaatgcaacaagaagagctaactatcctaaatatatatgcacccaatacaggagcatccagaattcataaagcaagttcctagagacctacaaagagacttggacwtccacataataatagtgggatactttaacaccytactgccaatattaggtcaacgagacagaaaattaacaaggatattcaagacttgaattcagctctggaccaagaggacctaagacatctacagaactctccaccccaaatcaacagaatatacatttttctcagcaccacatcacacttactccaaaattgaccacataattggaagtaaaacactcctcagcaaatgcaaaagaatggaaatcgtaactaacagtctctctgaccacagtgcaatcaaattagaactcaggattaagaaactcacgaaaaccacacaacgtcatggaaactgaacaacctgctcctgaatgactactgggtaaataacaaaattaaggcagaaataaataagttctttgaaaccaatgagaataaagacacaacgtaccagaatctctggaacacagctaaagcagtgtttatagaggaagttatagcactaamtgcccacaggagaaagcatgaaagatctaaaatcgacaccctaacatcacgattaaaagaactagagaagcaagagcaaacaaattcaaaaactagcggaagagaagaaataactaggataagagcagaactgaaggagatagaaacacgaaaaccccttcaaaaaatcaatgaatccaggagctggttttttgagattaacaaaatagactgctagccagattaataaagaagaaaagagagaagaatcaaatagacaataaaaaatgataaaggggatatcaccactgatcccacagaaatacaaactaccatcagagaatactataaacacctctatgcaaataaactaggaaatctacaagaaatggaaaaattattagacacatacaccctcccaaaactaaaccaggawgaagttgaatccctgaatagaccaatagcaagtctgaaattgaggcagtaattaatagcctaccaaccaaaaaaaagcccaggaccagatagattcacagccaaattctaccagaggtacaaagaggagctggtagcattccttctgaaactattccaatcaatataaaaagagggactcctccctaactcattttatgaggccagcatcatcctgataccaaaacctggtggagacacaataaaaaaagaaaatttcaggccaatatccctgatgaacattgatgcaaaaatcctcaataaaatactggcaaatctaatacagcagcacatcaaacagcttatccaccacaattaagttggcttcatccctgggatgcaaggctggttcaacatatgcaaatcaataaacataatccatcacataaacagaaccaacgacaaaaaccacatgattatcccaatagatgcagaaaggcctacaaaattcaacatcccttcatgctaaaaactctcaataaactaggtattgatggaacgtatctcaaaataataagagctatttatgacaaacccacagccaatgtcatactgaatgggcaaaagctggaagaattccctttgaaaaccggtacaaaacaaggatgccttctctcaccactcctattcaacatagcattggaagttctggccaggtcaatcaggcaagagaaagaaataaagcgtatttaaataggaagagaggaagtgaaattatccctgtttgcagatgacatgattrtatatttagaaaaccccatcgtctcagcctgaaatctccttaagctgataagcaacttcyrcaaagtctcaggatacaaaatcaatgtgcaaaaatcacaagcattcctatacaccaataagagacaaacagagaaccaaatcatgcatgaactcccattcatgattgctacaaagagaataaaatacctaggaatccaacttacaaggcatgtgaaggacctcttcaaggagaactacaaactactgctcaaggaaataaaagaggatacaaataaatggaaaaacattccatgctcctggataggaagaatcaatatcatgaaaatggccatagtgtccaaagtaatttatagattcartgctacctctatcaagctaccactgactttcttcaaagaattagaaaaaactactttaaatttcatatggaaaccaaaaasagcccatgtagccaagacaatcctaagcaaaaagaacaaagctggaggcctcatactacctgacttcaaattatactacaaggctacagtaaccaaaacagcatggtactggtaccaaaacagatatatagaccaatgaaacagaacagaggcctcagaaataacgccagacatctacaaccatctgatctttgacaaacctgacaaaaacaagcaagggggaaaggatttcctatttaataaatggtgttgggaaaactggctagccatatgcagaaaactgaaactggaccccttccttacaccttatacaaaaattaacccaagatggattaaagacttaaatgtaagacccaaarccataaaaaccataaaagaaaacccaggcaataccattcaggacatgggcaaaaacttcatgactaaaacaccaaagcaatggcaataaaagccaaaattgacaaatgggatctaattaaactagagagcttcttcacagcaaaagaaactatcatcagagtgaacaggcaacctacagaataggagaaaatttttgcaatctacccatctgacaaagggctaatatccagaatctacaaagaacataaacaaatttacaagaaaaaaaacaaacaaccccatcaaaaagtgggcaaaggttatgaacagacacttctcgaatgaagacatttatgtagccaacaaacatatgaaaaaaagctcatcatcactggtcattagagaaatgcaaatcaaaaccacaatgagataccatctcatgccagttagaatggcgatcattaaagagtcaagacacaacagatgctggagaggatgtggagaaataggaatgctttgacactgttggtgggagtgtaaattagttcaaccattgcgkaagacagtatgggaatccctcaaggatctagaaccagaaataccatttgatctagcaattccattactgggtatatacccaaagaaatataaattattctactataaagacacatgcatacatatgtttattgatgcactatttatagtagcaaagaattggaaccaacccaaatggccatcartgatagactgctaaagaaaatatggtacatacacaccatggaatactatgtagccataaaaaggaatgagttcgtgtcctttgcagggacatgaatgaagctggaagccattattctcagcaaactaatacaggacagaaaagcaaacaccacatgttctcactcataagtgggagttgaacaatgagaacacatggacacagggaggggaacaacacacactggggccagtcaggatgttggggatgagaggagggagagcattaggacaaatagctaatgcattgggaggcttaaaacctagatgatgggttgataggtgcagcaaaccaccacggcactcgtatacctatgtaacagatctacacattctgcacttgtatcctggaacttaaagtaaaataaaacataaagcaatataaattactaggcaaatactgtccatttcatctaatgaagaaarcaaatgacaaatatcatgtatatgacgtgctacacaaaatgtctaggttcttacattatttattactggaagaaaccttggagatcatggtttctaactctttatttgacagatgaggaaaactgagacctggggagttttggtgacttgctttgagactagaatccaagctttgtaattcctagtacagtcttctttccattaaatcatatttccttttctaaggaatagtgaatgctgtgtggcttacaagtttayttttggtgatggcactttacctgcttttcttcttttaatttttttgacctcagtgactagaactggatcaatagtaatccttggtttatgacgcactctcatcattggtccatgcataacctatttatttgtttatttgcttttaataatgtaatacataaraatttcaaatattcatattaggtggagaacttaggagcaaaatgaaaatgtataatttccatatatgcgtggtacaaaaataaactcttatatttcaaaattatttttgtgctatagctatttgtttttctcccttgggttgaargttatcttctggatgggtggtttggcaactgtcctcctcatcacactgaaatcaccaaactcaagtagcacttagaaaacaaagtaagacagaaggaaatgggaaaaggaccaggaaaatgtgctttacatttagcattgtgacatatatgtctaaaatttgttagtcttctgcaaattgtgtaatgttgggtttgtttatgatgcaggtctgagaaccattggagttatcaccaaactggaccttatggatgaaggaacggatgccagggatgttctagagaacaaactgttgcctcttcgcaggggtaatgtactgtggtctatacaagactttttttttttttttttttttttttttttgttatatggaagagaaatgattggsaagccactaggaggtttggttttaatgccttctcagttgtaaggaatggatttattattagttatacttttctggaatggctgtatgttcccaaatgatatactagaaaataatccaaagggagaactattccttaaaataacaggaataagaaaacaggaaaaggaaggagtttgaagggaggttataaatattcatcataggctacataaacttatactattgtaagcctggtatttacttgcctgctatatgacaaaactgctaagatacacactctcttaaaaygtacacagtttgagggtgagaggcattattgtactgatgctaaaaaattatcgtgggctcaatcagcagcctgtattcaatactgatgtttcccattgagttttataaaggaactcagtcttcaggcctaaaactagttttgcctttcttactctgcctatgtgagagccttgaaatctccctagaataagccacaaaaagtgtccccaactccatagatttgtgttttgtttcaggttacgtgggggtggtaaacagaagccagaaggacatagatgggaagaaggacataaaggcagccatgctggcagagaggaagtttttcctttcccacccggcttacagacatatcgctgaccgaatgggaaccccacacctgcagaaggtccttaatcaggtaaaaatgttctttcaagcaamaagaacaattatgaaatatgtaagtaggtgctggaattcatatttattatttttaagtttatttttttttccaaaacaagacatgcagcttcaatgatagggattttaaaaatgaatattagtacctcagattcacactattaccgttctcagtgaatagaactcaccttcctattattgcaagaacaattatcaaagcagaaacacatacctatttaggaacagtgaacagggatatacattttagcatatactcacttgtaatatgtagttatcttgagaagttaaatttttatagctttgaaaagttgatctcttgggatctgtttttgaagcaccagtctgtaatggctaggttacactttctgttaaattatttttatggctttgtttagaattgatttgtttcttaatttaaaatcttcagaatcacaaatcctaattaaataatcattgatttccactcatctaagatgcttttctagataaccccttttcccacaataatttagaattgggccttctgcctacccygctccatgcactatgcrcacacttcttccgtaaatcctcaatgctcttacttggttacagatattccttcccctattggagttaagtgttacgacaagcatcattgtcattgaatgcagggcctcctccctgagttttgattatattgacttaatgtgatcagcagcctttctcacaaatattcttgtaagttatgctttaactgttacatacaaacttaatcaggcaatcaatcaatcaagtagatttctgattcttagctcctggaaagtatcaatagctgtcacaatatgtgacattatacctgaaccatttaggcaaaacaactgagaagaaattttagaaaataaaaaattatgttataattccattttaagaggtacaatacagactattgtaaagtttatactttttaattaaagataaacatttggacactaggaaacatcactatgattgtatcatttaaaaatatgaatatatttttgagaaggagcattgttatgcaagaatgctaacactctaccaatrtattttgcactgtcaaaactctctttagaatactgctttaacagctgtatttgcctacaaaaaatacaaataaactgaaaaaatctcagaggaaactcactaatatgattagaaagataaagctggaaatgagttaggttttgaatactggaaaaacaaaaggaggtggttgactattaggttattacaggtgacccccaagttatgacacaattggattctcgttgactaaaaattgaatgattttttttttaactgaagatttctcctttcctggataatcactctctctttattgcttcaataatatttatactatgtttgaaactaagataattctatggctatgtatgtgtaccaatacttctgctcctgtgggataatttatatggaaaatgctggaaaatgacatgacgtttttgaaaaattgaatgaaattttcactgtsgggggaaggcagagaaagaggtagtgagttgtattagatgatattggagatgtaggcagtggctgaatcctgtaatgtttctagaccaaattgaggattttggctcttacctaagaccaatgaggagtcatttaaaggtcctgagtagaggaacaacaagatcagatccgtgrgtgaaaaaagaatgtggtattgacaagaagaccaagagtagaccagttagaagtaaaaatgagaaattatgggaatttggttgtggtaagggccagtggagagtaaaaaaakgggcgggtttgagaaatgttcaggaaaattgaggactaggtggtagattagagytgttgggtaatgggagaggtagagtcaaggttacgtctcaggtttccagattcttatgaagtcaccaagatggggaaccctgaagggaagatcaaatacttgattttggacatgttgagcttgagatatcatygacacatccaagaggagaagtcaatcaactggtcaaatatgcatgccacagcaaagataaatcttgtttggagacaacatcttacagctataggtatttggatgtttattgaagccaggatggaatgagattcccttaagagagaacagagagtaaataaaaaagaggccttggacccagatttgaggaatttcaataattactcttctggcaaagagggtgaattgtccaaggaaatagagaagatacatccagaatggatagcagaaaaatgagaggagctggaattatggaagccaggggaagaagtgttttagaaagccgcagtattgctttgctctggagatgtctgagaagcaaaaggtggaaatcaggtatttttattatttaccagttcacatggcaatcagttggttgctggtttcttgtggttgctggttctgttagatttgggtccttgtctcttgtgacgttgctgtcgggaatgctgtcctctcagctcttttgttgcctgcttcatagttagaacagcaacgcatgccagggtgctaacaataatttattactgcaagcaagggggtaatacagttataaactattgacaaataactctagatttatttaataaatatattcagctaacctcagataaacataaagatgacttaaaatagtttcttcagtcaatctggatatgttaattctccttactttttttttctttttttattttattttaktattattatactttaagttttagggtacatgtgcacaatstgcaggttagttacatatgtatacatgtgccatgctggtgtgctgcacccattaactcgtcatttagcattaggtatatctcctaaagctatccctcccccctccccccaccccacaacagtccccagagtgtgatattccaattcctgtgtccatgtgttctcattgttcaattcccacctatgagtgagaayatgcggtgtttggttttttgttcttgcgatagtttactgagaatgatgatttccaatttcatccatgtccctacaaaggacatgaactcatcattttttatggctgcatagtattccatggtgtatacgctacctgacttcaaactatactacaaggctacagtaaccaaaacagcatggtactggtaccaaaacagagatatagatcaatggaacmgaacagagccctcagaaataacgccgcatatctacaactgtctgatctttgacaaacctgagaaaaacaagcaatggggaaaggattccctatttaataaatggtgctgggaaaactggctagccataggtagaaagctgaaactggatcccttccttacaccttatacaaaaattaattcaagatggattaaagacttaaacgttagacctaaaaccataaaaaccctagaagaaaacctagacattaccattcaggacataggcatgggcaaggacttcatgtctaaaacaccaaaagcaatggcaacaaaagccaaaattgacaaatgggatctaattaaactaaagagcttctgcacagcaaaagaaactagcatcagagtgaacaggcaacctacaaaatgggagaaaattttcgcaacctactcatctgacaaagggctmatatccagaatctacaatgaactcaaacaaatttacaagaaaaaaacaactccatcaaaaagtgggcaaaggacatgaacagacacttctcaaaagaagagatttatgcagccaaaaaacatgaaaaaatgctcaccatcactggccatcagagaaatgcaaatcaaaaccacaatgagataccatctcacaccagttagaatggcaatcattaaaaagtcaggaaacaacaggtgctgsagaggatgtggagaaataggaacacttttacactgttggtgggactgtaaactagttcaacccttgtggaagtcagtgtcttgattcctcagggatctagaactagaaataccatttgacccagccatcccattactgggtatatacccaaaggactataaatcatgctgctataaatacatatgcacacgtatgtttattgcagcactattcacaatagcaaagacttggaaccaacccaaatgtccaacaatgatagactggattaacaaattctccttaattttaatattttttcttttttctgcatttctaggaagtttatattcttttcattgatttcaagttcatcacttaggaagttcaagattatctgttttttcttttaattcagacttttctttaactgcattgtaatagaaaggctgtaagacctaaacaatctgggtttttatctcacctttgttcttaattaatcatgcactcttaggttcttggaaaagttttcattgtactgagcttgaggtgcctgctgatctcagtggaaatgccaagtagatggttatgtcaagccttcaatagcagagagagctttcccttactcagtcatggagttgcactgggatctagagatggaagtatgagtaagtttctgcctcagctgaagaatgtggagaaaattaacagctgacaggtgcctctagcaccttggctacctgagcttcatcagtgtggtaaaccacttagtcctgagaacaccgggtagcagctgtgactcctagcttccttcatttctatcacattctaacttaaggttcctttctacaaggtaggagacctggtaaatcaatccatgctaaggtgttattgggcagcctcattagtaacattagctgcattttaacagggtcttcctggatttaaagagatagctcaagtgagtgactctaaatgaaggmattttgagcatctctgaagggcagtggaggagggagttggtgttccttctccctatctacataatagtcaatgtcaaatgcagacataatgtttgaaattttgaattattagaaaaacaatggaggcggatctttgtctcatgagttaatctttaatctgtgtatatgattcaatcttcaatctgtgtgtatcattttgttttgtttagcaacttaccaaccacattcgggataccctaccaaacttcaggaacaaactacagggacagttgctctccatagaacatgaagtagaagcctacaaaaatttcaaaccagaagacccaacaaggaagaccaaagcattgctgcagtaggtcacctttcccttccttggctcagcattttaatctaatttctttagttttctattgccttagtctatttgtcacgttgcttcttaggtagcaagtaaactatatgaggctatctatatgatacaagataactcttgaatttttatgctttgttgaacaagaattattggtattattctgttattatcaacttaccagttgagcatcctcatgcccatttaaattgtgtttttaaaactggattaagtgagtaaaaccattagggatgacccagcaggaatttttgtcccttgtcttagaagtgggtaaatacagatgcaaatatcatttgtatttttcagctgtttctatggatgtcaattgtacttattatcctttattccaattatttcatgtaacttatttgtgtgcatttttcagtggaatgagaaccaagggtttaatttaaaagttctaacaataaggctgtagtttttttttttccttttacataatgattttaatgtagtcctttgaaaatgtaaatgtgaaactgccaagcatcttttcaccccttcatgatcttcccatcttatctttgggttactagagttattcctgtggtgtcttggggtaggakagcagagaattgttagagaattcctagctctttatatcttacactttcttctctccttcaaatccttctgtctccatcagttcctttatcctgtgctgccacttgtgtcaagtccctctcaacaggaaggctcccctgcccagcacacactgcaggatacccraggtctacctccgaagatgatgtttggcacctcttatggcgcacttttctccccagcagcgtggcaatcaaagcatccttcaattggcattyaaagtgcacactataatttctttctttgtgaggagattcccaaatgctcaaatatttaaatayaatattaattgcttcatcctatatttcctcattaaaaatattatacaaaggaaagagttttttttttttcagatataactctttcctaatttattctttcttttygttcttgggttttgttgagctcttgcaaaaactcttcaagttacagagaaagctatttctgtttaggccctaggtcattatcttaatatccaactaaaactattctgcttgcaaataccgggtcttgcctctgtgactttattggactcagattacagaacttttcacagctagattcttgatttgcagagggctgattcagctccttctttatggccctattctttctgacctatttcttttctctcttctatccttccctcctgccttcctttctctgttcttcctccttcctctaatctcttcatgcactcagtgtctggttctgtgaaatgaatgataataagattcttgccctcaagaagtcccagtagagtagggaaaaacagacataaaaattaacacaatttaacacaattaattgtgttaaagctaataaatgctatgtttctgtaagtgtaaaatattaagggagcccggatgaggaagcagttacatgtgaggaaggatgtgaatttgcagagaaaacagagggcctgtggtaggagaggaccttgtcatgtggaaggaggagggcaagagaatcatgagaactttggtaacatttgttctcggattagtaaatgggccaggtggctgaggtatagggtttaagggaaggagcagctagaagtacactttctgaaaaatttttcatgtttcagtgtgtatgtcatacctctccaggtgtttttaaaaaataaaattagcatatacatgaacataactaaatccaattacagtctagcttctttggcctaaataatttgcagctacttttcattcatccatgattttgatggaagggaatgaaaagatacaagttttagatagtttgaattttttcccttttagattttgaatttgaaagtagttccagtatgtttaaattggagtttctaaacctggtaatcacaaatgaaaatagttggtttttttttttcgtgtttctttctttctttctttcaagcagccagtgtaaggtaattcattctttcctgggacaaatatttattaaatctcccarttatgttgagcagggaaaggtaaagaaaacacacattccttgcccttaggagagtgactaatagacatggcaatgttaatgtactgtgccaaatgctctgcaggaaacacgctgaagatgcagaggaggggcgatgaggagtggtgccggatagagtcatggatcatgaaaagtttctgggaagaaccaatgcttgagctgagtcttaaagaacacgtaaaaattagtcaggcaaagcagcaagggacagagagaatggtgttctgagcagaaagaaaagtgtaaaagcacagggacatggtgcatttggggaactgcaatggcttccttatggttggctggaaggtgagttggatgagtggtaagagatggggctgaagaggcagccaaagccagaccataaaatgctgggagatgggctaaagagttttgattgtattatcgaattgtggggatccattgaaaaacaaggctagagctagtttagaggggtcacaaatctatgttattctgatagggtgaggtctgactttgacaaagataaactcaaaagcaggatcatcatctagaggagccttcagtgatgctgggaggcattgctgagagctgaaccaaggcagtgtcagtaggtgtgaggaggaagagctcaaccagctgagctgtaatggagaagaaattacctacaactggtggctccctgcaactgttgggtgagggaaagggaggtatgctggatgccccagattccctgcctggggtgggtggtatcatccaccatgaggagagacttgggaatgcaggaggatcagcaggtttgggagtgaaagaaattgagaggttgtttyaagtgtgttgagttcaaggcagctaagaggaaataaacatccagtacagytgagcatatgggccactcactcttctgagagttataggctaaagcggaaggtgtggagaaactatttctcaatagcccttgaagctatggcaaccttgagatcacctagggatgaatgtgaggagagactgaggctgtgacattgggggagtaatagagctggagcatttgggacactaggtggttgtgatgtcataggagttcaggtccatttgattattctacataaagtttaattgattaactctctatttcaagtgttctttaaataccattttatgactgcaatcaaatgaacagaaggcattgaaagacaactatatttaaatatttattctaattaaatgtctaaaatcttaatgatgtgtattttgtataatcacactgtgagtactacatagagtgcaatgttaactctgccagtaggtgccactaagagcacctggaaaargattctaaggaataatcataggaaaagaaaatgaagagtgcaaaggcttgtaactttgacttgaatctatttctctttaacaattacaggatggttcagcaatttgctgtggactttgagaagagaattgaagggtcaggggatcaagtagataccctggaactctcaggtggtgctaaaatcaatcgtatttttcatgaacgctttccttttgagatagtaaaggtttgtgtcaaacgttatttttttcttagtttcacttcacttccatattctgttttatacaacttaatacaatattgtgtgagtggtatagaactaacatagttctttgaacaaaacctccatattcaggtaatgaaattcaggagaggaatatgttcttactgatgattctgattttatttaatgagatttaactacatttcaaacacaaatactaattgagtttcctagtttgttgtctaattaatttaaaaatatttcttaagcatgtactatgcaccacatttctaggtgccagtgattaagacagagaagacccttgcttgtctagtggggaaagacagaaaattaacaaatagacaaaatacgaaagtttcaaatgtttttatgtaacatgatatgagagaggggatgggtgagccacttttaatggaataatcaggcaaattctgtctgagcaggagacatttaaactgtgcccagaatggcatgaagaggtcaactgggtaaagatctgggggaaaggggttgttcaaggcagaagtagcaacctcgggtaaggcactaaagtatgacaggtgaagaacagatgtggctgatgaaggagaggggcatgaagtgaattyagagagggaggaagtgtccagttcacacaaagctttctaggttgaggtaaagtctttatacttaacaatgggaagttacaggagggttttaagcagtaatgtgacttgatttgttgatgattttagaagaatagtatgcctgctggattgtaaagagccaagagagtgaggagaacagtaggccagaccaggggtggattcattttctgtggagtctraagcttctacaattttacaggcccccttgaagaagaatacaaaattataaacacacaggcccagggtcttggaagaggcttgtgcaagggggaaatgctgagaattaaacttctttagctttccagtaaaagtgccccagcaagaaaggatagagagatgggtggctttggggttttggagataaagttgctagggcttcgattgaaatgggggaatggaagaaagggaagttttgagatgacttccaakgttttggctttcacagctgagggagtggtagtgcccatcagatgagggaaatggaggaaaacctctgtttgtatggagaagtgaattaggagttctgttttggatgtgctaagcgtaaaatgcccaataggcagttgagtagttttagggaccatgctacttgtctcaaacagagaggygagtgcttatgtcttcgtgtgggaggcaaatgggtaaatagataatttcattaaaaatgtgctaagtaaagtgatraacttcagcaaagggtactatggaaacacagcccacagacatgaatcccagctcaagtgtgtaagggagccaggcttctgagctgagtttggaaggatgagcagctagttaagcaggaagaggtaggytacaggagggggtgatccagacaggagaggaatgagctatgaagccatcagttatgggtagagacctagaacaattcgtcattctagggcataagctgtgaggggaggaaatggacagacaatgaagccggagaggccaaatctcagaggtcagggttgaactcaatgttcttgggctatcccttcgaggtctaagctctgtgacactttggtcctacttccaaatagatttatggtacctagcgcttctgagaaatatttgtaatctatcctgtgttgtctttttaaaatattactaattttcttttacaaagaggcctttaactcaaatgatttaagtggccagggacaaaagacagccattgttaatttcaggacatctgtactgctactgcacagcaggtgaaactctcatttatgcattcttctgtgccctcmaatttaccatattcagcaaaagaatgaagaattatacatttcaaatgaatggctagatttatgtccagaaggcatccttatgcatagcactccatatctataacagagttaaaatccactgcccccaagctccccaaaatccctagtgttctgtgttgccttgaaatttatataaacagatgttttgaccatctgggtttaggttaggaaagacatgagtatccacttatwaataatgaagtcaagttattctcattctgtaatgttcaacaatattattcaaaggaattaagtgtcataactatggctcattttgcatctgcagatggagttcaatgagaaagaattgcgaagagaaataagctatgcaatcaaaaacatacatggtatcaggcaagtgattcacatttttcttgtcatctgttcaagctaccaaaagaaaattaatgtttrtaaatggctaggaaactcgtcttttcatcattgaatagggtagaatacagaggtgggagtaagaaacaggaaatcctactttggggtttaatggtaacttcctgtattgctgtagtcagttttttccaagtgaaaaagcaaaaacattttctgcatttccagcctgtactctgcacaataggggattcgcagattakcaagaccccattctccagagccttcatttttcatgagggaggccagacatgctcataattaatcattactyacaccagagaagggacagattaattttgactagtgttgtggagcaagattgggaaagattaatggaggttkttactttcaagtttatcctttcctgtggggaggatggtttcaacaggccaggaggtgttgtgtgtgcatgtgtgcttgcacatgtgggagcgtgcatatgaagtgggcagcagtgtgatgagacaggagaggatggaaggatggaatggaggttgttgaggctggaggataaaagaaagggctttccggtggaaggggtgggatgaccaaaggcaaagaggtgagcgggcacagyatatatccatggagccaagagtcatgcatatgcattgggactggcttgaggaatgcagtcaggagagcagagggacctgagctgggtggggttgggggtggggtagaacttgtgtctgaatttccccttgtttaaagtgagattattctaaattaccttccatcttagtctgtttggactgctgtaacaaatgactacagactgggtggcttataaaccacagaaatttatttctcacrgttctggagtttgaaaatcctaggtcagggtgtgagcatggtcgggttctggtgagatcccttttctggcctgcacagtgctgtcttcttattctgtcctcatgtggcagagagaaagctagttagctctctggcctcttcttataagggcactaatcccattcatgagggttctgccctcatgatgtaattacctcccaaaggccctacctcctactaccatcacattgaagggtatggtttcaacatatgaagttttaggggaacacattcagttcacaacaatttctttaaagaactatgataagaacaaatgattttaaagcacatatttattcatttcatgtacagaaggctaaacataacttaatgaacatatgttgaattgcagtgtccttaattcaaggaaataaaacttaggttgcctagtacatagattgcctcatacgaaggaggtggcccctgcctgttgtcatttgtggttcagcctctgccaaagggccaagttgagactgtgctgggaacaggccctgagaaggcaaagcttgacactgagtttgcatgtgatgggtgattttacaaaggagttatgatgcttgagttatttgttgttttaaaatttagacaatctgttggtgggactgtaaactagttcaaccattgtgaaagtcagtgtggagattcctcagggatctagaactagaaataccatttgacccagccatcccattactgrgtatatacccaaaggactataaatcacgctgctataaagacacatgcacacatatgtttattgcagcactattcacaatagcaaagacttggaaccaacccaaatgtccaacaatgatagactggattaagaaaatgtggcacatatacaccatggaatactatgcagccataaaaaatgatgagttcatgtcctttgtagggacatggatgaaattggaaaccatcattctcagtaaactatctcaaggacaaaaaaccaaacaccacatgttctcactcatagatgggaattgaataatgagaacacatggacacaggaaggggaacatcacactctggggactgttgttgggtgggagtaggggggagggatagcattaggagatatacctaatgctaaatgacgagttaatgggtgcagcacaccagcatggcacatgtatacatatgtaactaacctgcacattgtgcacatgtaccctaaaacttaaagtataataataataaaaaaaagaaagaaaaaagagaaaaaaaaatttagacaatctgctccacaaatctcaaatagtatgggcagatacgagtttacaaagtgaagaggagaaaacatctataaccaaatctaaygttttttcttttaccatcgataggatttctaagctccctattctatttcttctccaccaaatccagaatacatttggtgtagaaactgttttgctttttagctgggcagatttggtatttggacatgtttatctgataaatgcagtggaaccaaattacattttttggggtcatacagtatttgaaatcagccaaatacagtatttttacttcacttgtaaaactcattaccatatacagcttttrtcaaatataactgcaaaatctcagtaattcagaattgtcratttctgatttatatgcctaccaacaggggattgttggtggttattatatgcctgtaagatgataagaaatgcacaatgtcctgagcataagacatactcatggtatgcttatttaggcctttaaatatatatttggtttgacaatttttttttcccatttgattccattggctatttgaatagtagaagccctctttgcccatgaaggacttgatggaagagatgctttgtttttcttcattgttttgttaacactgaatgctgactatgagcaagggagggagacagtccttatggagcaaatcaagataaatagggtracaactctccttactgtgtatcctgcaatgtgaaatagaatgctgggcttccaagaaggaaggtctcagcagcaagactggaactataagtgcttgctttgcatctgggctttaaagcacaggtgggatttgaataggccaaaattgttaacagggtaaaatgaacatcatagacaaaggcaaagacatacaatataagcaaaggcaaattgactgaaacatagggtacgtgaaaggtgaggagaaaaataactgtgaagaaagattagagtcaaacagtggaaaaattttaatattgtactaaacagtttggatttgattctgtacctcgttcagagaaattaccattataatgtagtatgattactacagttagaaatagaggtgagcatggggtgctaagcaaatgataagaaggggcgtcaagtcaagatagtataagggaagtgttgaaaagattttccaaaagaggtaccatagaattcagttgcaggaagagaagttaactaaataagaataggtggggaggggagagaagagggcctaggagtggggaggacccagtgccaaagcctggagcctgccagccttcagtcatggccaagattcaaagtcccctgttattgtagcttctctctactgaccttttgtttaaatttgagtaatcatttttcattttttatgaatcacatatacacatgcacatgtatatatctgctttcctgagctcctgttcagcatgagaaaagcattattataacaccagtttgaattaattagagcccaaaggaagacacttgttattttggttatcatttgttatttttataaattcattatttaggcatcttgaaatattaaaattaattcataactccccttactgtcttatactcccagtaccccaggccctcagattgggaactatctgtaatatagttgtcctggaatggataaattgtataatctagaaactctactattttagtgtataaaaagtgaagctcactcgctgytccacaaagggcaaggaattgattttggaatctttcagaaataggaatctaaattgagaacaccatttctattgtagcatttctttttattgctgcgaaacagcaagttaagacaaattacagttaaatattagttaaaggtcacatgatgtgccacataaacattttgggcactatgtaacttttaaacttggtctattacatgcttaatttaaatggaatgttaatttaaacatttttcaaaagatttttgaatattactcaattaaaaaaatctcatgggctgcttgctttcttaccttcaggacagggttgtttactccagacatggcatttgaagcgatagtcaagaaacagattgtaaagttgaaagggccttccttgaagagtgtggatctggtaatacaagaattaatcaacactgtgaagaagtgtaccaaaaaagtaagttcgaattatttaactttccagtacgtggctttggtttatcaacattccctatctcattgcatgattctctttccctgaccctcactttgttatagatgttgtgtgtttgcctacagggaatggttgtggaaagtactgagtgggaattgctttcawgaagggcagacatactgtcttctatcattcctaatacggtggtttagaaagagtatatttctttggctgattttccccatgttgtcttaaacaaataaacattatttccaaactattaggcaaatgcyctaagctcatttttcctgtggtgcatggatgagggtaattgttagagaaggaaatcactgatagtacatatatcaataagaaaattcttctaaattgcaaatatgtattccacttgagtctggctgttctgggaaggggcagtgtagtgtagtggataagaacccagccttggggtttcaatgacctagattgaaatcctggctctgatactttctgtgtgaccttgggcttaacctctctagtcttgttaatttatctgtgaaatgaggatgatgatgataatagtaataccaccttagtgaggattaaacaagatgatgcctgaaacctatgggacacctagcacactgattaaccataatttaagtgctcaataaatggtggctgatccataaattgccattttagcagcagtcagtattctctaccctgaatatctattaaatctatgctgtagagtgctggggcaagacttcccaagtaggaggactcctcactgaggaatatggagaacatgtgctgaattcctcggttcatgaaaagaatatcttgyattgaaaaacacaaaaagagaattagtgatggtatttacagtagggtagktctagccccctgacagttaacacttgtgcttttaatatttcttcaacctatggataattctgtttttgttagttttgttatccttccctttatagatggttactagcagttacctttctgaaaaaccagtgggaagaaagagagagaatgagagggacagagaatgagaatgaatatgaatattagttcccagttacctgacagaaaggctcaggtaaagaacagatgtacatagtagaagaggcaaatgggctgaattcctagatgtgaaggctaaaagaaaagcagtaaatggaactagcttaggacccagaggtgactgggaggttcagaccccttctctagagctcctactgctcttccacctcatttcctaaactcctggtttctcttctccaaaacaagaaagagccacaggagttaagggactgagggacagaaagaagaatgcccatggagttgaaaaaaatcaatctttctaccatctcaccagttggaaacttcaagtcagttgctaacactcctcatccctgctgcyctcacctactcttcagaatgcaacctatcgtgtcccttgtacatttaaagctctcttaattgatctctctactgactttcaagattaactgatactgagtttcctactaaccctaaggattgccactctcagcacacagatgtgtttagccagaggcttctctttaggttgtccatgtctcttactcccaccaattatcctgtcttctttacaagggacagttgtgctgtgtytgttcccaaacccatttagccagttgcrcttattttaataatatactttttaaataaagagagtaattaaactgacccaatgcagaaaagactttgagttttgtttctatgaaaactaaactgaatgctatgaaaagacttgataactgttagctacaaaagctytgctattgactaggtgtaggcaaggtaatgaaaagaatgtgtgtgtgtgagggattataaaaatctggataggtttggcattcaaattatttcacaagtatcttcatgttctccctccactgtaaagaaagcaaaactggaaatcatagatgaaggatgtggtttatgtaagacagaagatgcataactccaatcagcagatccatatgcagagaacagatcttggccttacatcaaaagattggcacatgtgtggacatttatgttttaagttatataaagtgtttatggtatgcatgaatcttttttttttatcatttcccattttatccaacctactggaaagccaacagtcagttctgatggcatgggatgagacagcttgttcccagacactttttggcttctattcttgctctctaccctttccattatgctccttggattggtcttctatacatttttactatcttctcaaaacattttatagtttgccttagttaaacacaaaatctagcttttcccctgaggttactatttaccctttagctttcttcagtgaaggatatttattccagcytaaactggaaaaatctgagggcctttattgggtatgacatttgccatttttccttttgtggcttccaaagattattccttcaccttctcatagtcttccwttaaggcccaggtggtgccagctgtacctgttccttatattcactgtcaccaccaagttccaggtcactcccttgcattcatcaggatctttagaacctggcttacatttttcctctccatacccaattcaccttcaacgtggaagtgttcagtgtccatgtagatatcatgtccaatgcctaaaagctacttttctttgaaatctttgctctccattcagtccactctagcatcatagtttcatgacttctggctcttgttgtcatcaaaaaatgttttactaggaaattgtaaaccttaaagggcctgcagaatgctgatcacccccttcatcctctttagattttaagccaattgggaaattaatggaaaagctctattttgaaggtttgaaatttagtgtccacttcactgctgacagatctaggttggaaaatgtgtctgggccttgctgctaaagtgggagcctcctgttatttccccttccagcattaaaccttagagcccacaaggtgtatgggtgagcagatgtacatccatcattagtttttttatctattacttcagttccacttggattaactttgccacctgttgaaactccaggactgctaaaatttactgcttatctttattttcctttcccccaggcttctgaagagcttggagataattgtctatttgtgtgaactggtgccccaatatattcatggtcttcttcttagtccaatttcaactgctgccccrtagtgcttcagtgtcttagtaattagcagcctcctgtgttctccatgataatgatgttaaacttttagcactctcttcaagcgacctgactcatcactttcatcctcactttcaatgaaggtttcgcagaaaaaataggggccataaatgggcactatgaaacattgattcttgccttctatccctcaaacttacctgtattcacagccacacccccttcttatccttgtctctgttgagatagtattcctgatcaagggggtgggggrtggtttcctatctgtactctcacctccttagaggatgtactctttttagccttttatttcctgaatcatcatcttctccatcacattttaaaaaatcaacatataaatatatctatgtctgtcctaatttaaaaagaaacagtgacaaacactcacctgctgccctatttttctcctctcatggtcagccttcttgggaaaaaagtagtttatgctttgcatctttactgtgtcatctccagttaattcctcaactgaaatttggattctaccccactactctatagagttaattattgcaaagatcagtgagagtcctgattgccaagcctaaaggaygctcttattcctgagactatattccactctctttataaagctggcactcctctctcatgggttctcttccctctttctctttattccttctctacctcctttgagcattcatccatttttgcttgcctctaaacactgcgatcccacagagcttactcctggttttattctcttcttactatattttctccttgacagatcatgtctgtaatagttcaactaccacttaaaatattggtgattcccaaatctgtacctctagctcaagcctctttatggaaactgtctacagactactgcaactattctcttttcttacttaaggccctgaacattacttttaagcctgaattattccagtggccccctaactgatctatttctagcctggtcaccctcaaattcatctttgccattgctgtcaaagtgatttttctaaaatacagctatgccttttgcctatatcytcaaaattattcaacgactcctcagagccttgaaaataaagttcagatcatttagggttgtatttaggttccctgtctgatctctgaatacttctccagctatatctttggtcccactgcttgcttcagccattctagatgatttgcactatcctcaaagatttttccttcttttgacatttgcataagtgattccttttgtctagaatgtctcactttccctcctgtgtttacctgccatcccctctcatttttagggaggcagctcaatcatcctattttccttaaaatcttcctaaagggcctctgtgagtcacttcctggtctctctcccaactccctttttagtgcttctgttgataccctatgtgtatttatatcatagcatttatgatactgccttgagatttatttgtatgtatttgtttacatatctcctcttgttgattgtaagctcctttgaaaaaaaaggcgctgtgttttttatcttctctctagcctgtaacacagtgaccaactccacataggggcattttataaatatttactaacaatttagatgttctaaagttatccagtggtcaaaaatatatatacttggttttaaaatagtattttagccattccttttaaaatgataaaatttaggcaggttttctttcaaacatctatccttttccttatgctgcattttgatgtttttcatttttggccttattaggtatactttcaatatcttttatttaaaaactggtctaattaaaatattttgcaaagcaaaataatcctaattagagttgagtctgctgggactttattacttgcctcgttttgaacatgagccatagataaggtgactatataatttattgttcagtgcaggacatttttgagacttaaagggagtgctatgaatactttcactggagtaataggagtaaacaaagactgcctcaggcaatgtgaaaataagtaattccagctatattgtaattatatatatatttctgttatagcatatatacatatataaacataaaatacagttttcatttacaactcctcatgtgatgcctcatgtgtaaaaaccttaaatgcttttttcttaagctgcataaataaacaycagtgaaaaacatatgtgatttatgtgtgttcaaacaacaaaacacaaagctagactcctaacctggggaaatgcatttcttcccagatactttctcactgttgtctctggggcactggaggataagacaggaacattagagctttatgagctatttggcttcawgccagggacatctcaackttgaaattattttggtgggcatctcttttcagctgctttyctttacctcctcttcwccagtgcatcatcacagggtgctgaaggtcttttcagaaagcactgagaggaacatcttgattttttttttaaccacagtttagcaactgtgccatttactggcctcttgggaaccgacattcttggatcattattatactaattaattgatttttttcttgtttagaaaaaaaaagttttgcaaggagaaaaaaaataccttagtcagctattagaaatacagggaaagggccaggcgaggtggctcatgcctgtaatcccatcactttgggaggccgaggcggatggatcacctgagatcaggagttcgagaccaccctggccaacatggtaaaaccccatctctactaaaaatacaaaacttagccaatcatggtkgggggtgcctataatctcagctactcaggaggctgaggcaggagaattgctggaacctgggaagcggyggttgcagtgagccgagattgcactattgcactccagcccaggcaacaacagcgagactccatttcccccccgcccccccaaataaagaaaaagaaatacagggaaagattttccattaagaagtgctgttagaagaaatgccaaattttgtggcttattaggtaagtaaatatctagctctgaatacacataactaaacaagtgaatccaagtccttaccatggcttacaaggccctagacaatcttgccccctgcttttcatctctaaactcatcttctcccctttctctcctcctcttggtccactccagctgcactggattccttgtttatttagcaggccaaggamacatgtctgtagagcctttgcacttctcattcttaatgtgggaaatgatctgccccaagatatctgcatggatcaaaccattgcttctttcaggcctctgctattcaaatgccccataaagcagagtctttctccgacttttcyattttcagttgcatagccttcccacaaatacacacacacacacacaccacacatgcacaccatcgttaatctacttaccaaactttttctttgcagtatatattactattaatatattaattatattatttatgtctgctgttgctgtgttataagataattaagggaccttgagaatacaagttccatgagaataagaacttggcttattaagctcatcgctctattttccacccctaaaacagcctggttttcaacaatgattattgaatgaataatttaaaaaatgaattatgtctcattgattcagcaggtgacggtcagtttggctgaagtaggatgaaggaaaatggcttcaaagcatcatactatttaggactttcttttaggtttatatagatgtgctatggtttttacactgtatgaaaatacttgcatttcggggaggagccaagatggccaaataggaacagcttcggtctacagctcccagcatgagcgacgcagaagactggtgatttctgcatttccatctgaggtaccgggttcatctcactagggagtgccagacagtgggcgcaggtcagtgggtgcgtgcaccgtgcacgagccgaagcagggtgaagcattgcctcactccggaagtgcaaggggtcagggagttccctttcctagtcaaagaaaggggtgacggacggcacctggaaaatcgggtcactcccacctgaatactgtgcttttccgacaggcttaaaaaagggcacaccacgagattatatcccgcacctggctcagagggtcctacgcccacggaatctcgctgattgctagcacagcagtctgagatcaaactgcaaggtggcagcgaggctgggggaggggcasccgacattgcccaggcttgcttaggtaaacaaagcagcagggaagctcgaactgggtggagcccaccacagctcaaggaggcctgcctgcctctgtaggctccacctctgggggcagggcacagacaaagaaaaagacagcagtaacctctgcagacttaaatgtccctgtctgacagctttgaagagagcagtggttcttccagtacgcagctggagatctgagaacgrgcagactgcctcctcaagtgggtccctgacycctgacccccgagcagcctaactgggaggcacccccaagcaggggcacactgacacctcacacggcagggtactccaacagacctgcagctgagggtcctgtctgttagaaggaaaactaacaaacagaaaggacatccacaccaaaaacccatctgtacatcaccatcatcaaagaccaaaagtagataaaaccacaaagatggggaaaaaacagaacagaaaaactggaaactctaaaaaagcagagtgcctctcctcctccaaaggaacacagttcctcaccagcaaaggaacaaagctggacggagaacgactttgacgagctgagagaagaaggcttcagatgatcaaattactctgagctacgggaggacattcaaaccaaaggcaaagaagttgaaaactttgaaaaaaatttagacgaatgtataactagaataaccaatacagagaagtgcttaaaggagctgatggagctgaaaaccaaggctcgagaactacgtgaagaatkcagaagcctcaggagccgatgtgatcaactggaagaaagggtatcagcaatggaagatgaagtgaatgaaatgaagcgagaagggaagtttagagaaaaaagaataaaaagaaaygagcaaagcctccaagaaatatgggactatgtgaaaagaccaaatctacatctgactggtgtacctgaaagtgacggggagaatggaaccaagttggaaaacactctgcaagatattatccaggagaacttccccaatctagcaaggcaggccaacgctcagattcaggaaatacagagaatgccacaaagatactcctcgagaagagcaactccaagacacataattgtcagattcaccaaagttgaaatgaaggaaaaaatgttaagggcagccagagagaaaggtcgagttaccctcaaagggaagcccatcagactaacagcggatctctcagcagaaactctacaagccagaagagagtgggggccaatattcaacattcttgaagaaaataattttcaacccagaatttcatatccagccaaactaagcttcataaatgaaggagaaataaaatactttacagacaagcaaatgctgagagattttgtcaccaccaggcctgccctaaaagagctcctgaaggaagcactaaacatggaaaggaacaacyggtaccagccgctgcaaaatcatgccaaaatgtaaagaccatcaagactgggaagaaactgcatcaactaacgagcaaaataaccagctatcatcataatgacaggatcaaattcacacataamaatattaactttaaatgtaaatggactaaatgctccaattaaaagacacagactggcaarttggataaagagtcaagacccatcagtgtgctgtattcaggaaacccatctcatgtgcagagacacacataggctcaamatgaaaggatggaggaagatctaccaagcaaatggaaaacaaaaaaaggcaggggttgcaatcctagtctctgataaaacagactttaaaccaacaaagatcaaaagagacaaagaaggccattacataatggtaaagggatcaaytcaacaagaagagctaactatcytaaatatatatgcacccaatacaggagcacccagattcataaagcaagtcctgagtgacctgcaaggagacttagactcccacacgttaataatgggagactttaacaccccactgtcaacattagacagatcaacgagacagaaactcaacaaggatacccaggaattgaactcagctctgcaccaagtggacctaatagacatctacagaactctccaccccaaatcaacagaatatacatttttttcagcaccacaccacacctattccaaaattgaccacatagttggaagtaaagctctcctcagcaaatgtaaaagaacagaaattataacaaactatctctcagaccacagtgcaatcaaattagaactcaggattaagaatctcactsaaaacccctcaactacatggaaactgaacaacctgctcttgaatgactactgggtacataacgaaatgaaggcagaaataaagatgttctttgaaaccaaggaggacaaagacacaacataccagaatctctgggatgcattyaaagcagtgtgtagagggaaatttatagcactaaatgcccacaagagaaagcaggaaagatccaaaattgacaccctaacatcacaattaaaagaactagaaaagcaagagcaaacacattcaaaagctagcagaaggcaagaaataactaaaatcatagcagaactgaaggaaatagagacaaaaaaaacccttaaaaaattaatgaatccaggagctggttttttgaaaggatcaacaaaattgatagactgctagcaagactaataaaggagaaaagaaagaagaatcaaatagacgcaataaaaaatgataaaggggatatcaccacagatcmcacagaaataaaaactaccatcagagaatactacaaacacctctacgcaaataaactagaaaatctagaagaaatggataaattccttgacacatacactctcccaagactaaaccaggaagaagttgaatctctgaatagaccaataacaggctctgaaattgtggcaataatcaatagcttaccaaccaaaaagagtccaggaccagatggattcacagccgaattctaccagaggtacaaggaggaactggtaccattccttctgaaactattccaatcaatagaaaaagagggaatcctccctaactcattttatgaggccagcatcattctgataccaaagcctggcagagacacaaccaaaaaagagaattttagaccaatatccttgatgaacattgatgcaaaaatcctcaataaaatactggcaaactgaatccagcagcacatcaaaaagcttatccaccatgatcaagtgggcttcatccctgggatgcaaggctggttcaatatatgcaaatcaataaatgtaatccagcatataaacagaaccaaagacaaaaaccacatgattatctcaatagatgcagaaaaagcctttgacaaaattcaacaacccttcatgctaaaaactctcaataaattaggtattgatgggaygtatttcaaaataataagagctatctatgacaaacccacagccaatatcgtactgaatgggcaaaaactggaagcattccctttgaaaactgtcacaagacagggatgccctctctcaccactcctattcaacatagtgttggaagttctggccagggcaattaggbaggagaaggaaataaagggtattcarttaggaaaagaggaagtcaaattgtccctgtttgcagacgacatgattgtatatctagaaaaccccattgtctcagcccaaaatctccttaagctgataagcaacttcagcaaagtctcaggatacaaaatcaatgtacagawatcacaagcattcttatataccaacaatcgacaaacagagagctaaatcatgagtgaaytcccattcacaattgcttcaaagagaataaaatacctaggaatccaacttacaagggatgtgaaggacctcttcaaggagaactacaaaccactgctcaaggaaataaaagaggatacaaacaaatggaaggacattccatgctcatgggtaggaagaatcaatatcgtgaaaatggccatactgcccaaggtaattcacagattcaatgccatccccatcaagctaccaatgcctttcttcacagaattggaaaaaactactttaaagttcatatggaaccaaaaaagagcccgcatcaccaagtcaatcctaagccaaaagaacaaagctggaggcatcacactacctgacttcaaactatactacaaggctacagtaaccaaaacagcatggtactggtaccaaaacagagatatagatcaatggaacagaacagagccctcagaaataacgccgcatatctacaactatctgatctttgacaaacctgagaaaaacaagcaatggggaaaggattccctatttaataaatggtgctgggaaaattggctagccatatgtagaaagctgaaactggatcccttccttacaccttatacaaaaatcaattcaagatggattaaagacttaaatgttagacctaaaaccataaaaaccctagaagaaaacctaggcattaccattcaggacataggcatgggcaaggacttcatgtctaaaacaccaaaagcaatggcaacaaaagccaaaattgacaaatgggatctaattaaactaaagagcttctgcacagcaaaagaaactaccatcagagtgaacaggcaacctacaaaatgggagaaaattttcgcaacctactcatctgacaaagggctgatatccagaatctacaatgaactcaaacaaatttacaagaaaaaaacaaacaaccccatcaaaaagtgggcaaaggacatgaacagacacttctcaaaagaagacatttatgcagccaaaaaacacatgaaaaaatgctcatcatcactggccatcagagaaatgcaaatcaaaaccacaatgagataccatctcacaccagttagaagggcaatcattaaaaagtcaggaaacaacaggtgctggagaagatgtggagaaataggaacacttttacactgttggtgggactgtaaactagttcaaccattgtggaagtcagtgtggcgattcctcagggatctagaactggagataccatttgacccagccatcccattactgggtatgtacccaaaggactataaatcatgctgctataaagacatatgcacatgtatgtttattgcagcactattcacaatagcaaagacttgraaccaacccaaatgtccaacaatgatagactggattaagaaaatgtggcatatatacaccatggaatactatgmagccataaaaaatgatgagttcgtgtccttygtagggacatggatgaaattggaaatcatcattctcagtaaactatctcaagaacaaaaaaccaaacactgcatattctcactcataggtgggaattgaacaatgagatcacatggacacaggaaggggaacatcacaccctggggactgtkgtggggtggggggaggggggagggatagcattgggagatatacctaatgctagatgacaagttagtgggtgcagcgcaccagcatggcacatgtatacatatgtaactaacctgcacagtgttcacatgtaccctaaaacttaaagtataataatgaaagaaaaaaattaaaaaaaaagaaaatacttgcatttcaccccctctaatggttgccatccagtcaaactctgtgctgtgctttgcatgtaatacatgtctaatgtaataggctttagtgcccaggcttcgaatcagactggttattaaagtctgaaacttttgttgggtattataggaaattcaggcctgggacttggttttaatgggatagaatctcaccttttcatcttacaactcattaaaggatttgcaatctttataattggttcttaatttataatttaccatggtccctgattttcctcccactttctgttgtgaagtttttttccattttaactgctcattaatatgtctaccagagataaacttgggaagagagagataaaaatctggttatgatcttcaggtgttgttttgccaccatgtcaacccaccctggattcctttttggatgttttctgaattacttaagtaagaggctcttctgactactctgcggcacccaagttttattcactcaaggttggactttttgtttttgtttttctactctccttgtttcttaggtgaggacttttttgtttttattccttagcatttcataaataacactagagttctcttcatttctctgtttaaaagtttttccatcttatacctcaccacttctcctgctatttgttgaaaatatttgaggtttctggattaaggatttgcccacctggagaaggtgggctaacactagcccacttggtcccagttcacctagttgggatctggcactccttttcccttcctgccaacttcactttgaccttctttgacttctcatatgccactcatatgccaatgtagaacaccccataaggaactttcccattaacccctgtacaacttagaaaacagtcactatttcttgatctctttatattagaattgcttcttatcttcaatcacctttgtaaatgtttctacaaatacatctgtttaaaaaatttttttcatagcaaatgtgttgtgcgcagatgactgccttctcatatcctgaataaatacaacactatgctatataaaaacaaaggattgctagggattttgttgggttgggtgggtggttaattcacagaaaatgaaattaaaaaattgtatgcttttatgagtgctaaaattcattatttctatttggtttgtagcaagcagccagcatttaaaggtttatagctttttcataaaagcccttatctttaggtcagccaaatcaatcaagtcaagtgatatgtatagaagaaattttgttctgaatttattttcttagacggttacctaataactccagtctttgctagaggcatcaaacttgttcctcttgatgatatggaaatcttgcctggtctcttgaccattttgagaaaaatgtactagcatagcgtagatcttatggtctgataaactgttaatacattttggaagtgtataatttttgttttgttggatagaaatgtctcccaagtgtttttttttttctctaggaaaatgtgatccatactgaaattaaatttttatattgaggttccaccaaaataattaatcagtaccctaaataacacttacaacattggaccttattaaaacatgttttgctgctttctctcagaacatgtataattaaaatattctccttgaattaaatattgaaggttttgattcctaaagtcgtgtatattatattatttctccattgaatcttctttattatttaagaatactctacccaggctggactggtggtgggcgcctatagttccaactactcaggaggctgagacaggagcattgcttgaacccaggaggtggaggttgcagtgagccaagatgtaccactgcactccagcctgggcaacagagcgagactttgtcaaaaaaaaaaaaaaaaaaagaatattcaatgcaatttgaactataagctatttagaactaatttgctgtataataaatgtatagctttgactgcaagtttcactattataatataagcatcaaatcctcagaggacctctcacacctggtttatgcatttatttcttcatatttcccattggtttttaaaaaatatttctcttgtatgactatttatctgtataggcaacctgccactcaagactatgtggtttctaatatcaggtgttatgatataaactgagcatggagctggactgtagcagttgcaccatgaatgactgatgtgacataaatttaggaatgtaattattataactaatagcaaatccttcatcccttgactctctataaaccaatttataggttatttaattaatcattagaggaataaaggcctaaagacatcttctagatcaatattatttaggcatacatacttaatattctgattactttgacaaataagaactcccatattcttacaactgtaggcttttaatttgacattcaaattaaaaaagtgcaaaagtgattgacaattataatggtataaatgattgaggaaatggtgattgcacattaaataagagacatagaagagaggtgagggattgaattgagcaatcaaagttaagtatgttttaaagctaagtaaagggtgacacaaactgagcagggcacagtttgaatgagatcatgaaataatctcattatgagattaaatgagataatgaaatgagtggtagaaagcctaatcagaaatcaattgaaatgtcagtaggactttattttttaacctctgtatgtaygtatcttaagaattgggactatttatatgtttgggactatttatatatatttatatattttatatttgaaagccagcagttaaaaccaagattttgactcttatactcccacaatcagttcaatatcaaccagctagtaaccaaaccagttgtttcattaatgccattcagtggtgggcctagatcctacattgcttagtgtctcttcaaggtttttcctcctttgtctccataatgrtagttcttctagtgtgttctctgtttcttttgttccacttagaattcaggcttattgacttccagttgtctcaattgtaggtacaaaattgtggctcttacagattccttttctggtagaattaagcccatgggcagtaagcttgaaaagatcaggagacacacacgtgcacacaaatcaatgctcctgccaaggccagtagattggaggcattcttagatgtctctacttcaygggatattcttgtcattttggcctttccctgacttaatgatggccatatactggcctggggtccttcagctatcaagtgtttagtatctgaataaatatttatattgccactatttgatggttttaaaaataactttctgctgtaatctatttgctaaatgctgttaaagccatctcactcttccttggtagacctcaamtgcttgcgtagttacttctctgaggcaatgtgattctataatagtgtggctgtcattgaatagcttggraagctgtctgagtgcaggcggaattgattgtcttggtgacctagggcaggctaatgtttggtgtcagatacaccactcaggtttgcactagtcaagaaggactggaattgatcagctatctcttccactctgaaggcttttataagcctcacaaaaaataacttggaggactttcagagagtcaagaggggttctggtataatagagctttttctggagaatgtttccaaaatgggaagtatgagctccatttgtatcttgcggtaattcatgaaataagcccccaggtgagcgtgcatctcaggattcagataagagggtgagaaatcgaggacctcatggagacgctggtgatgatttttgtggtaaccaaagcagtcaggtttctatggttttatgatgttatgaacataatctatatccactgttgaaatatttggaaaatgtagataaataaaagtgtgcataattcaaagagttattgctattaacactttatagtatctgtgcaaatctttttctatgcacagagagtagacttgcagcaatggaagatttaatgtatatgagatctcgtgattatgatggtttcatgaagtactgcagtttgttaacttgctaagacactaatatatgttgtgcatgctataaaggtaatgtgcacagtgacctcaggtgaccatacagaagccccatttcagggaggcctagatctaactccttatgagtttggagaaatattacatgctataatattactcaagaatgttggtatttgtaagattgggctatatccttgaaaaatgtcaagggtgtatggtggtgtgtgactctgtgtgtgtgtgcatgtgtgtgtggatgtgtcttagtccattttctgtagtttataacaaaatacctgaaactgggtatacagaaaaggaatttatttctttatacagaaaaggaatttatacagaaaaggtatttatttcttacagttatggaagacccagtgttgagggtctgcctctggtaagggccttcttgctggtgcagggtatcaatcatattgtaagggtgctgagtgtggtagcatgctagctcaggtcgctagtcctcttcttataaagctaccagtcccactcccataacctattaatccattagtccatgaatggattaatccactcatgatggcagagccttcatggcccaatcacctcttaaaagccccacttgtcaatatagccacattggggattgaattttaacatgaatttggaggaaagaaatatccaaaccaaaacattatgcttgtgcataaccacattatatatttagtagcctaattttcttcaaatagtgttgtaaatactttaccatgtcattagttattattaaaactgttattcaaaatggctacattacatcacgtaagtggatctaccttcatttatttaacatcatcagatactaggtagtttatagtttgtttatcttattgttgcttttccaactaatgctgtgatgaatgtccttatcattgtagttcagaattctgtgaggttattaggttgagatctctctctctgtctctgtgtttgtgtgtgtgtgtgtgtgtttgtgtgtgtgtgcgcgcgtgcaagacttttgatacataatgtcaaattgctttccagaaagatttctcttcttgacacccctcagcaagtttaaattgtgctaatctcagtataccctcacctgtagtaagtcttataaaaaaatagcaatttgccaatataatagttatttcttttctttgcattagatcacttgtacagtttgtttttccttctgcttattgactattaagtcttttacaaattaaatcatattctttgcctattttattgagctatctgttaatcttattaatttgcaagcactttaaaaatcatcattggaattaatattttgcctggcctaagtcatgaatgtgcccacttttctccatttccattgctgtcatcccagtagaagccaccattatttccattccatctgaattgcttcagtagcctaaattcctgatagaattgcaaggatctgcttgatgtggcccctctctacttttctagctttgtctgaggatcatactcctcagtttctgcacggactttcttttacttttatcgccactaattgcccccacttccaccatgccttcacacatgttcctgttcctggcaagcttcatcttctccacggccattctcacacacctttgcctgtctaagtcttccttctggattagggctccttaaacattttcatagcatcccattctctttcttccttatattgaaaacaactgaattaaggtattcacttttgcaaactatgttttgaacaattacctgcataatttagatggggttaagtgattgacatacacaatttccatagttttgcaaaaaaaatgtacatatacacatatattttctgtgggggagaatttaaaaagttaaaggagtctctttgtgcttcatgggatgaatcatgctcgaagagtaatggacaagaccatgggctctggagtcctaggacttaggttggaatcctgaaccaaccatttttgagctgtttagtcatgggcatgagttacttaacctctctgtgcttcacttttctcctctattaaatggggttggccgggcgtggtggctcacgcctgtaatcccagcactttgggagaccaaggcaggtggatcacctgaggtcagaagttagagaccagcctggccaacatggtgaaaccctgtctttactaaaaatacaaaaattagctgagcttggtggcacgtgcctgtaatcccagctactcgggaggctgagacaggagaatcgcttgaacccaggaggcagaggttgcagtgagctgagattgcgccattgcactccagcctgggtgacaagagcaaaactctgtctcaaaataaataaataaataaaataaaaaagaaatgaggttaataattatatctgtcttttctgattgctgtgaatagtgaaagaggtaattcatgaagttcttagcgcctgacacgtggtagacactatataaaatgttagtcattatccttttctttgtcctgttttccgacttcttcatctttgaattttattaagtgccaactcagcaggagcacagtgctagatggtatctagggttctgctttcttcctaaggaattgctctgctggttttgaagtgtttcctcaacataacaaggttacttctgatgatagtttgtgaagcctctcccatcaccttgacatccttctttaggagttgatgatatttcatttttgcttccagaatggcaatgaatatcttctgtaaaataacataatttatctctgcttcttttttggtagtgtaactttttgagtattaatactcagatctgcttttcttgacagctggcaaacttccccagactctgcgaggaaacggaaaggattgttgctaaccacattcgtgagcgagaagggaagacaaaggaccaggtaaagagaggtcttccctggtgggcagggagaytgtgggaggtcgaaggtctctgcaaggttgtctggtagttcccaacagtcagcctgtcgcttaaaggaaaaaaaaatagtggaacacaactacattatgtttatttttacttatttatgaattatacacatactatattcatatcttstttatgttaaaaatatgagcaaataaaaagacttcattcagaagaatgagatgcaaaagcagtaacaggagtttcattattttttttctcaatgctccatggatcatgcatacatcctactttgaaaaccactaatccagaaacataccacattttctctttaagacagaggttcttaacttttattgggcccacagatggactccagaagattcacaaactcctaaaacattatgcaaaatgctcagtgttttcatttttttctgaggagagagtggacctagattttcatcagcttatccatacaacctatgattgaaaaaaaaattgagaactactcttttaaacatttctattttgtgaatgtatgtggtttgtaaggagtgaccctgaaattgttttctaatcctagctttgtaatttggaaagattattttcaagtgaggataattcatttaaaaaagtaaaggactacgtggaaagaataaaaatcttcttaggtttaaatggatttttcttagttacttataaaatattataacaggaaatacaaatggttttacatacccttgaattccatgacacagctgcacgtgtgatgttgtggagagaacactggacttaggccatgtgctcgccacaaaataacatcatgttcttgtgtaaatcacttctttggactgttgttttctcatgtacagcattaatatattggtctatatgctctctgaaagcctgtgtaagttagtattacaggattttgtgattctcagatgagtgggaaggaggtgagggagaaatggggaaaaggaagaagacaaaataaaagagagaggaaaaaaccacagrgagagacacacacagcacacagagtgtgcgtggggaagaggagcaggtggaggagaaaggagaaaaggaaggacagagggatggagacccagcagattgggacattcgtgagtgattccagtaaccaccttgtctctgcttgagctgtggattcattgtcactactttttatcattgtgttttgaaagttaattaatcaccatttatagttttcacttgtttaccaactttcacagtcttggatagctgcaatagccaaaagaggagaaaacaggctttgtgattcagttgagatgaacaaatcagtattaactcctgagtcagtgaaatcaagcctagagccagatatggagccctagggccagaggttctccctaaygtctaatgtcttggcccctcctgggctgagaaaacttaagttcttaagaatcakctgtactcctgaccttaagtaaataagctaactgttttaatttagtgttttcatctataatattcaaatgataataaatcctacttaactctttaggatccgctgtcaaaataatattggagaaaatataggataattatttaaagcattttaaatatttgtaatcatatctatgtcagttgctagcttcttcatatttcagagtttttgttttagtaaaatggcatgttcaaacttcaccatgttgttaagattgtgggctctgggctcagactacctgaatttgaatttcagctctgttgttaacattttgtgtaacttgtgacaagttatttgacatctttacacttcaattttcgcatcttaaagtgagacaatagtggtagttaactcacagacattttgtgaggatggaaagaagtaatcaaaatacaaggccaggtgtagtggctcacacctgtaatcccagcacttttgggaggctgaggcaggcagattgcttgaggtcaggagttcgagaccaggctgggaaacatggtgaaaccctctctctacaaaatattaaacaattagctgggcacggtggcctgcactaccagtagtcccagctactcggaggctgaggtggaaggatcacatgagcctgggaggttgaggctgcagtgagctatggtcatgccactgcactccagcctgggtgacagagcaagaccctgcatatatatatatatatatatatatatatatatatatatcttagttcttaattaattttagttgtttttgttgttattcccaaagagctatggcacatggtagattcgaggaagaattgccttttctgattccaagggaaattgttttcaatctgcaactcagttacagtggttaatttattcctcaagtaggacataagggatggagcaggcatctccctactaagtcacagtctcaggtggtgtggtccaacagttatcaagtgcctgtcaaagctggtagtggtcacctctaatatggacttgtgtggcatagcagaaacatgcctggttttggtagtgtggacatgtcattttggatggatctcgcatttgaattctggactctgctgcctgggaccatgtggtacttttaaagtatccagttagacagagtgacccatatcctcaggcctccgcgcctgaacagctctgggacattcttgcagttttatttctttctttaaaaagtagagttactaccaacttctgctctggaagctttgtgggaaaaaaaaatcttcaaaattaagaatatggaaagccataaatctgtctgtagctttttcttaaacaaaggttttttgaatgtctgagtgtgccagctgttagtcttggtgcttccatacatgtcactgcatgttgaagcagtggactttctgggcaactactgctaccaggggtagctttactttgcttcaactaaatattcaataactgtggatgaaaaaggcagtgagaaactctgagaaagtgaaaaaatgagaaaaaaatggattatttttcttttcatcccccacatgcgacctggctcttttcctagagtgaacacagactcccagtttccaggaatataatgagaacagccatagcttttattttttttccactttttttcctatactacagtccaagttaatgtgtgtgaacgtccaaaagctattcatgacagcctttggcaatgttgagaattatgtagatattttgctccttatagtggcaacaatttatttgtgttcaaatattacagtttattggtacaaacttttggccaaatggatttggagtatacaatttaactgaatctggctttattgttgggagaagagaggcaaaactacaactaatccaataatgatcacgcttcctaatgtttcagttttcttcaagatatgaaacaaaactctgactgtatgaatttttttcatacaagtatgatgttattgacctaatagcccccatgccttgactttatttttggtagtgggagtagatttggagtgatcttttaaatctttttttgacaggtccccttgtgactctcagcaagaattggtcagatgactggttgagattagccacaaaaacaaagcctccagcctatagcactgggtactgagtacaaaacaagaacaagtggccacgtactaattatatatatgtatatgtgagaataaatcactccctggaaagttaactgttcttggccaggcacggtggctcacgcctgtaatcccagmactttgggaggccaaggtgggtggatcacctgaggtcaggagttcaagaccagcctggccaacatggtgaaatcccatctctacaaaagtacaaaaattaactgggcatgatggcrggtgcctgtaatcccagctacttgggaggctgaggcgggagaattgtttgaacccaggaggmggaggttgcagtgagctgagattgcaccattgcactccagcctgggcaatagagtgagacytgtctcaaaaaacaacaacaaaaaaaagagttaactgttcttcaagcctggtagatagttacacaaataaggccgcaaatgtttattgggcacctattgtgtgtatcatgctaggctctaagttctaaggataaaatggtgaacaagataaacataatcctagcttctatggagtgtacattcttgcagagaagagaaatattaaaaaaattaataattaattacatttgtagtaaatgccacaaataagtatagggtgctatatagatatacacacacatacacaaacacacatatatgtatatatagtgtatatatacatgtacatatatgtatgtatgtatatatgtgtgtatttacatgtacatatatacatacatatacgtatatatgcttatatgtatatatacacatataagtatatgtgtacatatttgaacatatgtgcatatgtgtacatatttgaacatatatgcatatgtgtacatattgaaacatatatatgcatataggtatatatgtgtatatagcaccctatattttatagaatacataattttacgtatacataattttatacatatacrtaattttctgtatgtatataattatggcacatagactatttgagagtaatagtacaatccaacctggtcttggttgggtaggggataaggatcatggatggctttcttgaggaagtacccactggggagcattatgtagaatatgtctatgaactgttgccatgaggactctgatgcgttcaaatgctaccttcaatgaagggaggcagcaaacaaatactcacaatagtcaccaaaatttatccaacaaagttgaagagcagagctctggagatattcaggcagagatctgtaagcaccgtatttctcccttttagcaaatctcagcatcctggaaagagacaggattcagttgggagaacacaaggaaacgtagaaagaggaagtcagttttgaatatctctggtataataccttcttttttgcaggttctggttgctccacttctctcttgttttctgtcagcctcctcgtctccccattgaatactatttttcacagaggcacctcccaagtctctgacctagagattataagtatcttatatttagaatattttcatgttgcctgggacatgtatccagtttactccatcacaaatcttcatttaattatcatgatgtttcaggcactgttctaggcactggagatgtagcagtggatacaacagatgaggtctatataagaaatatgtaaaaacttgccatgttagctagtgttagtgctacaaaagaaaataaggcagggtaacacaatagagagtaaccagagtgctagtttaaatagaatgggcaggaaaatccctctgaggagtgatattctagcaaagatctgacattattattattattatttaaatttattatactttaagttctgggatacatgtgcagaatgtgcaggtttgttacataggtatgcacgcgccatggtggtttgctgcacctatcaacctgttgtctatattaggtatttctcctaatgctatccctcccctagccccccacccccacaacaggccctggtgtgtgatgctcccttccctgtgtccaygtgttctcattgttcaactcccacttatgagtgagaacatgcagtgtttggttttctgtccttgtgatattttgctgagaatgatggtttccagcttcatccatgttcctgcaaaggacatgaactcatccttttttatggctacatagtattccatggtgtatatgagccacattttctttatccagtgtatcattgatggcattttggttggttccaagtctttgctattatgaacagtggtgcaataaacatgcgtgtacatgtgtctttgtagtagaatgatttataatcctttgggtatgtacccagtaatgggactgctgcgtcaaatggtattgctggttctaggtcattgaggaattgccacactgtcttccacaatggttgaamtaatttacactcccamcaacagtgtaaaagcattcctatttctccacatcctctccagcatctgttgtttcctgactttttaatgatttctattctaactggcgtgagatggtatctcctcattgtggttttgatttgcatttctctaatgaccagtgatgatgagcttttttttcatatgtttrttggctgcataaatgtcttcttttgagaagtgtctgttcatatcctttgcccactttttgattttttttttctggtaaatttgtatacgttctttgtaaattctggatattagccctttgtcagatgggtagattgcaaaaatttttttcccattctataggttgccttttcactctgatgatagtttcttttgctgtgcagaagctctttagtttaattagatcccatttgtcagttttggcttttgttgccattgcttttggtgttttagtcatgaagtctttctccatgcctatgtcctgaatggtattgcctaggtttccttctatggtttttatgcttttaggtcttgtgtttaagtctttaatccatcctgagtcaatttttgtataaggtgtaaggaaggtgtccagtttcagtcttctgcatatggctagccagttttcccaacaccatttattaaatagggaatcctttccccattgcttttttttggtcagatttgtcaaagatcagctggttgtagatgtgtggcattatttctgaggcctctgtcctattccattggtctgtatatcggttttggtaccagtaccatgctgttgtggttaccaaagctttgtagtatagtttgaagtcaggcagcatgatgcctccagctttgtactttttgcctacgcttgtcttggctatatgggctcttttttggtttcatatgaaatttaaagtagttttttctaaatctgtgaagaaagtcaatggtagcttgaggggatagcattgaatctataaattactttgggcagtattgccattttttcaatattgattcttcctatccatgagcaagggatgttttttccaattgtttgtgtcctctttkatttccttgagcagtggtttgtagttctctttgaagaggtccttcacatcccttgtaagttgtattcctaggtattttattctctttgtagcaattgctaatgggagttcgctcatgatttggctttctgtttgtctattattggtgtataggaatgcttgtgatttttgcacattgatttttgtatcctgagactttgctgaagttgcttatcagcttaaggagatttcaggctgagacgatggggttttctaaatatacaatcatgtcatctgcaaagagagacaatttaacttcctctctttttatttgaatatcctttatttctttctcttgcctgattgccctggccaaaacttccaatactatgttgaacaggaatggcgagagagggaatccttgtcttgtgccagttttcaaagggaatgcttccagcttttgcccattcagtatgatattggccatgagtgtgtcataaatagctcttattattttgagatacattccatcartacctartttattgagagtttttagcatgaagggatgttgaattttattgaaggctttttctccatctattgagataatcatgtggtttacgtcattgattctgtttatgtgatggattacatttattgatttgcatatgttgaacctgccttgagtctcagggatgaagccgacttgatcatggtrgagaagctttttgatgtgctgccggattcagtttgccagtattttattgaggattttcacattgatrttcatcargatattggcctgaaattttcttttttgtgtgtgtctctgccaggttttggtattaggatgacgttggcatcataaaatgagttagggaggagttcctctttttctattgtttggaatagtttcagaaggaatagtaccagctcctctttgtacctatcacagaattcagctgtgaatccatctggtcctgggctttttttggttggtaggctattaatgactgcctcaatttcagaacttgttattggtctattcagggattcaacttcttcctggtttagttttgggagggtgtatgtatccaggaatttatccattttttctagattttctagtttatttgcatagaggtgtttatagtattctctgatggcagtttgtatttctttgccgtcaaaggtgatatcccctttatcattttttattgtttctatttgattcttctctcttttcttctttattaatctggctagcagtctatctattttgttaatcttttcaaaaaaaacagctcctggattcattgattttttgaaggggttttcgtgtctctgtctccttcagttctgatctgatcttatttatttcttgtcttctgttaccttttgcgtttgcccttgcttctcttgttcttttaattgtgatgttagggtgtcgattttggatctttcctgctttctcctgtgggcatttagtgctataaatttccctgtaaacactgctttaactgtgtcgcagagattctggtacattgtgtstttgctctcattggttgcaaagaacttatttatttctgccttaatttcattatttactcagtggtcattcaggagcaggttgttcagtttccatgtagttgtgcgcttttgagtttcttaatcctgagttctaatttgattgcactgtggtctgagagactgtttgttatgatttctgttcttttgcatttgctgaggagtgtatttatgtggtcagttttggaataagtgtgatgtggtgctgagaagaatgtgtattctgttgatttggggtggagagttctgtagatgtctattaggtctgcttggtgcagagctgagttcaagtcctgtatatccttgttaaccttctgtctcgttgatctgtctaatattgacagtggggtgttaaagtctcccagtattattgtgtgaaagtctaaatctctttgtaggtctctaagaacttgctttatgaatctgggtgctcctgtattgggtgcatatatatttaggatagttagctcttcttgttgcattgatccctttaccattatgtaattaccttctttgtctttttgggtctttgttggtttttgttgttgttattgtttttttagatggagtctcactctgtcacccaggctgcagtgcagtggcgcaatctcagctcactgcaagctccgcctcctgggttcacgccattctcctgcctcagcctcctgggtagctgggattacaggcacctgccaccacacccagctaattttttgtatttttagtagagatagggtttcatcatattagccaggatgttctytatctcctcaccttgtgatctgcccgccttggcctcccaaagtgctgggattacaggcatgagccactgcacctggctgggtctttgttggtttaaagtaggttttatcagcaactaggattgcaaccctgctttttttttttttctttccatttgcttggtaaatcttcctccatccctttattttgagcctatgtgtgtctttgcatatgagatgggtctcccgaattacagcacactgatgggtcttgactctttattcaatttgccagtctgtatcttttaattggggcatttagtccatttacaattcaggttaatattrttatgtgtgaatttgatcctgtcattatgatgctagctggttattttgcccattagttgatgcagtttctttatagtgtcgattttttttaccgtttggtatgtttttgcagtggctggtactggtttttcttttccatatttagtgcttcattcaggagctcttgtaaggcagaactggtggtgacaaaatcactcagcatttgctagtctgtaaaagagtttatttttccttcacttatgaagcttagtttagctggacatgaaactctgcgttgaaatttctttaagaatgttgaatattggctctcactctcttctggcttgtagagtttctgcagatatatccgctgttagtctgatgggcttccctttgtgggtaacctggcctttctctcttgctgcccttaacattttttccttcatttcaacattggtgattctgatgattatgtgtcttggggttgctcttcttgaggagtatctttgtggtgttttctgtatttcctgaatttgaatgttggcctgtcttgctaggttggagtagttctcctggataatatcctgaagagtgttttccaacttcattccattctccccgtcactttcaggtacaccaatcaaacataagtttggtcttttcacatagtcccatatttcttggaggctttgttctttccttttcattcttttttctgtaatcttgtctctacactttactacattaagttgatcttcaatctctgatatccttttttctgcttgatcgatttgcctattgatacttgtgtatgcttcacaaagttcttgtgctgtgtttctcagctccatcaggtcrtttatattcttctctaaactggttattctagttagcaatttctctaacattttttcaaggttcttagcttccttgcattgggttagaacatgctcctttagctyrgaggagtttgttattacccaccttgtgaagcctacttctgtcaattaatcatactcattctttgtccaattttgttttcttgctggcaaggagttgcgatcctttggaagagaagaggtgttctggtttttggaattttcagcctttttgcactgtttttttcctcatctttgtggatttatctacctttggtctttgatgttggtaagcttcagatggggtttctgtgtggacacctttttttgatgctgatgctgttcctttctgtttrttagttttccttctaacagtcaggcccctctgctgcaggtctgctggagtttgctagagttccactccagaccctgtttgcctgggtatcaccagcagaggctgcagaacagcaaagattgctgcctgttccttcctctggaagctttgtcccagaggggcacccaccagatgccagccgggggtctcctgtatgaggtgtctgttgatccctgctggaaggtgtctcccagtcaggaggcacggaagtcagggacccacttgaggaggcagtctgtcctttagcagagctcgagcactgtgctgggagatccgtcattctcttcagagctggcaggcaggaacatttaagtctgctgaagttgcacccacagctgccccttcccccaggtgctctgtcccaggaagatgggagttttatctataagcccctgactggggctgctgcctttctttcagagatgcmctgcccagagaggaggaacctagggaggcagtctgactacagcagctttgttgaactgtagtggagtcctcccaggtcaaacttccttggcagctttgcttacactgtgaggggaaaactgcctactaaagcctcagtaatggcagacgcccctcccccaaccaagctagagcatcctaggccaacttcagactgctgtgctggcagtgagaatttcaagatggcagatcttagcttgctgggcttcatgggggtgggatccgctgacctagaccacttggctccctggcttcagccccctttccaggggagtgaacggttctgtcttgctggcattccaggtgccactggggtatggaaaaagaacttctgcatctagctcagtgtctgcccaaacagccccccagttttgtgcttgaaaccctgggcccttgtggtgtaggcacccaagggaatctcctggtctgcaggttgcgaagaccatgggaaaagcgtagtatctgggccagaatgcaccattcctcacagcacagtcagtcatggcttcccttggctaggggagggagttccctgaccccataagcttcctgggtgaggcaatgccccaccctgcttcagctcaccctccatgggctgcacccactgtctaaccagtcccagtgagatgagccaggtaccacagttggaaatgcagaaatcacctgcttctgtgttgatctcactgggagctgcatactggagctgttcctatttagccatcttaccagccaccacctattattattaagagatggggtcttgctatgttgcccagactgaaatgcagtggctattcacaggcctgatgatgactcactgcagctttgaactcctgggctcaagagattctctcacctcagcctccagagtagctgggactataggcacacaccaccatgcccagcttctgattgatgtttggattcaatgatttatttgtatattgactttttgagttggctgatcaaatgctttcctgaaatgtgtaaagtgtcttgagatggttctttaagctgctaaagatagaagaggagagagaaaaaaagaggtgaattactaatttgtggctaatatatgatgtctacaggaacagtaagctcagcgcaacccctcatgggacctcctgccacacatcttatttgtgcttgtccttcttttgaacagtatgcctacattttagagaaatcaaataattctagattctgtawtaaggtagcaaatagtgtatgcttataagttataatgctattctcttcatctgctgctcagatttacttttctagtagatttttaacttatgaatttagagtgcaaaattatgagtmtaataaagaaaagttaaggttacttttcatgctaattgaagtatcctttaaaarattatatgaaggtaattaatttgtgggcaattactgaatttaatgtttgaraatttttagatgggttttcactgaagtgtttctctttgacttataggtattgctattgattgacattcaagtctcttacatcaacaccaaccatgaagacttcattggcttcgcaaagtacgtgaaacacttgatggccacatgcattcctcctgttgatttgtctcaaacacacattgtgaatttttactacagtttcaccacctttgagaatacaatctgtgccaggattaactctcagtgtgcctacttaggaagtctgagctccatggtcgtagggcagggatatttactattctctcagtaaagtagttggctctattatgcagcatatgaagtcatgtatgtcttacatacttatcatctcatcatttttggatgatgttctgcagtttgtacttgaactcctatagaaaaacagtaattaatgcatgtttaaaattttgaggggaacagtttttcacatcaatttgaaataccacatgtaatttacaggatgaaagatgtttcaacttttctaagtcagaatctagaggcctgttttttttttttttttaaactttgcgaaattagatgtaatctgtcggggtgaacattttattttctgtaaagtgtgtatacaaatattgccatttttcatatacgttatcatgcaaacgttatggttagttactcaggattggctattcactgtgtgacattttgaagaccttgaatgcactatcttttcctgcccattagtgaaaccagtttttgatttaaataatcttgatatcacctctaaaatatatttttgcatttaagtggttccaacttcaagtatataaaatatagcctattttatgtaaaatgtaaaacaaaagagcctatgtacttttacttaaactgagtattcaagaacagagacaaataaaaaaatgacagaatgtcaaattaatttattttattacattctgacttagaagaaatggatatgcagaccctgtgacctaaactaaacagtggcctgaggaatttacaggcatgttttagggagaacagtcccaattatccaactgaaaattatctcatcctaaacttggctgtggttgtgatgtcctagccaattgtgtaaatatcttttgcatccaatgacgattactagtgaagggtagataagatttcttccaccattttctgtctgtggcatacgtgtattcttgttagaacccaacgataaatatgtgccctagtctagttgtctttgcagccaccctgcccacacccacttcttgataggtatttgctgcacaggcatttcgcacagacttgccctcctctcttttagccccaagactctcaccatgtgttctgttcatttccttctgcagactcacctaaactgtaacatacatccttatccctaggtccagaaattttttccaggtttcctccacagtcagtgaactctagggagcctgtgccaagctctactctagtttctatagtgggtkgggggggaatgtagaaaaagaaaaaaactttttgccttttaggagcttgccaaataattgaaaagtatagagacacacaagtaaaaatttaaactgacacattcttcattttcctcactgcttctctgaggaatttaaaagacaaacaaatccttgagacatttaaaataataggaatgctgcctttaatgttgattttcatggattacaaatgccagttaggttcttacaaaaatgtagcagatgtcgatgtaaacttgacacaataacttaaaagtgaaaaggatgctgccttgttgtggtaccacaattagagggggaaaatgtagaaaaagtcataatccatttagaaaggttcaaatttaaacatattatataacccgtgcttcaatttaaatttcacctttataatcttcttgaaactttttttttctatgataaatgagctagagtttcttttccaataaatttccatatttgctgccttagaagctgttggactatggttttatattgattatattgatttataggtttycaagggcaggtgatttttcaaatttaagactttcaaacacaatcttttgacgtagtctctctgtgtctggtcctatttttctggtccaggtgtctggtcctatttttccagcagtgagatagactatgaatctttatgatattggggagaaaaaaagaagcataggtaaaactgctttagaaagccagcaactctacacatttctcatctaatttaaattgcacacttaaaccttctttaaaggactgatctgggagtcaacaatccaggttgtttttccaggatatgccactgatgagctttgggttttggcaaggtgctcagcctttctctatctgtttactgatgtatcaaatggaataataatccttgtcttgtatacctttcaggattgtcagaagatcaaattaatcaagttatgtggaaatcctttaaaaaaaactatggtgtagtctataaatgtgagagatcctccctgtctctcactctctccacatacatgcacgtgtgcacacatacacacacatacactcacatttgattactagatgtaccattttactttatgatgtagttataatgacttaagtatgattgtcactggaatattttttagctgctaatatcattatctctaaatgtgatattttgccccaagactcagagataaatgtcctttccatttgtatgtcgacttggaattgacatggggtgacgtggagtgattatgaagatgaagaaatgttcatttcaaaatcactttgaggggttgtggtattttttgtgcttttaaaaattaaaaaaatatggttgtagctataaattttaaagttggcaagaatgctgtttccatcaaggaagaaaagtcaagccatatttgaagacaattatgtaagtatttttaagttccaaagacagaaaattaaggtctggggttgaagaaaacaagcatttgtttcatgagatttttagagagttgccaaaagggaaggaactgcctcccagatttataggatggtgatgtacatagtactttacacatgtaatttttttcaacttggatgactttttgttctaattttttaaaaaatgaaaatgaattgctaaaattggattaataaaatatttactttcagagtagcattcaggacatctcaaaattcttctttctgttatagaatttatactgtcatgtttaatatgtgacactttttttccatcttctagttatttgttagacatggcctgtaaaatatgtaccgtgtgtaatgtgtccaaataagcactgctctaggcttgctttggaatttcctggcttctaaatgttttttcaactataatatagtttctgagcctgaaagttcagcatttcagaagaaaacgtcaaatttctttgtgacttaagggttttaatttgtcattctctgctttagaaaaaaaaaaaccctaaattacatatatttttacataatatagctagtttttgctatttaagaaaataagaactggcccaattgttccttcattcacttcccctcgtcctcagtaatcctcttttgaacaaaaaggcaatcttgttagtggaatgccttgggaagtgaaatttcaaactcctctgctcttcttcatttgttccatgacacaatttgctttctgagttactaggatttatgcagtccaatggttaaagagaaagagggactatagatatgtgccgttagagtgatatctctatacaccgcaagcagcagaccaaggtctgtttgtttttcaatctgctcagtaggtctcaacacctgttttctcacagttgaaatgatacagtgtgcagatttcagttcttgttatttgagcaccatgaaaattctatgggtcttaagatttgttatatmkttttcctgatcctctggaatgcctctattgccgttttactgaaggcagtgcatttcaaccttgccactaaattccagagcaatcttagtctttccctttacattcttagtttatttttccctaatgcataattatattctattgtaataatgtttctagttcctaatcttacatgagaatgttctctctcttgtggaatcaaaacttaggtattggagtataaaaagatcctttttttgacttatatgcaaatttaggaattaaatgcttggttgcttactgagattgttgtcaagtagaaatacaggattgagcaacttgaaaggataccattcacatatcctgttcaaataagttataaattccaatgttccaagcaccattttaaaaataagtagacttccagttttctctttcatcctcaaatatgttattttaaacttcatcttcatccttaacatgaatcttaggaggtaagtgattcttcttttgcagactcccaagttctgtaagattttcttgcataatagcctgagccttcattaaagatcctggaggagaaacggacattgtttcttctccctttggcttcagtctgattggacggagcctggactatcacagtgtaacctgtgataagttacactcttgggactcttgtgaagtgttcataatctttcttggataatataaaagaacagtctaaaakwgctttactctgtagcaccattgcacaatagaactttctgagatgatggaactattgtataatctrtgctgttcaatacagaagccactagctgtatgtggctattgagcagttgaaatgtgggtagtgcaatgaaggcaataaatttttaatttaattcaatctaattaaagttttaatctggctaccagctactgcattggacggcagagccctacagtatagtgrctccggctgatggctctgggaccttcactgtgggtcctactttattgacagcttagtggtgacctatggtggtagctactgagagaaagagcaaggaagcctcttaattgctactaaacaagtctaaaagagcttctttactctatagcactgttgcacaatagaagtttctgagatgatggaactatcgtataatctgtgctgttcagtacagaagctactacctgtatgtggctgttgagcagttgaaatgtgggtagaggtagaggcacactctgatatttgctatggaatctacatctcaaagggactctccatttccttaatgcatctgagccctctttgagtggccttagtctgtgttccattctctttttcatcttcctttcacttttcggcccactgcaatctagtttctaccactccactccactgagactgcttttgtccaggacaaaacagttaatccaatggacaattctgagcctttcatttgacaccaccgttaatcactccttsttgaagagatctgttcctttgcttcaataaccttccactctctcctggttttcctcttttcactctagccacttctcagtctttaggagctcttcatcttctgatcatggcttaagaactattctttaatcaattttccaccctagacccccttctttctcactcactgcattattcctaatggatcttacccactccaatggttttagttgccaactttatctgatgactccaaatctagatcttcatttcaagacttttcactggactatgtaccatattcagatgtctattggacatctctacttatatatcctagagaagcctcaaccttctagtcccaaactaaactcctcatctgctcttataatttttaacttctatgttgttcccactttctgtggatggcacctcccagtcctattctttgctccttgttcccctcatatctttgtctccatccatctttaccaagttcatgtgattctatctccataatattttttgaattcatctatttctttctatcatcattgccactactaaagttagtcttctcttacttgagttactacaacagtctctctgtacccctgtcatcctctttctcattccttctgagattctctgttactttcagaataaagtctaaacttattaatgtaatttccaaggctctctataatctgtatcttgtttacctcttcagcctattctattgttactattcctttctactctactccctaagtccatgctgcagccagtctgaccactttgggatccctaactgtaccatacttttgctttaacacatgcctatgatatgcttcttcaaattatttaggtttcctagtacagatgatcattgatagtctggttgtaaataaccctggcatcaaaacagaattccatacgtatttcttaagatactaccataaaccctctgctaggtaatgtcagtgatgagagaggtagaaataccaagattgatgctcttgactatcaaggagcaggcattgttggaaacccaacttacaatcttgtttataaaatacaggcacagaccaaggctttgggagtgcatgaaaaggagagataactggaggtttctaaaaaggcataattcaggcatgatgcttgattggagttttaagactggacaggactccaatagtcagagacagggggtctgggctgactgcttcctgtcttctctgcttgagtcaatactatgcatttcagggaactaatttgtactaaaacattgccttgatcatgtcacttgctggcacagaaacatggaatgttttctgctgccttcagagtaacagccaaattctccataactggccccaacgtacagttattatactagatggcttttaagatcacttacaaaccccagtctatgattggataattctaccataatagttttactctccacaacttccccatatgcctcatctttctacttcctggctttgctaataccmgtctattctcttggaacgtagtcatttgttttcctttattaaagtttatcttcttttcaagtttgctacaaacagttcagatcatatcatctgaaattatatttcttgtccctgaacattcagagaaattacaatggtataggatttatttgataaatggtcacacatcatagacaaggataggacactgtgcaaaaaagttttgagccaagagataacattaggggttctctgattgtcttctaatgtactcttatttttatagaagtttaaacttcttgttatatacttttagaatcattatgtctcagcatacaccaatttggttctacgttttagtgttctggcaaagccttccacagtgacttgtgtgtagtaggaatttatatgacaaacgacaaatgtgcgtgcacacacgcacacacatatgagaagatatgggtaattatatcccacatttaaaacagaagcactttgtttttgctttctattacatcctcacatgtttattaatatggattttattttttatttgttatttttgttttgtgtrtgcatatcattacttgtaccagacaaattgtaggcttttgataacaagaactataccttattcatatttttatatgctacggagttcgtgccctatagtttttgatttatgttaaactaaaacaccatacataggtatgttttataatatttcagagttaattggttaagtaactatatccaagaacatgtccaagggctcaagttaacttgcaagtccttacaggttttttaaggaacatatttttaaataaatgttttgaaatactctcagttcaattattatgcagaagaattatgagaaagaatgtattctaagcaggcagctttttttgttgttgttgcttttgaagtaacttcaagtagctaaatacatcattagcaacagaatgtttaagtttatggggccaattgctgcaaaaagattctttaggtggaaaatagaggcaacttagtgttttttctaactctaatatttgagattggcttataaagtaaatctacttttcctttggcatattcttacaagtggtagatcctaaatatgcattatttcacagatggaaactgtcaatggacattgtctttatctagtgtagcttataagcttctgagagtaattttgcatctcaaggaatattggacctaaaaggaacctaagaaacaacttgtttagtcctctagccctcctctctgtctctgtttctgtctgtctcctttatgacacacatatacacattttatagctgagcgactgaagtccattttgatcaaacttttcacctaaggtagcaaaggagtcattaacgatctttgcggcttttgctttacattcaacttcttttcccttaagtgatttgaaggggactgatacataattttagggtctacaataatttgttcaaaggaagcacctgtgggtctatcacaggttttcaccactagtcagtgtttcagtgaaaacattactcctaaaacacaattatggtkcttggaagagataaacataacctatgaaggtgtcatgatctcattataatagtagttttctcatgcattcctggaagagcaggaagcctggagggtgctggaaaagtgacatttaatgtggaaaaagaaagtaaggaggagatccgaagcccttaggagagtgctactcaagacrctgtgtgcgccagggcatgagggcagccagagggcggtgtgggcacattggatcctggttacctctttcacagcctcacctacaagacctgaataatgtagatttagattgttcagagaaatggttaaagaggaaataatttcatcgtaattaagaggattaaccatttaacagaaagctggaaaaataaaaaacaaggaaggaagaagttgaaattagcaaattttaaattggaaaaaaatatatacacaaaatatttttagcaaccaaatacagtatggcctttcaccacccaccccctgcccaccttcagttgaatgcagtgttttttcatgagtttgagtgaaggaaagcagcttaaatgtatcagaggagtttattaaaaacttattttgatcagctgttctaagtgtggtgttgatttctaacttgttactgcagcacaacatcccatcactttaaacagttgactgagrgctttagtctcccttttctctattttagaccatttcattgatctccaaaacagcttccataaactattaaacaatctgtaagaatactgagtattgctgatcttcccagaataaccaaaatgagttgtgtttcttatattgatacgtgtttattcatggatccaccaaaagaaagcctttgtccttttgagggatagagtaacctagtgatgaaacgtgtgggctctgttgttaagttgttggagtcctttctggcttttaaccctctgtgcttatgtctaaaatgagggttataatggcatcaacttcattgggcttttcatcgaacagatatttcatgaaaccaaccatgtgccatgtcctttgcaggccctggggatatagcagtgaacaaaacagacgcaaacccctgctcattaggagcttacagtctaatggaaaagggcagacaaacacaaaaaataaatacaccgtgtagtgtatcggaaggtgagaaatgccagacagaaaaatcaaacagggtaaaggggatgatagtcttggaggaagggagggatgcggttataaatagggtggtcagagtagtcctaactgaaaagawggatttgaatgaagacttgaaagagatgttgggaaccatgcagatgaaagcgggaagtacatcctagggagctagcttgcctgaaggctctaaatgggagtgtattgggtgggtttgaaaaagagcagatgccagtgtggctggaactcttcagggaacaaggtraagggtaggaggagatgagtcaaagaggcagtagtgggggttgcttgagtagggccttgtagacccttgtatggactttggtttttaccattaaatggaatggtgttgatgcagtacacggtttcgagcagaagagttaacatagtccttctgaaagtatcactctggtgtctgttaagaatagacttcagggagacaagtgtggaagcagagaccagagaataaatgattacagtaatccagatgagggatggcagtgtcttggaccaaggtgggaccaatggaagtgatgaaaagatggttaaatgttaaatttattataagaaagtagtcgacagcattttctgatggtcggatatgggttgtgagagaaagaggagacaaagattttggccaaggaacttgaatgtatggtatagaattgccattagttaagaggaggaaggaagactgtgggtggaacagattttaggggggatttcaggagtttagttttgaaatattaagaatgatatgcccattaaatacccaagtgatgaggttaagttgttaaaaacatcartaagtccagagttgggactcatacatatttggatctacatggcagatccaaaccagagatgcattaaaggagttgtcagaatatattggaattcaaagcagtgagactggacaatatcacaaagagtttgtgatgcggagccatgctacttggtactaccacttattagctgagtgattttgggaaagtcacttagcttctctcctcatctatgaaacaagaagaataatcgtaactgcttcatggggttgctgtgagaataaaaatgattaatatcgataaagcacttagaacatggcatatactcaataatcattaacttaatttccattacaactctcctctgtacctgtgagacactgcaaatatgtcaactcrtatgttattaatgttacaatgcagcttttctttaagtggtgttattatatttttggtttatatgctactargagttatgtgctattaggagtcccattgagttggttttgcttccagaattaaactgacctggaattttggtattaggtctgtctccattgattttttttttaaagcctgtataaattttagtatttgttacttgtttaggaaaaaattatatgtgtctcttcagtgctgctttcctttgcttttctcagtgctcagcagaggagcagtcaggttcacaagaaaaccacagttggaaatcaggtaggaattgcataagagaatcagtgtatgcatgtcccaaagaatttgaactaaatcgcttgattgactatttttttaatgcaaattaatcacgtgcaaattttgcttgaaatgcagctttcattttgatttgtttttgcttttaaaatttttggagtgaattgcatttctttttggctattttgtgcagttaaccatattgatttattttaaataacctttctgctacttgctctgcatttcaaatttgactcctcatgtcctattttgcttgcttacgttacccctaagtttaatttaacattgagtttgtgagtcagttgaaggttaaaatgtggtgagtagttgcatgagctttctggggttgctaactagttcacacatttgcacagcttggtatcagtgaagggacagctcatgaagaacgcagttgttggatgtaatctctgccacactaaattcttgttggttaatgaagatgttaattcctaagaagatctgatcttttgagtttttgtgttttgggctgaccagctgtctctgactaatagcgctctgcagagattgtattaactcaacagtttgctgtgtcttttatgttttatgtgataatgaatatttgcattgttatttcttttcaagtcaaaacaatgatggtgttatagtttttaaaaaactttcagaggtacaattattgaacaaattgaaacctctgctctagatttttttcccattgttttgaaaggagaagaggtaataacagactttattttaaaaactttttttctgaactaaagcatataattctttgctatttcagggaaccaatcttccgccttcaaggcaaattgtacgagctaagttctgtaagctttactgttgctttttcatttagcttcccaagggcacagtttgtctttaactgattaactcaactagcgcttgctactaattttttttaaacttaggttgtcttgtccgtaacaccctatcattgaaataaaaatcctcttaagagggttcatcccttcactgctaataacttgctgtgattgaaaggtatgaactagtaaactctaaaatgctgtaataataaacccttaacactgtgggtgctttgatatttctctaattttaatggtccttaaaataattaaaatcattaatgatcttcatctctgtccttttatgctatgttgttatgaggtgtaagcctttctcttccccttgtatggtaatatttccaataaatgtagatgatgcttctaaaaggtgggtaaatattgagtatctgattttgctgtgtttgttgataagcctacccaataccaattatttgcatttatttaaaaaaacagaaaagcaaagttatagtgatggacattttatatggctatagagttaaatctttgaaaaccagatactatgtcttcttttatggaagtgtaaaaacattgtcataagcatttagaaaaaaaattaaactctaatttctaccacrgataaagcaggcttattcttccaactatgcacagtttgagaatgagattggagcatgggtcaattatctgccccatgatattttgggaagacacaggttttagacctagacattcctgggttcaaattctgttctgtcacttaagagctatgtggcctgggacacattgtgcctgagtttgctcagctgtgtgatgagaggaatagaaaatatctctcaggatgatggtgggattcagaaatgatatacataatgaggtttgcagcccagtaccagatatgtgccctgtaaagaatagaaacattactcccaaaagttaggtgctgtttcttcaaactcttgggagaaaaagtttaagtacaagaagattataaaatttataaaatgagaacaacaaawcacttgggaaaattagaagctatggaaattgttctgatgcctgcaatgcccagattgtggttggatatgatataaaggatttacctgtaaaagtttcctcacagtcagaagcatcgcttagctcacagaagtatgtacatgtrggaaaatcaatagtataatagcatatatgcatactttagatcagaggaaacttggaacagctttcagttatattacttccaaatgctcaaatcatgctaattgtgtttctgtgactttgcttttgctggatacttcaaagcccacacattatggaagtattacatctcaagataatagaattgggtgagtgttataatggaatatagattccttatccaaaacttctggggccagacatgccttgaaggtcagaattttttggactttattaactgtatcatatattaccctacattttgtggagttagagacagcaccatataatgaaacatattctatttctgcagtgaaacaaaggaatagttacaccaagtaaacttttaaataaaagataaatcctctcacatcagatcaggttttgctgccaaatttgctaagaaaaaagctttcaatttgcaagcaagggattatgaactagaatatattattttccagaatcaaatccaataatgtatacatgatacaatatattttaaaggatcttcagtagttcttcctacttascagaaataaaccataatgacttgaaattttctttatgaatctgagcatatgatgttgattggggtttatatgaaaacagttttgcctattaagaggctcaaatccagggagttttggggcccacccttccgactgatgctggcttttctggttggtggggctgaaacactctgcagcatcctaggaagtgattcatccatgctgctatcctcttagggctcctggttgcagaagattgttgtgcagcatctgttctgaaatattttagaaggatttaagaagggcaaaactcttctttaaagtctaaatttgctttgtttatgtctgcctagaaattgtaatagtttcacaagttgatgtcagcaaatgtacaaaaaaatgtgagcacataatttaccgaaagctggactgctcaaaaatttaaatttaaccttcattcatccttccactcatgtattcaaaacctatctgtgtcaaaatgtgtggtgggtgtttagagaagcatgatgatgcatcaatcacaggcctcaccctcaggaagcccacagctcagcggggatgatggtaagtaagcaaactgaagtccacttccttttccaaggctagctactgctgacccttcaggtcttactgaaacatcacttctgcaagaggccagccttggtcaccagatttaaagtcaccctcccttcccaatgtctttcactatctattacattttattatttgaaacaatcttatttattcacttatttattattttttgtcttccttcattaggacgtaagacccattaaagctatttttatgttgcttaaagcagtacagaattatagtaaggttttaagcacaatcatattaacatttgtggagaaaggctttgaaggtgagacaagactggaaaaaggagattagttagaaggctgttgtggatgaaaaattgtggtgatccgggcttgggtgtttgtactgaatttgaggaaaagctgatgaattcaagagatattaagtaggaagaatccaaaaaatctgtgataaattggakgtcggagagagggctggaggttgtcttcaatgcatcaagatttatgatttaggtacaagtaagatggtgctgctcttcacagagaaaggagcatagtgaaaaagtcagattgggatccagagtcatgaaagttagctttctgagtatgagtcaccgtgggagtttgaagtaaaaatgtccagtaggaaggtggataaaagtgtttaagtccagaagtgacagagaactctttcttccaaaggtattggagactcatggaaggatttccaatagrgaagggaactcaactgatttttatattagaaaggtctgtaatggaatagtttgaaggagacaaactagagatatgggaattggtgaggatgcttttgaaattattcaggtgagagaaacattggttgcaggtagtatttagcagaaggaacagattcaaaatatattcagagggtagaattggaagggttataaagagttctcagggggttaagtcatcctcctaggcttatggctaagggcatgcactgacaaagggagtgcaggagaagggggagcaggtgtaaggggagatgagagcagaaggtgctgatttagggccgggcacggtgacttatgcctgtaatcccagcactttgggaggccgaggtgggtggatcacaaggtcaagagattgagaccattctggccaacatggtgaaaccccatctctactaaaaatacaaaaattagccaggcatggtggcgagtgcctgtaatccaagcttctctggaggctgaggcaggagaatcacttgaactcaggaggcagagattgcagtgagccaagatcacaccactgcactccagcctgggtgacaaagcaagactgtctcaaaaaaaaaaagaaaaaatagaagaaggtgctgatttcaattttgaatatgtttgtgcttattggagatatcattggggtttgaggttcaggactcatgtacactggagacataagtttcactgttgtcaataaatacatggtatccgaagccgtgggagtacatgagaccacctccaaaggatgagaacatagaaaggaatgtaggacttaaagcatgatggagaaagaagaactggaactgaatggggaactgaaaaggcaaataagaagtgatgagagaggtaggaaaacttggagagtggttatcatgggaaattcagtcagatatcgggcaaaattcacccccaatatttcacataggttcttttctattttccctaaatgttggctggtctgagaaataaagggacagagtacaaaacagagaaattttaaagctgggtgtccaggggagatgtcacgtgttggcaggttctgtgatgccccctgagccgtaaaaccagcaagtttttattagtgattttcaaaagggagggagtgtacgaatagggtttgggtcacagaggtcacgtgcttcacaaggtaatagaatatcacaaggcaaatggaggcagggtgagatcacaggaccacaggaccagggtgaaattaaaattgctaatgaaatttcaggcacgcattgtcattgataacatcaggagacagggtttgagagcagacaaccggtctgaccaaaatttattaggtgggaatttcctcgtcctaataagcctgggagcgatacgggagactagggcttatttcatctctacagcttcgaccgtaaaagacagccacccccgaagcggccattttagaggcctaccctcagggacgcattctctttctcagggatgttccttgctgagaaaaagaactcagccatatttctcccatttgcttttgaaagaagagaaatatggctctgttctgcctggctcactggcagtcagagtttaaggttatctctcttgttccctgaacattgctgttatcctgttcttttttcaaggtgcccagagttcatattgttcaaacacacatgctctacaaacaatttgtgcagttaacgcaatcatcacagggtcctgaggtgacatacatcctcctcagcttacgaagatgacgggattaagagattaaagtaaagacaggcaaaggaaatcacaagggtattgattggggaagtgataagtgtccatgaaatcttcacaatttatgttcaaagactgcagtaaagacaggtgtaagaaattataaaagtattaatttggggaactaataaatgaccatgaaatcttcacaatttatgttcttctgccatggcttcagctggtccctccgttcrgggtccctgactttccgcaacaagtggtagaacaaaagctaaagggagagaatgtttcaaggagggaatagtcaatagttagatgtttctaagagctcaaggaacttggaggaagttgtcagatagttggactgtggaaggtcctgtgcaggttagggactatctgagggtccagtgayagcacgaattctcttggccttgtaaattgctcttctgctctacagttggaaggtggcataaagctgaggacacagacaaatgaattgatattctgagctggtgtttttctagggaggcagcatggaaggtcaagagagaagatgagttagagtttttaagagagacaggttgaggtaaaggactgtgtaatctcacatgagtagctttaattgatgtattaatcaggatagattaaccaggtaacaagcaacctcaggatttcagtagattagcataatacaaatttaattcaccctcctataataattcaatgaaggtcatcaacatgcagggagataccttgcttcacatggtcagtaacagactgggctttggaatcccagagattccaaaatctcccttctctgccttctcctgcatagaacctgcaaatttcattcttgcagcaggtgggaaagagacagaagcctgggcaagggaggtttttaagaaccagtccataagtggcacacatcatttctatatcgttgaacagaacttggtcatttgggctcacctagctgcgtgggaaatagaaaaatatactctgagcttgtgcccaggaaaaaaaaaaagacaaaaaaagatgatgttgactgaaaattgaaaggaaatgggcaarccagggaactggaggttttactaaaatcagaaaaagtttgtgctaggattaaggaaaagaaattatgaggtgggaggttaaagtcagtgagtggcatgttgtacttgaaagtttaagagtaaagagcatgccacctgaaagtcagagatgttattggagtaagagataacagacactggagggaggggcacaagtgataactaaaaatatttgtggaacattgtcttcggaaggtgtgagtagctgaaaacaaatggggatgaaatgtccttggttggaatatgttaggggccaggaggactgatgtggcatttacatgactgataattcattcctttgtcctcaagagtcttagcaggaaggcattgttgacatgctccttggcccgagaatgtatccaactgcaattgtataactggaaagactttttctttaagcaggaagtagagcaggtgcttgcatgagcctagatattagggtacttcttagtctcaagcttattatcagttttgtttgccatccatgtgcccactattgttctaactttagactggaatatgaaatttggcttctcaaacctacaggtctccaggtaactggattatcaaccttttgtattataggctgcaaacagaaaaagatgtttccttccaaacagggtttcttctctccctactttctgaaaactagttttagtagacactagtctttttcataggatctctcacaggtctcagaaaattataaatggacctcactatcctgaaattttcctgccatgtcccctagttcttcaacctctgtatgtacatgctttgagtccaatgttaaaaaggtgacagtttaatcagttctttaacagatggataacaargattgccaacatcctagcctaagagagatccttccagtcctctcgcctttctccgctcagctaattccaccttttagggtctgtcactcttaactccaagtcttacctgacttcctggtaccgatatctctatcagttaggattttttcagatgtaaatttcagaaaactcaaatgaccctggaaaaaagggaatttgttagtttacatgaatgaacacttcagggatagaatcgagcactatttaatccacagctcaaatagtgtcaccatgaactagttttttttccttccatatttttgttctgctcytttgctgtggttctgttcttgccccaacggactgcaagatgactgtcatcagtctccagggaattgtcttcttactttgaatccagcagaaataagagtctttctcccaggattttcagaaaaccttctaaggttcagtctgattggactggcgtggatcatgtgcttatttctgaactattcactgtggccagagaatgaggtatactgattgacttaggccacatcatatgggacaagggatgttcctcaccagaacacatgggctgcctctccccctgaaagagctattgctggaagaagaaaggatagacgctggagaaggtgcatcacaggtgaaggcaggtacttgctgagcattatttgtcttcagaacaatctaatttggatactaggatttttgtgtatgttgtctttttaaaggaatatgagatggttaatacctcatcattaaaaccctatggttcatttattaataaaatttaattatttttccaattcatgactttccccttctctccctttccttttaaaaataattctactgactatgttaggttgagaagcaacatagtgccttggttcttcagagctgacacagtagagtcactgtgtcactatgagcaaattaattaaaccttactgtacctcagttttctaatctgtaataagctgataataatagtaactgtttcataaggtttttgtattaaatgtgataatactagttaggtacttaggtatggtgttgggtgttttacacacattagctcattaattcctctcaacaactctatgaggtagrtacccctattatctcagttttacagatgggaaaactgaggcatggagaggcaaagtaacttgcccagtcacacagatcataaatgatagcaccaggattcaaatcttaatcaccatgtttaaccacagttctaatcactgtgtttaaccacagttctaatagtttgtaaatttcatcaagcatctcattttgtagtctcaattatttatagtctcatcatttacattaatttgctttttttattacttaatttttttttttgagacagtttttctctgttgcccaggctggagtgcaatggtgtgatatcggctcaccgcaatctctgcctcccaggttcaagcaattctcctgcctcagcctcctgggcagctggaattacagatgtgtgccaccacgcctggctaatttttgtatttttagtagagacggggtttcaccatgttggccaggctggtcttgaactcttacctcaggtgatctacccacctcggcctctcaaagtgctgggattacaggtgtgagccaccacgcccggccacttaaaatttttcttaaaataaagccattagatctgaaaagaatgagctcggctttatagaaattaatctgatgaaccaaaaaactacaatggctatttgaatttgttgccattttgttttttaattctataaaaatatctccaaaggggccagtcaatagcttgtaaaatataataatcattattttattataataaaatagagattagagtttatgaaaaccacactttgtcaaatatacagcctgttaatttgttctgcgtctttgagatctagagttttatttggaatagtatttaatgtatgccacttatgttttttccccagaaaataagcagatgttctttccatatttttacagccaagttgcatcttaatggagggtttagagcataaaaaccagtgaagagattatcttatctactcaaaattactttgaaataccccttcaataggcagaatctaggttttctgctatgtttttactttgggacagtagaggcatggtcttgtttcaccagaggaagaacaactggtgaaacaaaggcatctctcctcctgcctccctccggctgccccatagctcctctctctccctccctgcttccctcttttcctccctctgtctcttttatcctctttgatgctctctgttttacaagtgtggtgtgtttgattccaagtaagcaaatgcctgtattattccaattccttggaattttgataacatttaaaaatgttaatrtttctcaccaaagatattattttattaaccactgtatagcttatttagcacaaagtatccatggagccaataaagtatccatttgttacttgtatccaaagtacataattttgaatctataattttcaagttaaacaataaatatatgaacacatttttactgtgaaaaagttgaataatgcagataaaataaatacacccttgacccccacccaatcccactcacctccatagctaccaccactgttatcattttggagtatatatacacatatatacacacacaagcacatgggtacacacccacccacacacaaagacactgtgatttaaaaaaataaaaatagacaaatattgtacatgttttgttctaaaattgtaaactctaccaaggcaaggatttttgtctcttttgcttattaatgtatccctaacaatgtctaaaagctggtgtatggtagctgctgagtaaatatgtgaagttgacctcactttattcatttaatgatatgtcttagggatttttccatgtaaattcgcagacataaaatgacaaaacttctttgtggcataatattatagtgttctacrgtatggatgtgccatacttaattcacatttccctaaggataggtatttctgctgtttccagtttttccaaaacacctgaaccagttcatagacccaacaactatatatgtaagtacctcaatccccagtactggataattatattttatataatttttgataatctaacagaaataataatatattgttgttgtgatttgcattttacttattgaaagttacagaggccaggcgcggcggctcacgcctgtaatcccagcactttggggtgccaaggagggtggatcacgaggtcaggagatcgagaccatcctggccaacatagtgaaaccccatctctactaaaaatacaaaaattagctgggcgtggtggtgcatgcctgtaatttcagctactyaggaggctgaggcaggagaatcacttgaaccagggagttggaggttgcagtgagcccagatcgtgccactgcacttcagtctgggtgacagagcgagactccgtctcaaaaaaaaagttacagaccagccttatacctatttaacagactttggtatcccttctcctatgaaatgtctgatgtgtcttttgcccattttagggaaccattgtattattttcttattgatttttaggattttaaaaatagtctggrtattagttttgtttgtattatatatagtacaaatattttctgcttatctatctcttgactttcagtttttttactggatattataaaacaaaaagttataattttggcttagaatattttaaacattttatggcatttattttttatcttatattttcttccaatatttttgtggatttttatacttagctatttaaatttttgtttgtttgtttgataatcatatacttctgtcttcttaaaccacagttacttatgtctataacttaccggcgaggataaatatttttcatgcttattgaccactagtatcttctgtttagaatgagccattcatgctggtgtttatattctctttgatattttttaacttttactgatttataagagaattttgatataataattatattgaccttttatcatatttattaacaattttttaactttttcttatatagaatttaattttatttataaggttcttgaggtaaagytttaaaaaatgtttgatagtaatgtttattgttctttattctctcatttcttctactgtatttacatttagaaaggtggtacctaccttaagagcagttaagtattcatccttatgtttgtagcattttaatgcatccattattgacatttttccctgtaacctgtctgagattygtcatggcacatggtaggaggtgaggcactaacttacagagcagagtatagaggctaagagcatagaatctgcaaagtctagttctgccacttgccagccatattaaggcaagttccttaatatctctgtttctctgtttcctcatttgcaaaaggagaatgattattgcatctacctcttagagttgttgtgaagattaaacacattaatttacataaggcactgtgtattttgtaacaactcagttactatgggctattattattttattccaaaggggctaatgtacaaatataatcatatgaacagtccatactatcaccattgatttgcaatacttctgtgattgtataataatgtcaacaataatagcataataatcatagcagttcacattcctttaaagtttactctatggctaggtattgccttgaatgtattccttacatccactcatgcagttctacagcaaccctgtgaaacagggtccagtagttttcctgttttataaatgatggtactgaagcttagaaaagttaaatagtttaccctaggtcatacaatggataagtggcagaattctggcttcagtcctggtgaaggatgaactcttaacctagagtccatatctgggttatttgtcttatccctccatctgttgatttttgtacagtgacacactttttaattattgcagcagtctgttttaataactgctaggtttttccttttattattcttttttcaaaaatgagttttgcttttgtagattacttattctttcaattgaagattaaaatcttgtcatatcccaactagagttctatttgttgattgggtatgtgtaaagcttacaaattaatatgagatgaagtctcattttttcacttgctgttttcccatccaaacagttacttgttctgtttattataattttctgttttcccccttaacttaggtaaatttatatatcttgttaaaatataaaataactggaaatactcatgttgtaattttaaataggatttttcaattatatcttctaattatttattgctacatgaaaaccattgatttttaagcatttattttgtatcactggagtttactggattctctagtagttttaaaaattcaattataatttttatttcaactgtgtagttacatcttttatttctattttcatatattattccttacagaacaatataaaatagtactggattttctaagctgctttttactttagtgggaattttttagtcttttaccatcagttttaatgttggatttttgtttaaaatatatttagtatgataaagaaataaatatgggcctgtaatcccatcactttgggaggccaaggcaggcagaccatttgaggtcaggagtttgagaccagcctgaccaacatggcaaaaccccgtctctactaaaaatacaaaaattggccatatgtggkggcatgcacctgtaatcccacttactcaggaggctgaggcaggagaattgcttgaacccagaagaaggaagttgctgtgagccgacatcgtgccactgtactccagcctgggagacagagcaagacaaagaaagagagagaaagagagaaagaaagaaagaaatttaggtgggtgggaggagggagaggatacctaatgggtactaggtttagtacctaggtgatgaaataatctatataacaaacccccatgacacaagtttccctatgtaacaaacttgcacatgtaccccggaacttaaaagtttttttaaaaaaagaaattttcaaaaaaagtaaattcttctattcctctgtatctgagattctccatcaaaaatgggcattgaatttcattgaagtgattatggtcttacatattgaataaattatgtaatttgttatattgatatacttagaaaacattcttgcttttattctataagacttatttggttattgggagtgattgtttgccattgaacgaattttcttattattcaatttaaggtaacattattcttttttttttttttttttttttttttttgagacggagtctcgctctgtcgcccaggccggaccgcggactgcagtggcgcaatctcggctcactgcaagctccgcttcccgggttcacgccattctcctgcctcagcctcccgagtagctgggactacaggcacccgccaccgcgcccggstaattttttgtatttttagtagagacggggtttcaccttgttagccaggatggtctcgatctcctgacctcatgatccacccgcctcggcctcccaaagtgctgggattacaggcgtgagccaccgcgcccggccggtaacattattctttataaaaaaataatgaatatgcactactattaaaatccctgttgaaagagaaatgccaccaaaattagggagaaaaaaatactgtgtactttattcctgcatatctcaatttgctaaataaaacaagaggctggttcatctgttgggagtgaggggagtaggacttacatggacatcttaagaagatggtgaaactcaatatagttactaagtggaatgtggaaaaaaaaaaagtaaaagggctttcagctgttggccagctgggagaatcaccatcagttcacaggctgagactgctgcacagggatgtcaatttcttctcttattatccggcgagaactctggatctttcaatttagccatttaagggtttagcaaaagactaattataaaacctcattgactataaaggtgtcacgagatcttttgttagtgatgatgtccatattgcagaccagaatgttcttttggaaggatgccactagttcattatcacagtgaaaatcagagtaaatagatgagacattcttgtatatatttccaatagtgctcttttgttatttttgttcattgcttctcatactgaaattaaatcctctgaaaataaatatgtcccaaattcaccatgaccaaggcaaatttcagtttctgtccccaaagcacgaatcttttcacattcagtgcaataacattacagaatttttcctgagtcagaatattccacaaaatatgagacatctttacattcttaaggtatttcaaggagtcctgtattatgtattcataaaaaagaaagcttatgttgatcagagcagtcaggcaggaggtacccggtggttaaccttctggtctccattctcactcaggactctgctgtatcttaagtctcggtgtcaaggtacctaaatgccagggcatatcaggacattttatcataaattttaaaattttgttttgtaattggataatcctattcgagaacaatcttacttttttttcctcctcagatatgtatatgtcttctaatcttagggtctcagatttatcatatagtagctctacatgtcagttcaaaattccatttgccataaatcccccaccccctagtgaagtccctccttttcttttttccctcagacatttgcaatgaccaagtctcttatagcttctgtggaaccatttttactttcccttgggagtaatttgcatggtacagcaagattgtgatttaattggagtagtcttagtagcttgaaagagttaatgcaggtctcagatgtatctgaataattctggaaagagcaaaatggtttatttgcctagcaatatatattttctaattatgtaagtgcagaaaataagtaaaatttaagagataatctcttgaaaaaatgtaaacatgtggagcattcactaattagggaatgaaatgtcttactcccaaagttactatgaaatttctttgactcagcaaccaatccattccccaccccagggaattccatcaggctgaattatatgggatgaatgttccctatccaggaaatgagtgccctggttttataattgaacctcagttccttgaagctttgcactgtacacttgccttaccaaataattggctgaagtttttgtcctgattcttggtaaggttatttacacacttagcctgtgatggatggcccctgtgggcagattattagctgtactaccatttgtattgcctggatggagaactactttggaaatggtgaacaaaaataaaataagcttgggaaataaaaatattaatactaaatatagtcatcataatttaaacaatttctaatgcctataattattatttgtttgcactataatatgaattctttatggagttttgccatctccagccccttttctaagttttaatttgagtctcaattgacttttgtcttttataagaaagtacgattataacaaaaaccttagtttaatatcgagtcattttattgtttccttacctagtctactaaaactgattttcttaataaagctatggaatttttagcatatatattttattctcttcaaacatctctttcttttccagcaactctgttcttcctgttgacctgctgtaaaaagtggaggaggaaaagggaaaaggaggatttgtttttgggaactcaactatctataaatgacttcctcttgtttggtacatccacttgcagcatttcattttcaaatgcctggtcgcaggatccatgtcctggaggaaggaaccatgtcatccttcactcatcctgtgcacatagcctgaccactgctccaaatattatctcctataacttctggcatttcttgtgcgtctcctcttcctggagttcataattcatgtcactgatttccggtgcatgcagagtcaggttttagaaatatgagacaattttaaaattacagatgcaaagcctcgctgtttgagccaacatctgcaactagtttacgggattaacaaaatagctgctctggatgactgatatttaccagggcctctccatttcccatcagaaatcagaatgcctgttacttatatgttctttagttttcaatggaaatcaggaattcatctgttacatactttactttattaagtttcctcctggagtatcttgagttacagccaattttcagttagccatcattaagcagcttgggaagaatatgggtaattaaaatccacaaataattaaaagactgactttaaccaggagctccaacactctaccctgagacattctgctgaaattacaaacaagtcaaacagttaatgtgttgttctttgttttgttttggtgcaaacaaaaaaaattctgaacctgttactcctcagctttcaaccattcagaaatactcctttacatataagataaagttctaacattcattattcattccctcttttctccctgttccttctcttgcccctgacactcctgaattctgtgttccaggtctccagtcagcttcaatagctcaggctctttctctgttcttcttttccattattgccaaaacatcatttcatttatcagtttaaatagcactttcttaggagtacttttccggacttctacactattttcagtcctcaactgcatgttcccatagaaatacatactcctctcaccacagttttgtatatctacttgtttaatgtccatctccccaatttgactatatgctcagttagatcagggacagtagttgccattttcactgccatattctgtgtgtctaacatagaatccgcttataaatatccaacaagtaactgttgaatgaaagaattaaatattttaaaatctggaattaaatcaccagctacataaatgttctataaaataatgactcaaactgtgacattaacatccaaaagggagactctaaaatatattaaagctgcttattaattttggacattactttctgtcattcaaaggaaaaaaggtattttaaatttaattgtcattgcaggtgtgactatttcagttttccatctaaataaatatgtcaccacaacaattgttacatgtaggttgggtgcagttgctcatgcctgtaatcctagcactttgaaagggtgaggcaggtggattgcttgagcccaggagttggagacaagcctgggcaacatgacaaaatcctgtctctacgaaagatacaaaaattagctggacaaggtggcatgcgcctttagtgtcagctactcaggaggctaatgtggaaggatcccctgagccggggagatcgaggttgcagtaagctgaaattgtgccagggcactccagcctgagtgacagaatgagaccttgtctcaaaaaaataaaattaaattaaatacgtgtagctctgaaatatgattctgaacatagtaaattctaatctaataaagaaactgatttaagcttgattaacaattagagcaaaccactgaattatgacttatattaaaaccctagcagatgctattgttgctttagatgggagagattttcctttatcatccttgacctcccagacattgtgacaatacaataagactgctacatgtttacagtagcccttggtgttgatattgcccttgatttagaaccatggtaccaataatttattgactaatctgtgatctagggaaggtataagtatttggtattccaaaggagtataaagcacagttgatctctacttgataataatatcagcccttcactgatgccagacattctattgagtactttatatacattcatctcacttagtatttacaaaatctatttgaatttaggattattagttccaattcttagttgacaataaatgaggcttggctatattaagtaagttgcctaagttcacatagctagtaaatggcagaactgacctaaaagcccagaaagtctatgctttgaacgaataagctgtaatcttattgggaaaatgggagcacagcaaacacagtggcgagtaattcaaaacaaggtgatgtaagtgctaaactcagatagtgaacagagtagatagaagaaagagagccacatgggctaccagagcttctttatttgttaaaatagtataatagatggactcctttttttttttaatcttagaatgttactttcaatttagccatttaagggttttgcaaaggacaaattataaaacttcattgactacaaaggtgtcacgagatcttttgttggtgatgatgtccatattgcataccagaagattcttttggaaggattgcccagaaactgctctacgtatttatacttctacctgtcattctctggaatatttgatattttaataatcataataatagctataatttattgcatgggtgttttatatcaggcagtgtgttaggtgctttgttcttcaaaataaccttgcagagcatatactcttatcttcatttcgatggataataataaaaatagctgatatgattaagcatttcttacataccagccttgtggtaagcacttgacattcattattttccttaatcttcacaacgaccttatggtctaggtagcaacggtttcatgactgaggtaactggggcacagagaggttggataacttgtctggggtgacacatgtagtatgtggtagagctaggatttaaactcatgaagtccagcaccagagctggggctcacaattgtttgcttccactctggtttctccaaggccacgtgactaatatggtggagctagggatcaactacaaagtcttggccctttccactcattggtactcttttgactcttaaatctgagtgattctttcatcacagtgaccctggccctgaacctcttcagtctttccattttccagtatgtgccattcctgaaaacataaccaattcctgaatgtcaaaggaattgctttttttccagtgataaaaatctgtagtgatatctgtctttttatccctgaaaacagaggggagaatttaatagcataggcctggagcttgagatgagtttggggccccacttgccacttgtaagctgaatcattcacatcataaggttgagtcgctctatgcctcacagtgttcaaagataaaagaggaagagcagtgtgaatctcatagggttgttgagaagattagtgagacatccatgtaaagtgcacactgcttatagtaaatattcattaagggttagcaaccatttttattattgcaattaataaagttgtccttttgaattctcagaattgtaccagtaaactttaacttaaccagtagttctcatggctcctctaatttaataacgttagcagtttaaagtagtcctcagggttataattaatgccttatttatttactgaatgtggggtatttactgaaagtatagtttgatgattaaaggtaaatagggtttccttagtgaaagatttgtcttgatgagataagaaagtcaaattggaaagaagtaaaaaattatattcagaaaataaactccaagaatgaccactgttattttaaattttatcttggtaacgttaacattccttaacttcctgctatgtgtgaggccctgttctatggattccctcatttaattttcaccacaattctataaggggatatactattattagctctttctgccactcccccacttttttacaattgaggaacagatgtactcaaagaaactcaggaagtcggagttcgagatcagcctggccgacatggtgaaaccccatctctactagaaatacaaaaaaattagtcgggcctggtggcgggtgcctgtaatcccagctacttgggaggctgaggcaggagaatcacttgaacctggggggcggaggttgcggtgagctgagattgcaccattgcactccagcctgggcaacaagagcaaaactctgtctcaaaaaaaaaaaaaaaaaaaaaaaacaactcaggaagtccatgttttcttaacgtaaatttttactttcctggcatcaaaaattggtcttgacaaaagtgcccaaagcgtttacacaaaattttacagcacatcctgcatcgtgtggcatcagctgtgagttatcccttttgtgttgtcaatcacattttaattccctgataggccaatctcaatcacaaatttattgtgagtgtcttttcttcttaaataatctgatgcaaagaggcaaataatactgcctactgcctagaaaagggattttgacattatttcctgatttaatttcctatgtattgaatcgatgccagacactcttctgggggtggggtggtaaataagacagattaagttctcactctctcatgaagcttatattttagtggtggaaaagatagaaaatgaacaacaaaaagacaaatgagcaagaagaaattgtacatattttcagtgtagagaattaaaattggttgctatgaggaaaagtgaagatggaggggcagtgtggagagaggtaataggagaacctctctgaagagggatggtataaggtgagttctgcatgacaagtcgtggctaaccatgcaaaggtcagaaggtagagtcttgccagaaggtacagcaaggastagaaagaacttgcatgttgtagaaaccaaaagatagccagtgcggctgaaacatgtggcaaagagtggaaagagattaggctgggtgttctaagacactttctgtttttagtgtggatattgagatgtaggtgatcacttctacctgtttcgtactcttcataaaggttcttccattacagaatctctaagactctatatacttatgtacctgccctacccagcaatttggcaagagtacaaaggaaataaggtatcccaatttatctaatgaatgagatcctttcctcttccatgcacttgtgccttttgttccctgtactaacacttacttatataatgctatattctggagtaatggttacaagtactgtttagtgctctgtgcattctcatttgtcctccaacagtaggtactactatcctcatttatggatgggaagattgaggctccragaggttaaggatcatgctctagagggatggagctgggtgtagatgaccctggagacttgctacctccttaggagtgttgcttattttacagtatgcataagttttatgccacatgtgaggctacgggcatcttgaagtcagtccaaaattttatcttttataatcttcatgccatgtactatctagtaactatgataaagatgttaaaaatgttgttggcaggatgaaaatatttgattaagaaatgacactaaaattatccccatcaaaattatcttcatcttctcaagagaatataccaaggaaagaaacagattgtttaccttacatttgtatccatatgaaacatacagtcttttcattgtctgggagtctgtccacaccacagtaacaaaaaaagtgcaggttgtatatttggtgctggagatagaaaggtgttagataatattcctgtcctccaagggcatggcatctagtcctgcagagagctctcattccttttttcccctctcataccacatctcctttccaatagcaaatcctgtcatctggaatctgaccacttctctctctgcccattaccaccaccctgctcaaagctccatcatctctcacctgggttattggcctccctcctgcttctcctctttctcttgtgagtctctcccctcagcagccagaaagcattctttaaaacagtgagatcatattacttccctgttcaaaaccctctagtgatttccatcctactgagaatcaaatctaaaggtctccaatgactgttaaggtctatgggatccgtctcctccagcctctctgatccaagttcctaaggctcctccccctctcgctcactgggatcaggcaattggcttccttggtgttcctgcctcaggacttttgtacttattcactgttccctcttcccggaattcattcccctcctccatcctgttacaccaacacaatccacatgctctttaaattccttcaggtctctgctgaaatgttattttattgaagaggcctttcctgattaagtgaaaaacatcattttctctccaacataaaccaagagcatgcattatctcacttagattgcttcgttttttcacagtatttatcatctccagatatataattatatggttattgtctattgctgaactctaaccacaactctaccccaactggagaatataggttctagtgcctagaataaaaaaaaaataggtactcaattaacgtagtaagtattcaataaccatctattcaacggatggatggatggatggatcttctatctctggctaatatttagactcagcttatctttggctctaaaaaggtagcacttgctatgtaaatagtgttctgataatattaatgaaatatcagttctttcttgttggattgtgtatatcagaagctgtaggaagaagcatacctacatgcatcttcccctttttcaatttgtgtcattatcttgttcttgtattgtgctgcctgtggatggcattctgtctggatggatgtgtctttttcacacacatatgatcattctaaagagaccccacaggaggttctcacatgcctgctctttgcttcccttgttcactgacttctgcactcatcatccccctatttccttgcactgctgtagacctggttgttttctgagacagtccctatccagtattcttttctcacattccacatttggtgcgaatccaaagccagtccagcatggagtggacaggtggtgttggggagggggaacagggaaaggcagaggagaagcaaagctccaatggagattcccttctttctcccatagctgaggaccctgtattctcaagggtagccacctcagctctatgaaccaactgtttttggaagtacatctggaacactttgggatattaaaatagggctttgtggtcaaacttggagttggtaagcaaagttaaaaggtgtgtttatcttgatacttctcagcatttttaatagaagaatgtgcattgtgtacgtgagagaagaccgtatggtattgcaggaatttcataacttttttagtcatgaaaacttttttcatggaatgtctctcttaaatagcatttcttagaacgtactttgagaaaccctgcctcaaccccatcagttacttaaaagtcttcactgggccggacgtggtggttcccgcttgtattcccatcactttgggaggctgaggtgggcggatcacctgaggttgggagtttgagaccagcctaaccaacatggagaaaccctgtctctactaaaaatacaaaattagccaggcatggtggtgcatgcttgtaatcccagctacttgggaggctgagacaggagaattgcttgaacctaggaggcagaggttgtggtgagctgagatcatgccattgcactccagcctgggcaacaagagcaaaactccatctcaaaaaaaaaaaaaagtcttcactgaggcctaagccttctctctattttagaataccagaatggcggcattttttttwaaaatgtgcatggctcttatatttagtctttgtgactgatatggtttgactgtgtctccatgcaaatctcaccctgaattgtatctctcagaattcccacgtgtggtgggagggacccagggggaggtaattgaatcattggggccagtctttcccgtcctattctcatgatagtgagtaagtctctcaaaatctgatgggtttatcaggggtttctgcttttgcttcttcctcatttttttctcgcagccaccgtgtaagaagtgcctttcatctcccaccatgattctgaggccttcccagccatgtggaactgtaagtccatttaaacctctttttcgtcctagtcttaggtatgtttttatcagcagtgtgaaaatggactaatagtgaatcagggtcccacaagtatcatctttaatctttctctgaaagctgaattgtattggaagtggagagaggagaaagaggttgtttttaggaatgagctcttttattttgacccctagtaattactagcaggtaaatccttagaagcactgaaaaaggtagtgatacataagggcaagttagaagttgtgaagtgtgttctcttgcttggtargaagaaagacaactgggtcatacataagagattgtggcactgaacaggggagttggtaagccactcctcgggacctcaagactaaagtgcacagggctaaccaaactgacaggaaagtatgtttgtggtttgcacaaggtgaaagccccagttacccacagctatgtgcttaatggtgtctatatcctcacatcctgcactgccaaaatccacagaacaatcaaaggtgaggaaggaaggtccttgattccttcacattggaagagatttaaaactaggattccacattagatacatgcatgcatttttccctagaacattagtatttatggtagtgggttctctatgaaggattggctactaacacttatttaatacctgagtgtgtgagcatctccttagtaatactattggtactctttttcagaggtatgatagggtaaataaatttttctagaatgtcttaggaacccaaaaccttaaaatttgtcagccattctcattacttgacattgacaaattgctctatagctttaatttgaatgattgaatgatagcacatcttgttgcttccctttagggatcaaaatttccaggaagtcttttaaaactgattctctgtttgatatgttttcttcattggccaattcttgttttgttttgttttttcttcttttgcaattttggaagattttttttttctgcatctggaagatgctgagaaagtattgattcaccatatgaaatcagacttacatgggaaaatttcacctctgtcacccacccgttccactctcgagctccccatctccatcaagccacagcaacaactcttagtgacgtttcccagccagcaggcatcaggagagccagagtggtttttctcatatttaatgctttcaaaccagtcacagctggctgctcctgcaagtgcccatctctcatcagagatgctgaagctcctctctgagtccctcaatcctcccctctgtccagagattaaagacaaaggcctggcacagaagggagcctttggtaccctgctttagcactgtgaccccatcacctttggggattggtcaggctgatgtcatactagttgttaatttttttttttttttttgagacagagtttcactcttgttgcccaggctggagtacaatggagcaatcttggctcaccacaacctccgcctcccgggttcaagcgattcttctgcctcagcctcctgagtagctgggattacaggcatgcaccaccacacccagttaattttgtatttttagtagagatggggtttatccatattggtgaggctggtctcgaactcctgacttcaggtggtcygcccgcctcagtctcccaaagtgctaggattacaggtgtgagccaccacacctggccagttgttaaatatttttaatattctctcttcagtaaccttaaaaccagtgaaaaaaattttacgtttgaccttacagtggcatttgacctttgacctttcaatcttttcacctttacgtttgacctttcaatcctttcgccttattgagacattctctttcattcatttttgtagtattctctgttctctctctcttctagccccgcctcggtttccttcatgggtccatcctctcctcccagacattgcacgttggctttcctcagcgctcagtcctgggccctcttctcttctcacccaaatgctcattttaagtcatttttttcacacccacagttttatttacacctgcaaacaacaattcacaaatttgcacatctgatccagacatctttacagccaatgatctatttcacatgttcacatcttgacatgtccagactgaacttatgactcctccactccctaaacatagtcctcctactctctgtccatgaatgtgcctcaacagtctgtttagtttcttaaacgtagacctcgggagtcatcttcgacacccctttctctcccatcttccatatccaatttatcattgtcatactaacttctcttcctaaatattcttcaaatctgtccacttctccatatgttcatttctaaaactttggtcaaagttatcatcatttttaatgtcggattctgcaatagtcaactatcaatcaccctgtatcctttttcctctctcgaatctcttcaccaacccagagctagaagagaacttttcatgtgcaaatatgtattagtctgttctcacactgctaataaagatatacctgagacttggtaaattacaaagaaaaagaggtttaatggactcatgttctacgtggctgrggaggccttcacaatcatgatagaaggcaaatgaggttcaaagtcacatggtggcaggcaagagagagcatgtgtaggggacctcccctttataaaaccatcagatctcatgagacttattcactatcaggagaacagcatgggaaagacccacccctcatgattcaattacctcccactgagtctctcccatgacatgtgggaattatgggagctacaattcaagatgaaatttgcatggggacagagccaaaccatgtcaaaatctcatattgttaccctactttaaacacttgaaagccttcccatttctctcaggataaggaccaaatttcttcacataaattacatgactaagtgttgtttgctcctccaggcacgcctggtaggaggctcactcttgctttaggtagagtggccacactgagtttgcctctccctctcccactcctgccccacacatcctttagatttcagctcaagtgctgaatactataagtatgccttttcttatacccggtgcaggtgagagcactgttcatgtaaggaaccacttcttggcagcaccaaccagagttataactttacatttatctgtgtgagactttgtttagtgcctattctctcacttgtctataagctccatggaggttggggactgtgcctttgtgtgtgtgtgttactgtttccttggtttattcttgtatttccagtgtgccctctgacacctctaaggtgctcactaactttctattaaatcgttaataaatatttactaaggtgttttttttcttcctctgttaaataagctctctggattatttttagtaaacatccacattttattcaggccttgataattatgaggtattttttcctcatgtgtgcatatttttgtccttgaatgtgagaaatagatgacaggcttagttctcattctgttttgtatcatttggaatcccttccacatggagggcctattaacttcaaaggaagctctgcacatgggaaagatacacaggaaaaaagtgaaaaaaactagagccctgattttcatcatggttaatggcctggatcttatagtggtttaggtgagtaaactctgagaataaacagctcactcttagtgaactcttagaaataactgtacatgtggcagaaataatgcatatgcaggcatttgagcaaattctgggaagcaataagaagagaaaaacatctttagaaataattttaagaatcaagatagtgcggaagcctagtaagccacagaggcataaaaaatgccctcattatgtgagcatgggctaatgttttggaagcgaagctcagtgagaagaggtttctggtgcttttgcagggcagaatgagtagacgatgatgaaggcactgtagacatagtcattgtagasttgggaagtccagaaaaaagtgagaaagggactccttcagttgcatgatgaagttcttytgcgaaacagtaacttggagttctgtttaatttataaaatctttgttagttggttacaatttaaacttatgcctgtgttattaggtaggggttgggatttacagaggaaccagggaaacagaaagttattaattttttggcagctgtattttaaaaagtgggggtttgatatgaatattaaatattggttccttattttcaatcagtttttattgaacactattaatgttttcagtcaatccagtcagttccttatttaaaacagtcaggcttctttcatcacagtgatttcccatatactacttcagaatgctttctttttatgttgtgctgttaggttatttcactactaggttgcttataatctgtttcagttttttcaaacatgctgtgttcattatacattaaagggaatctcaagaaattgcctcttttaaacaagcaataatgtgatgccaacttacttttttaatcacatgagtattataggaaaataggaaaaatacagggaaatggaaggaggaaataaatagaactttgtgttttaccatcaagtttcaatcataggtaacattttgatatatattacaattttttccctgtccttacaataacaaatataactgaaataatagcatacatataatactaataggtactaatctaaatcctttacatatattaactcatatgattctcataacaactctacattataggtattattattattccatgttacctatgaagaaattgaagcaaagggagtttgttccttttaactgacccaatgtcacccaggcagcaactattgaaaccaggagccaatcccaggtagtctgactctagggtcctgcccactattagcacaccctggcaaaaatatttttcccacatcatgtactaggcatttttgtttagcttaatttaacatcagaggattatgccacaacctgttaatcagtttcctgttaggaaaatggattgcttccaattgcttgccattagatgccatactgtagccaacatcgttgtatgtgtgtgcgttaagggtgggggctctgaaatcagtccactagagaggttttattttattcaactgctgaatcctctaagcgtgctctgcaaattggagtaaaatggcaaacagtgcagaaactcctacaaggaagacctgtttattacaaacatggatttgtcagttaaatagaagtacaatctcattttcctcacctatcggggaggaaaatgttccttccctcacagaattattatgtggattaaaagaaataatgtgtgtgaagctcttagcatagtgcttggcaccgagtaatatttagtaaatgttagccattgttactattcctgaatttctaaaaatggagtcaaattattatattctttgcctattttagatacttaggaaactctcatttcctagaaggttaaaaccaggaagtaacatccaaatgtaaaaaagtcacttagccaattyattcgtattagtaacaattgattttgtagagtcttgtagagtcttgaaaacaaagaaaaacaatctttcatcaaatatttgattattttgtgtctcaatttcactattctttaaatcccttcatatatacttcatcttattttcttgttttcacaacttctttatctctgtcatagcattagttcatcagatgtgaaaatctattttctaccatatagctggccacttacaagtcacacctgggcatatttgtggtggccctcacttgtgtttctggggccagggcacctggcacagtacctgatccatcataggcattcaggaaatactggatgactgactgataagtgtcttaggtgagagagacttttgaacactttcctgaattgaacttgtccctgaaaactgcaggcatgacccccttccttccactgttagagcatacaccctctgtgggcaggcgagttcccttgatgaatgggggcaagaatggcagaaagataggcccaggactacacttccctttttgtccatccagatcaatgtgagaagtcactttactcctcctggggaggactgagtgaggaaacaacaagagtgcctctccattcctcaaccctcagcggtattgctccatcttctcccaccttttattccattgagtttaatccttattctggtggccaaccagggctgtggctatccctctttgaggtaagaagtcaaagctctatcagttctgcttctaccttcttgatatcactcccccaaagctaatcatggctcctatgggcatcctcttagcaccactagtggacagaaagttctgagaggggtcaaagcagtgcatttgtagagtccacttcaaggccagcctatgtacaaggttacacgtttgctccttatttcttgtttcaaattatgttcagacatgctgtttctatagcttatcagaaattctgcaatgatcaaatgaaataatatacattaataataaaatatcaacaaactagacatgggaattttgtgagccccctcctcaatgtgaatatgaatcctctcctactgtgaagttcctagatacaaaagttcaagaattacattcccaaaggtgtttttaagaagttagctttgccaccatgcatttaccgtcaagggggaaagccatctatgtgcatactcttggagaaggacacttgaaacatggccgtctattgcaaaattcaggaatttgcagggaccacagctccagttacccaccaggatattttttagttgccttccttttccatacagcatattcaaaacctcctaatytttactttcctttttcctttgcatttctcctcctgcctcctgttacaaaatttactggtctaagaagcctaggcttcctgaggagacattctcccctctatctcattaatccagagccagctggaaagcatgtgcttaggagaagagtgagtggggtgggagagacccttaagtctgtaaataagccacaccagttaaggttagctctccacagttcccttcttgccctggcccagagcacggaatggcactgatggcagctgatctaacccttccttcctaggcctggctctgacaggttaatactagaacctatagagtgcattgtggtatgtacagacctcagctaccttatagtataaaattaggaaatctagttcacctctcgaggcctgccaggcctgtaaatgggaagactcttttccctatagttaaatccctgtctcaggcatgccttagaaacgagtctgctagccaaattcaaggacaagtaacctgtatcctgaggatgcctgtgctcgcaaaggtagatctttcctaaccaactgggtgactggactgtccattgccttcgaggagcccatgcagctccccagcatttggccaggtaggctccaaggtatgtgaactacctttatagaagcagctgcttatctactgagaaagcctagttataagcttttgtaatctaccaagatcaaactatctaacggtgcatggattataacctttatctaggctgcagcagttaaaaaaaaagacagctgcatagctgaaaaaaacttgcatggtcgaccataagtgagatcaaggtcaaaccccctgctcacagggttcaagaccttggccacactagaagtcttccacatgtacttttgtcttcccatgattttattccttgtctctgtattgattttatgatccagtatgtcagccagatgttggggtctgaacttacccgtaacatacaggttttgctgaccttgacaaaatctgttttctcatagcatggaggaaactaacagaacacatattctcttagggtaggctaatcaccaagagaagaggctgggctgttccactcttcccattgctggtcttgcagttgctttcaaagttttcctatttggcaaaagaagcttgggtgatatttatgggcaataaatttaaaaaaaacagtttgtctcctgctgaacaaatgagaacatgcccttttagctctcaaggtcctttctagtcatgtaattatgggtttgcttgttcttgtttactcgaatactcaaaacagaatttgatattcaaatactaagaagatgtaagtggctgttgtagtggacattaatagatttattttggcagttttaaatttgaatataaaattaacattttatattttctctttctctgtgaagggcttctaccactaatcctatttgtcttggcattcttttcaaattttatttagtctttgacttctgttcccacttactttcctttttcttttctttttattaatttccccttattggtcttactccttgtggtctgaccatttttcctgaatgtctgccttttcttatctcattccactgttttactttgattttgcagcttctytccctcaattccttagtgaaaagtacattaggaattgttctttctaaaatcctattttgagctgattgttatcagaaaaacaagtccatttgtgaaaaatgtgcttcctttattgtaaaagaaagggctgggattggaytactgcttcttaacctttttatgatggcagcttaattgctgacaacatccagtgctgaactcacttccatgggtamctggtaagagatgtgggtcatgtttcttcacaacatggcagctgtaatcttctttttcccttcaaattagaaagcatattgcattgcaagtgatataatgtcatagggataatcttaaatatattctaattatttgtatgtccattctttgaaaattttaactgttattagtaaaatttttaaatttttaaattaaaattagyaaaataattgtcctgtagctcagttgactaaatccactggactaaatgatgtttaataaatatccttttcagctacattaaatgcttctagaaatagtggtgcatctttgaggaatgaatctaatggtgccagtaagatcaggcaatttatttagcatcacatcagcttaaactctgaaaactccattcttgtcttcgtttacacggtacctgctttttttttttgacttcattggactcttattccttttatcttctcattttctacctctccagtggcacctcctgaccttatttctctgcttgacctagattgaatggatgatcacctgaattactctcttgcctaaaaccttcaacatcgttacacttctgtacttaggtcacccggattcagaaactcagaaccctggatcaattcccatttatcatcttattttctacatcacgtgtgcaaagtgctgctggaaaagagaacacaattacgctgattgtgtccctgaaagtttgttctttgttctcagctttcagccatttaagaaaatgaattctagttgtacccactctcactcaactactggttgcctcaatatcactaccttcaagcctcccttccaacttcatactctcactctcccagataattttgtctgctttgtcaacagaaatggcaagatcaaatataaccttcctaaacttcctactctgctcctcacgaaggacttacgtccacccttactctctcaacctccccggcctcacaagatgaggcagctttattcctattcaaggctagacccttctctttgctgttcatgttatccactcctatctttgtcctygtatcctctttattgtatcgccaatctcttactctctacwtattattattattattattattattattattattattattgaggcagagtctctctctgttgcccaggcgggagtacagtggtgcgatcttggctcactgcaacctctgcctcctgtgttcgagtgattctcctacctcagcctcccaagtagcttgggactacaggcacccgccagcatgctgggctaattttttgtattttttgtagagatagggtttcaccatgttatccaggatggtctcgatcccctgacctcgtgatacacccacytcagcctcccaaagtgctaggattacaggtgtcagcaccgtgctcggccctctctactaattatgaatcaataaacatgctcaattgttgcccatgctaaagaaagaaagaaaggaaagagagaaagaaagaaacctaaaacaaaacagctatcactaccatcacctcctttgaccctgtgacctattctggttttaactgtcttcctctgggaagagctctccccagtcactgtctccattttttgtttcccattcacttttcgacccaaagaactctgactccttgtcccaccaccacactggcatagctaaagacactgtgatgtctgcattgtactgtcatatccctttcttgctgaatttgacacttccaacctcatactccttgaaattcaccttggctttggcttccatgatcttattgcttttgtttctctgacattcctttacagactcttgtgactacctctgaaatgttgatatttccccgaggattccatcttgaaccactgctattttgcttggagttttaccgctaccagtgtttgtgctgaggacttgcaagtctatacctccatcctaatctcttccttttgcttcagaggtcagatcacactccatctgtgtttcctacagctacctcaaagtcagcatagcctttgctgaatttgtcaactcctccagtttcccaaactgggtctttttcctctattccttctgaattttagaatggttggttttaaaagttggtagctgcgatagtttcagaatcattctaaaacagcacacagttcaataaaaatataatgtaagctacatatgtaattaaaaaatttctgatagccacattaaaaaacaaaaggaaacatgaaattaatttttacaatgaattttatttagcccaatatatgtaaaatacattttgacatgcaataattgttttaaattaatgagatattttacattattttttgtattaagttttcaaaattcagtgtttatttgaacacttatggcacatcttaatggaaactagtcaatagggctcaaccaccatatgtggttagtggctaccggctacactatcacctacttctgtctttccccctcactaatcccactctcattcactcataaatcctgttgattttacctcctagatatttcttcagtaggttcatttccttttaactttatacatcatggctttaattcatatcctggccatatttcacttgggttattgcaatgggttttataacctagtttctctgttccagggagcatgcaagatccattgaaacgcaggtactatagtaagatatctactgatacgtagttttaacgagaaaataagaaagctcagattcatatttaatatttatttattatacatactgatgccagcacccttgctctgcatctctgatacaatgaaataactagtatattttcattgagtggtatgattagcatgctacttgtaagccctggtagggtgggtaatggtcttagtgtgaaataatttaaccagctccttcttactcaaaactattaaatagatgtgatcatttactctatggaaaataaagtttgattgtatgtgtgcatgcaygggcttcaagcttcattgtgaataagaatcaccttggcaacatatttaaatgtagatttttgggtttcatatatatacattctcattcatttggaatggtaggtggcccaggaatctgtatttttataaagcatttgaatgattgtaatataactggtagaaaccatactgtattagtctgtcttcatgctgctgataaagacatacccgagactgggaagaaaaagaaaaagaggtttaatggacttacagttccacatggctggggaggcctcacaatcatggtggaaggcaaagagagacaagtcacgtcttacatggatggcagcagacaaaaagagagcttgtgcagggaaacttccatttttattccatcaggtcttgtgagactcatttactatcacgagaacagtgcaggaaagatcttcccccataattcagttacctcccaccagtttcctcccatgacacatgggaattgtgggagttaaaagttaagatgagatttgggtggggacatagctaaactatatcactatactatactatcactatactttgagtattagtctgttctttgtgaagtagagagttaaaaagccrtggagaaaagtgcattagcccagactggagagggatgctaaatgggggttataaaagcaacagcacamtgaaatggaaattgggcaccaaggcaatgctgaaacagggaatcaagggygacaggggctggaaatatggagagaggcttggaagacagtgatgagaaccgtggtctattccataattttctctgggattggccttccttcttcaactagaaaagttaatagcaatataaaaatgaaatctgattattagggtattttcatcttcctttagtaacttacattcattagtttttcaataagtaatttttaaacatttcaggatgtcaacatattgaggaatttcagtgtaggacagtttttgaccttagaacaatatcatccaattgcatttagcatttcatttctagttctgtgacaacaaaattatcttgtatagaggacatggtaaatgatgccctctggataacagaatttaacttcacaataactctgaggggaaaaaaacctcacatttttccttaaattatataaatacttatctataaataatttctgttaaatctataatccaagttgttaatattttaaaacttaaaacctgtttaaaaaattttatgaagatgctacatgttttgtaatatggtagagaacaaccagaagatttaaacttcataggtttaaaattttacaatatgctgttcaaattataaattaagactattaaaaactccaaacttttcattttagtttattattttatctttctccttcagtcagccttatttaggactaacaaggggctaactgattgaattgagtttcttcttttcgtcatttgctggcaggtctctggtggaaatcctaatgggctgcaaactaggcaaacaaatgggccagtaggctggaagtggggaagggacagtggatatggagagtctattgttcatccagtcaactaaatatgttttaattgtagcaacaatgccataagtaggcctgacacagtctattagtttgcctcacttcattcttgtttcagtcactccacttcaaccatcgatgagtctgagatttttattccattcattgacaggagagacttcccttcactcatctgcacttttggaagataaattctcttgaataactcaatggaagttgagtttggagggaaaatactatttttattgcaattaatatcttgtttttaacttcttagtccaagacatctaatctccagtggcttttgttaaactaaacacctctgctgatttctgctttttcgtaggtgattcgcaaggggtggctcaccatcagcaacattggcatcatgaaaggcggctcgaagggatactggttcgtccttactgcggaaagcttgtcctggtataaagatgatgaggtaagtcacagagagtgataaagttttcttgttaaagtatttctcattttaaattaactgatattattatactatgcaattttgagacaccagtggttctctttcagtgagattaagcttggaatgtttgtttaaaaaggcactattattttcttatasattttaaaktttacaatattcgcccaaatttctttttctttttgtttatttctttgctgtaaccatatgtttgcttacctgaagaaatggaggtaggcatcaaagttgaaaacctccttctttataatcatgtcaatgtactggtaaagtgaaaacaattttcgttaaagaaagtgttgaaggacccaaggtaatagaacattttaagagtgaaattaataatattgatgcacagttaataaarcatgttggaattgttcctgtgacatctgtctcaaatgaaaggcttttaagaacgtccacatcgctagtcttcaagtgagtctcagatcattgtttatacaaattttgttctttgagaatttgatatctatgtaaaagcatgaattatggtaattatagtgttctggttcatgttagatgttaataattttggtcctgtgacttactactcatttaaatttgatagctataaaagtgcaaacaaaaaacttatattagtcttacagaaccatttaagtgctagaaatcgataccattaaaatgtgagggagcacagatagaaattaaactatgtcttgaaatttttaatagccctggtctgacctgataatcttttggtacttataatgcggcatgcaaacattagataaggatactctgtgatagcaaaactatgtacaggtgagattctcaatttcatgtggccacgaagggcatgtgttcaaagttaaaagtttttcctatcttggcctgacatcttttgaaagcattaccgggtgcctttgtcattccttggaggaaaagtttcatgtcttatatagcacttttcatttctcaggagatctgtgtgtaatagtgtgttgaaaaatattggataattggttgattgccactaaactttctgcaataagggaaatgaaatcctatagaaatgtatttaaatttttatgtcattgaccatagtcaaaagtagatttggtcactgtgatagtatgagggttagcagtggtttctttcctgtgctggctgcttagctatctctgtcattctgtgggaagctctagttttaacatagyttgaggagctcagagacacttccctagatgtaaaaatcactaaatagatgatcttctttgctgttcagttgtaataaggtatttctattagatatattttccctccaaggatttagatgataatttatgtgcatttaaatacgtgtaaaccttgggacctttctcagttatacaaggccgcagaaaatattttactaaggaatcataacagtgatggctagtgttttatatgtattaattaactcatttaaccatattcagccttaactactactatccctattgttgatgagaaaactaaaaataaaacaaaacctttttttaaaaaagtcttttctacaggactattttccttattgcagaacatttagtcttggcgaggataaccaacttaccaaagtcacacagctagttggtggcaaagcagaaatttgaacccaggctgttgagctccagagcctatgctttcaaccacaaataaaggcaagaatcccagagatgcctggagttgtccaagccaacctcatcccacagaggacttatgaagatgaattccaggcatctcagcattgacatgttcctgggtgttagcagcagagacactgaagactctggagtagctactgctgttggagtgtggcattagtctggctctgtgagtcctgaaaataagcccattggaaggtataggatgctctctgtagggaaggaagaagctttgaaggcttggtgagctcttggttattggctcatctcctctcctccagactcaggataattctttacaaaatcactgcccttgtagcttccttatgagtacttgattacaacaaatggaaaataaatatgcacagttataatattaaccaagtgccatgaatactcccgctctgtgtgctgtgtataaccaaggtatggtatggagggtagttgggggcaggtgagagtggaaatgacccttgaaataaatggaattatttagatgaagaaattctaggaaagggtagtttcatccatttagatcattttaaaaaagaggaaatgacaaagttactgttctatggagctaacaagcaaatagactagtaataaatgtcagatagtaaatgctctgaagaaaataaaatggggcattgagttagaaagtgataggggaggggtctttagatttgggtgattggaaggaagtaccacttgagcagagactgagatgatgagctgtgcagaagattttgctgaagaatattccaggtagagggaacagtaagtataaaaaccctggagatgggatccawcaggaagtctgtggctgtaacataggaacagtgggggagaaaggagataaaatcagaggtaccagtagawgggggccttatcagtccctacccaatggtttggattttattacaaggataactgaaaatgattggagtgttccaacaggttgtgacatgattggattgatggtttagaaagattgccctggctgctggattgtgcataataagtggtatggggtggatgygtgaagggagcggggatggctagcatggaagaagggagaccagattggaaactctgaccatggtccaggcaagagaggatggtggctgggtagtagctggtggtgagggtgcggagcacttaagttcaaggtagcaaaattatgggctacacacagctatgattgagtcactagcttctgttactcattcagaactctcaagaaacaagacaggaagttctcatcattaagatcatcattgagactgaaagctggccttcgtgaatttaagcaggtataatgactagggggaatgctacttgcaaccacaactcaaactcaatgatgatcttaatgaggaggatcatcaccataatggctaatagttattgagtatttatagttcactgagcacattatttacattctccattttagagataaagaattgaggctcaaaagagagtgagtaacttagccaggtgctaagtgtcagtgctgtgctcttaatcatctgaacatttcccaacaattactttctgaacacttgttatgtaccaggcactgtcctaatcactaaggataaaatgattagcaaggaattcatggtacctattcttatgaaggctctttcccaataaagcaaacatacaaataaataggaaaacctagcagatgctgattacaggctaggaagaaaataaagccagtgatgagttgacatagagtgtctgggatagaggacacaggtagggggtactttacattggatggtcagagaaggtttgtgttaatgttctgaggcaggattgagcctgatgaatttaaggagggtaattaagtccagtgtgactggagcaaaaagagaaaggcactctaaagatgaggattttgatattaagaatgatgagaagttttttaagctggagagtcacatgataagatttgaattctttactgattcctttggttgccttgtggagaatggattggaagagggcgaaactggactggggagttactagaaagctattgctttctacatctattgtggtctgcatagataatggtagcttgggctgggatgagttgttggaatttgataaaaatgaacggatttaagagatgtttttggaaggtgaaaattgacatgaacaactcatcacacatgctaagagttgcagcaaactgtaagcctcttgagaccaggagacattgtttgttccctgtcctaccaccaggggacatagcactgataggagacactaactaaatattgattgaatgaaggtgtcattgagcaaatgaatgaataaatgcagcataataattaatcacgtcctggcatatcaagtgtcaaaattaaattattgaattacagaataaaattaccactaaaggtagattgtcttaaattgtcttaaattttgttaattttcatcattgaaggttagtgtttttttgtttttgtttttgttttttgtttgtttgtttgttttttatcctctgactatatatatgtgacttcctggattgaaaatcatttaaacagaaaattaatttcccaatgttgttttcatacattgcccatatatgttgtacatttttggaaagggatttagtaaaaagcaagatgtgagaataaaacagaaactgtcatttcaaaagttttttgaaatggatttttgatctagataattttacattaatactttaaaatcagacttgaaaaaaatgatggcttttctttaacttatgtctaaaatgtgaattttaggagaatgggagaccctgattcaaggagaaaagagccttatttttcttaaaaccaatgagaaatttgttttaaaaatacataaatatgtaaattttaagagataattcaaatctctgaagaaagaggactgttaatttatgtataataaaagcacttagtcaatatttattctatttctatagcccagtgtgtaaagatttaaatcataatgagctactcctaggcaagcagaataatgcaacataggcgtttccagtggaaatctgctaaccttatactattgaggaaaacccaacatctgcattgaaataaggacattctttggactcttaagaaattacaggcctcatttttgtgggttgaagtgtttggataacttgataaggagattatataattcccttatagggatatttacttagcattgttttcattttgtaacaataacaaatgacaaatgtaacttcagaaataggaaacaaaatgacagttatatccctggatgatcaaagttgtgagatcaagaagttatagaaatattcagctctctttctagtttcacttatacttttaagattgtgcatatttcctaccagatctgcacactccctgtggtggaaaaggtcagcgtcgaccctgtgaacactgttcacactccttcgttaagttatttagttagccaaaacttagatattttcacaaaagtcccagtaaatattgaactctaatccacttatattacttaaaattctgcatgatcacagttgtatatttttttacatacataaactatctgatgttattcttttttaatataggattattcatacaaatatttccatgttctggtattatctaaagatttataattttgaaaaaaagagtattattcaataaaccataatggccaatcctattccaaatttattaaaaatgagtttagattcaaacccactcccctatatgcattatttgtcccactcaaaagtttatcctggaagagcaatattatcctttatattaccctttcccagaagagaaaaatttttaaatgtgcctcatttaatgactttaaaatacatacaaaacattctttcaagcattttttttgaaaattgagtaaaaaatgtttaacaaaaaaggtgttaactttatgttttaaggaaaaatattgaaaatgttatcctggagtgcctcaccttaggatgactctgctgccgtcctagctttccctttggagtctgaaggaygggtgtagtctccttaatgttctggctaggtcattgtctcattctgggagctgtcaagcactctcctgagccttgcagggtccagtagaataattccatacgtgaactctcataggcagcatttgcaacaggtggtacaaggcatttaagattgggtagaacgatgtcgatattctgtgagtaatttttatattgtcttcctgtttatattctacattttgtaagtattgtttaggactttatttgctagtaatgggacttttatttaaggcaaaaatctgcatcgtgcaatgtatcttgcagaagcagagatgaattttagcagatgacatattgccataagacaagattgtttaaatgagagaaatttaactttaatcatatttgtgctttgtagttttgccccatcattcagttttttaattaaagaaactataatgtcaggtttggttaaaatatcattgtcagaaaatttgaaactcactgggatcttagctttaagactgagactttcattttaaaaataaaatagctgaatgaaaaatagtttgctttagttaagaatacatacataaagtgtttaattgttaaatgtgaaaaaagttttgmgtagccttgtgttacattttttaagcttgaccagaatctaagaaagatgaaaattaatttcaaatactgaagctaaaacatgttaatgaactaaataaaagttgacacatttctaattttatccatcttcccaccttttacccttaagtatttaaagtattcatagacaaaagccatcccttatcatttcactccagttaacagtgcataaactgaagtttggatattttctcaaaagatgtgtcaaaatatacatttcaagtgcattaaccactttccttatgcttctgaagataaatgaattgcctgaacatctcaagatcttgaaagtttatagtgatggaagcataggttgcaagtgaatgtgttggccttgtaaattctactcctagaactgtagcataagcaccttcttaattaaagaatgacgcagtcataaatttatgtataccatgacgcgtggaagtatcaaaaatttcaactttccatatgtcaaaagaggagaaactattattttaatatagttgaacactagttggaaatagtagtcttttcactgtgttttgcccagacccagactggcagagttaacccagactggcagagttaactcaaagcacttgatcctttggaatactctttttctcccttttcttttctctgtctttccaccctatccccttccaaaaaaaaaaaaaaaaaaaaaaaatcatgacatagaaaaccatacttagtttatggacaagaattcttagaataatttattctttgttaagcatcagactgaagttatattgttttgttatattgagtttttatatcaatatagggtgctgcaaagctgtgtacaataaaggtcaagggtagtgatttgctgacaacaattaggaaaagagaactatagaatgcacaggaacattttcagaaatgggttttattatatttcataggcaccactcactttacttttggtgggttttaatacttgaatcaaaataaaataatacatgagttaagtattaaaccaacagattaaaaccccaggcccccgagcccctcattttggttgtagctcttggtgtagatgctatggtgtgagggctgctttctttcaatggctggttgtcattcaggctgggttgtcatgtgactgcctgtctgtgcctgctgtacaggtgagcggatgttctgcacagcaagtgtagacaggcagacacatgacaactctgtccagccaggcccttggttccttcaggtttcctttgctcatagacagatacaatcagcctgttttccagatttggtgattttggagagtaaggggaaagggagaaaaatacacaatataattaaacattaaaacattatggaactaaaaacaagttagacttttgactttattcagaaagtacatttatacatttgttccaaatgtgctaacatggataatttgcgtaacagaaaactcacattaaaattttaaggaaaaaaagagattaaacwcaaggtttattcttaagtccaattcatattattactggcccacatgtagtcagagttcagcgtaattgaaccagatgtttttcctctttgcaaaaaactgcatattttaatactgaagttaaagataaaaactatgtttatgcatgtttcttttagtagataagtaccataaccttgtccatgaaaaagaaaattatcatttacatggaaacagcagcccttttcaaaataattaatgagcctaatttatttggcaacccaagttgctgactttggtatttgatgctctgataataggatcctacaagggaatatgtttttaccaattatatgtgaaacaacaggaacctatttaaatgtctcattttccttttaaatgcaaagtttataactgtggatgtgaaatcaaattaaaggcagttgtgagcttaagttatccacctcttaattaactatagggccatgctgtgaatcaaaagggtacaaactggaaggctgttactcacagtgatgctcagaatgtgttttggatatagttagtgcaatatagttacaaaatagtacttaagaaaaggcagaaaaggcaaattcatttcatatccaaaaaattaaaaccagatcctttgaaaatttttcttataatttatatgagctaatagtgttaaatatgcagatataaaatttaattctggtgagttgagagtaattctattttaatatcaattatcaattcacatctttagaagtattaagcaaattcccctccccttttaaaaacaaaaatatccaaatagtcaaaattccagtaagtaggacttcttaaaaaacacagcaccaaaaaaacacagtattgtccaaggattgtataattagacattttctcaaagaactttaagaaaaacaaacagtttgtgatttatctttaattgtaaaattctgagaaaatagcaaatagaaacttaatggaaagcaaaatagttttagatactgagaaaattacaattttctacaaatctggacttttatgcagtgattaggtaaggtaatgttttaacaaaagctaataagtgccattttctgtgtatttatgtaatttcaagaaaacaaatttccgattctgtttcggccatcactttcgagtaaaggaactttttttttttcttgacagaatcaaaaacatgagtaaacttggctgttatttaaataattacaaggttagagtatgccaaaaaccagtgccttaaaatactattgtgttattgttgctgcattcagtgcaacagaaagtaattatagagtgattcacttacaaagagtatattggtggaaattaaaaattactataattctttataacttttcctctctctcccataaataatttgatccagttaactctgctcaattaaaggaatgatgcatgcaacctgaaaaaataaaaagaaatatttgtgagtttgtatgttatgctttaatataaaacagttttattaaggcaagatataaaaattttttgagccagaaaaaccacaacagtttttcaggggaaaaaaaaaatcttgctgaaaacaattgttctattcataaggyttttggacaatttatgtttctgatagatttttaaaacacacttacagtaactatgtgacatatgcacacttcattgttatgttgaacctgcccctaaacttgttaaaaagatgaaagactgaaaaccatattgacctttttttaatctcccaaattataggttgaatattagtttattattacttaaaatactagctaaaacataaaagagctatttgtattattatcataccatgtaatttttagtgtggttattacaccttgttttctttttgtcttttatttcttaaggaaaaaaatgtaagaaaagaattgtcttctaagtcttctgtagtgaaattaaaccaaagcaactccaggaaactggctgtcacgctaagtcaaaaaattcaaaatgaagatttaattatttttcctaatttacttcgttatctctaactattaaaactgataaaaattatttgtaagagacctttgaaaatgagtaaatatttatttctacttaatttacagaacatgaaagtaagaagggatttgaagtaagaaagtttctatcttaactcaggaatttcctgtctcaggttaaagcctgaccttctagttattttaagccaggatttctgagtgatggtctcttagttattattttgacgttattgtgatgggtgggctattctccttagagcagagtaaagtgcattgtttataaagagcagatcccttacagagtaagtgaaagctttggcgtctctttaccgagcatggatgcttgtggatgagtgaattttttcacattaccaagttgtactttttatatcttataacagcttaagacttcaaccaaaaaagtggggagaattctttcrttaggatttttatgcctaaactgtttcccacagagtgaaatacatgggtggtctgtaggcgagaggtgggggtagatagtatattttggtcttttacaaacataaacatattatctgggccgaaagcccgaatgccaagcaggaaggatattaagcctattgactaactacaggaaagtgatcagtgtgaaactttgtcctatagtaaacagtctttctttgattttgagatctgtggcctaaaagaaaaatgagtttgaaaatttaagtccaccgttttagattgatccttttccagttaagaaattgtggtgttgaagctaaggctctgaacttcctttctcttagatggtggaaaagtccttttaacccagtacctagtccaatttatcaatcattcacatgctaaaatgaaaaataattatgaaatttctatgaagtgtagtttggacagaccctgaaayaattttctcttcatgaccacatataatgtttaattttaatacttacacttattacatccaggggtagttttagttgaagatgctcactgttggttagtttcctctggaatagattccatgatccctaaaatatttgtatatctccttataaagtaatatgaaaataaaattaaacatttttcyaatttacctggatatagatatggctataatgtatataaatgtgggcgtgtgtaccagcgcataaactacaatcctgccttcattcagcagagctttataaaatgagcttttacctttgatctttaatttagcccatataattgaaaaataagtactattcgttttcatttgttaaaactttgcctcgaaaataagtcgctagagccacatcaagcatgtgcaggaactccttggttatccttttacaaagtaattcttatatttctactcctgtacttatgccagaggcacccttatgtcccttctatctccagactaaaagtcatcctgagggagaaaataggtgagggacccatagggattcatttctttgaaacaaaaagaccgtttaacatgaagaaagaaattgaaattaaatatacattaaatgaaagcaaattttgaaatgtaatcatttctagagtaaaaaaaaaaaaaaaacccagaaaatttgagaaaaacattaccaaartaccttgttagctatttttcctcttcagtaattgtatcaattagaaaaaatatatttcttgaaaaaatgagctcctctaagttactttttttagttttcttatgtaaaagaaactatatagatttttaacatctcatttgttctactaaaaataattaatatggaactctccaagtcacaatagaaaatgaaaggwtaactttactatatcatctaagtgaaagtagctaaatttctccttgctgtttatattttaactaataatcatgaatatatgagaatacttaatgttttctttatacacattttggggtgatcagaagggtaatttttaaagtaagttgttttgacaaaagaaaacttagggaatcttttataataaaatattttgctaaagagaacttgagtcaatttttgaattgttgcaaaatgtataacttagaaaagaatttgttcaggaaccactgtaactttaaaggaggacaaaagagattatgtttatttttcacaaaccctgtagaagagatgttttcattatatagaattgtttcggaatagaaattaatgggggttaagaaaattagggatgaggcaataacatttttccagaactttctttaaggggccgacctctaaagttcagcacagatcacattgcaatccagacttgctctattattttctctattaggatttcattcagcttgagggttttcttccctcccaccttcctccccctctcccaccctctttcacctccaggacagctggaaactgaccaaagaaaacttctgccttcgtttacaaattccttttttatcagtgggtttctagacaaagtgccttattttaaatgctcagagaagtggaagcattgtaagctataggcaagagggctcagctgagcagcaattattaaccactctttgatttaaaaaaaatgtaaaacagatatttacaggggtatctaaagatagaggtttttattccctgatttactcagttgctgactcaataagttgtgggtcggygctcttctctgggcaaatcccatctgcattgtctggtaggcaagacttggcaggttcttcttttattgttasgtactattattcctgttgtttatattacagaaggaaatcttcagaaaagcactatccatatagcatttaaaaaccagcaagtattctttactttggggaaaaatgacttcagtcctgggatgttaaaagttatacatacagccttcatccatataagtttttaaatctttgaattattattaaacaattcaaaagtagcctcattaaactattcttaagtgtctggaatgagttttttcatatttcattttgaagtgggaaaacctttaagaaaacacttgaattatcaatcttcagaaataaaaaaaaaaaaaacagtaaatcgctatataccacacacttttgctcttttaaaattaaatacatctctacccatcacacatgtacctctgtttcccttgcatgttaacacaaatcatgggctccccacctaggttcccttggtcacagaccaggtgagcagtcaagaaggccttacccgctggtcttcccttcggcagtcttttctcagcagtgtccccgagggcttcttggtccctagtgtgcaaaacctgtgaagaaaaacactggatatgagattcaaaaaaggagcaaacaaatgtcttctccttggaaacagcccattttgtccccagcggtccatggcgttgctctcccttgcccagtctaaccaatgtgcagactactgtacaacggcattgtcctgaacaggtagtctgaacactggggcgacggagcaggatctccagaagcttccttctatgtacttaaaatcctctcccggtcctcaggaaaagcctcccttcctgcaccaggggttgcattcagctttcccccctgaattctgctgcgctgactgagacacactcaagggctgtgatttccagtcttgacgtggcacatttgctgcagactggggaactggcaatgaatttaggaccaggaaaagggggagggctgggctggagagtccatatatgggatgatgtcaccctggggaggtttgggtatgcgctgtgccgctggagagaccgctagaatcgcctgctctcagacatgggtctgtgcataaaatggtaccagatgttttagtgtaacgttaagcagtcatttcatcttcaggccagatttttttcctcaactgggcaggaagtgggccccagtatggaaaagctgtaaaaaaaaaagagtcaagatgtacagttcggctgtggccaactgaaagtgagttagtgtagaagtacaaatttactgtctgacccaggctagagaagtaatttgaagatagagggtagatgaaatagtaaacagaaagttgaacactggaaggcagagctcatttggaaacctttttgagctttcctgtggcactttattttctggtatttcactcgtcaaaaagggcagataagtttctgtctgtctgtctgtctgtctgtctctctctctctctctctctccccctcttcccctctccctccctctctctccctccctccctccttccctcccgctctctctctctttctctccttctctctctccctccttctcctgtctgttgaatctgtcagcagcttgcaggctgctctagacttgracagtaattatagcaacttcctgaaagtgaagcccccatgaaaagtctggagaaatgttctttgtcatggcctctacatgagtaattagttccacatgtggccttcctagtttccctcagctattttggctgggtctctgaatgctgtgctatagtttgacctaaagaaacgttacagtttttgtttgaagcatccactacgaaacaacgactcaggtcttctaacaaatcgcctctggtagatccatgctgttaggtatagcattgtttttcacttgtaattcctgattctgttttgatacttttgttttgttttcatggtattctgtggcttagttttatctctggttaactaaatctgttgaaatttgccaagtaccgcttgaccaaaggttataagatatcagcccactggcatctacttttctttccctgttgtggctgttttcaattwtatatactcttgaatattctgaatatgtagttctctcactttccctccataggattctgatcaaagctagagtygcctcaaacaagagcttgattaattgcccttctgaagatcaaaatgtgagaaaatttctaggtagcttccaaatttaatttgaccaaccagactaagaaacttagccttctttaaagaaagtacagccaaagcaattcatttccactggccttctgaaatactttttagaagtagaaaaatatatctcttttttatacgctgcattgtatatttcaaaaagcttcaagtgagtactgtcctaaagcatttgcttttcataaaatggcctcttttgaatcattaaatagcacactactgaagagttcaaaagttatgacaagcccttgttatcttgtgaggaagattaaataagataaacatgaattatctggcatcttaggatggaacagaggttagcactgggtacaccattcatagaaatatttatatcatcaataggagtcagaggaatgactttatatctctgtacttttgcttccatatttgtgtctttaggacctattcaatagtgcttgcacaagcccataagactcacctcccttttttccctgtcactgcttgcatattactggaaatgatctaagtgtgactaaatacaatctaatacttgtattatatgtggataccaactccattcttttcaaagtatctgtgtgtttactcacatgaagtcctcatagaggagccataaaccactgaaccagtagtcagccagtattccaggtgtagacctgcttctgccacagaaagtgaaagcctttttttctgcccactttcatttatgtccataagacatgccttggaaatttttgtcaaggcaaacaaaaggtggttttgatcagactgcaccatgatttcaccttagtctgtacatctatatgccctcaaatggttctactacctacaccaaatagaatcttacaatatttccatcaagtgacttaactttatactaatcattatgactcgtgaaacattttaaggaattttctccagagacagctatagaaattgagttccccttagaatatatgtccatctccttgagtttccagttaactgaagtgtttgtgggtgctcttgcctccaaatagttcaacgaatatttattcttgcctactcacctgctagtcacaataccagcaactgggcatacaaagattaagacctgactcctgccctcaaaaagctcacacttacataaaaagttaggaatacacatctgttaccaagtgcagtttaaaaagttggtcattctgctctgaaaagtccttggcattgatttggaaatgccttaataacttttcttacgtctgtaaagttatcacttgaatacccaaaatgtattgggccctagaaagcaaggttggacatgacaaatccttgactttgaggaactaaagttatttaatttgcttatttcaaaagttgttgaccaaagtgattattgaatcaatagatggttttgggtgactacaaaatttgctctattataaagggttattaaaaggaaacgctgtttcagttagttattgttcccaatcttggcacatttttatgactttggaaattctcaaattgaaaccaggactgaggcttctttctgtgtacctctaaaggggcagggttactagtgtttacarttattttgtgatatccagatatgcgtacttcagctaatattttatagccttaagttttttttgttacaagattagtgcacaagttcaaacaatagagaggtatgtcaagaaaaaaattaatcatcattatccattccaacttcttaatcatcattatcccttccaacttcttaaccctttctgtcttcccaaactaatggtaactgtttggcatgattcctttgactactttctcaatggtcattttacagcttctttacagattacaaaatccattcatgtacaacgtatttgtttcttataataatcctatagtgtagctattattatcatccccattttattgatgataaaattaaagctcagagagcttaaacattatttcatcagagtccacaaatggaaaaactcagtttttttctgtgctcagaagratattgtcaacctacagaaacaacttgttcccctaccgaattcttatagtgcttatatttcctgttgttaaaatgccaattaattatctgctgcgctttcacagttttgtactaagaygttacctgtactgttattttatgtatttaaacttttttttcctagataaaatataagctaattgaaggcaggaacaatatatttgtattttttttttttttgactggctgatggtagtccatttagtaaactgttaaaagaatgagtaaagagctatatggtatgcatgtggtttctggtcaaatattcgtcatgataataacttaagaattacagctctcttaaaaaaatcataaataaaaaacatagtgtgcttttaatatttatatatgtgtctgcagctacgcaccagattgaactattctttttgaaataaatgtaaacattgarccaaccatatttccttgcttatttttggccttctaatgttctggaagcatcctgtgcagctaccagtgatataatcttgtgtgaaaagcaggatctaaccaagttgtagtgtttcctttcttgttgttttctccttcccagtttgtatctaagataaaaatctagctgaccttagttcattgcaaattagagaagatagccccacttagtttggctttatgttgtgtagattagcacttttttttttaattggaggcaatgcagtcccctaatctcctgcatttcctattttgttagggctcaaaggaatagatatgttgtagcagagcattccacttttcttccctttcctgaatcacaaacaaatggcttccctcaaatcactgcagtgaagtgccttcttaggcagagatgcaacatcagcctgtaaaataaaggagaaatatttcagaggagtaagagattttccttcaacaactgaaaaagaagttaaatcagaaagctataaatcataaacttaatgcaactgattttacagtcttcagaaagtttgcaaaagacaaagattgtgagagaattgattttaaaacgtacatttacggacgcatgttttgtttttgcccgtctctaaaatttccattgctgagtctgtttatttagaaataagctcctaaccaaaagcagtatatattttatgaacattctttcctcaaatcaattgagaaagataatgttacgtctttgaattttactaaccactggcgtgcacagcagccatttttatatttcagtagcataatacatccagcagacaaaccttaaaaactctagctctattggataccagtcgcaagaaagtaaatatatgatttatgactccaataaaattggaagcactgtcttgaaatctttaggggaaggcaagttaaagggattagaaaattgttgctggccttttcaggcagattttaagtgagagcatactagcagtgtagtctgctgcctgcttacaccctcaaaagctgacaagcatcatctgaatgctatgtgctatgagctcccgttgaattccatgttacaatcagactttaaaatgaggrctggttcccttggacaagagaatcatggtgtcctcaggtcactgacaattttagaatattgactcctgatgtcttttggcatcaccagtattttatttccttagtgtgactcaaaaatgaatatgcatgatatcctaaggaaaaaatacctgtatgtgcataatataaggacacagaaactacttttttttttgcaggggtggagaaagtaccctttctgtggatggggatacatgttaagcataatggctacaaggaagcatgtgtgtgaagggaagctttctgctttacccagaatacctgcaattatgcagtaggtcattttagaagctctaagtctttaagtaatgataggcatacttgcgtaatacatagcacattgcctttattttaggattttaatcttctagtatatacaaaaggggaaacccaaattacatgaatttctaaaagggtttgatccaacataagtctgtttagctgtgtccattatagatactttaactagccttctcaattctgttcagtttccagagaatttactctagtttctaaggacatatgagaccatattagaatacttctattcatgccatcatggaaattggctttacttttacataccaaaaaaagtacttggcatataaattggttcatgttgaaaggttatttacaggttgcaaatgagtattaatcacatatctttataaacacttattttagtattaatcaactaaaaatgatttccatttgccacacagaatcagattcagtgccayttcactgccactcaggaggagastacaaaagctatagagacaataacatatactgttttctgaatttagaggtttgttttgtttagttagttagtattttgttttgagcactgattttatgtcagggtccatgctagtgtctttcacatgtgatataatttaatccagcaatcctgaaaggtaggatctctccatggttacagatgaggaagcagaagctcaaggaggtagtgtcgtgtgggtattctggagccagctggcatgggtttgaatcctggcttcacagcttgttatgatgcttccttggcaaattatttaacttttctgacctctggttttctcatctctaaaacagggttttctgaaaagagcttagaacagggcctggcccagagctaagctttatgcaggtagggctgctgcgggacacaccagccacccaggattgttttaaaaacactgtaatggaagctgacttcttaagataaccatttggagaatctttttgaaaagccatcataacctttctcacccttgagtttatctggttttattacagatatatggataggtagactgataaatagatctagatatatatgcaattgtgtgtacaaatgtatgtgagcatatatatgtgtatatagtatatgtaaatatgtatataagtgtgtatgtatttgtatatatatttaaactagatcatctctatgtgagaattattaacaccaaaataaattcttttctctttttaaggtaatattattttaagcctagcgcatgtgcagtgtttttttgtaatcttaaacgttagttttagtgtatagacgtttcagtctttttaattgttttaacttttgcctgtcagagcttcatagcaatagttaaaggttaacatggaaatactgggtaagaaatacctttgtaattttgcaaatgcaacaagttattggtttctattcgagtggagctgtcactgaatgcattttaaaactacacacacattttgtgtactattggttcatttttgtttggggaacactcactttactcccaatcttctgtcttataacaaaatgttttcctctggtacaatttactttgtttccatctctcctcaggttcttcaagaaaaaactagcctttgttttcattggccagaatggattatgattgcttttgaaataatgtcttgttttgctgaaaagctagtagattattaaataatcattttttctttaaaggatttgtacttcattgagaatatgtggggtggtctcaggtgcttcctggccagtgtgtgtgtcaactactagggcaggtgcttggagttcaacttgcatccataggcattttcagggtctcatgaagttagtactgagaagtgcactaattgttgtttgtttgtttttaagttttctgaagagaggaaaacagtgaggataagtggtataaaaggagtctttgtttgtttgtttgtttgaaacactcttccactcaggctggagtgcagtggtgcagtaatggcgcactgcagcctcgacctcctgggctcaagtgatactcctacctctcagcctcccaagtagctgggaccacaggtgtgcaccaccatgcctggctaatcttaatttttttatttttttgtagagaagagactccctgtgttacccaggctggtctcaaactcctggactcatgggatcttcccaccttggcctcccaatgtgttgggattacaggcataagccaccgtgctggctaaaaggattcttttgaatttgccagaagtaattgccttctgctagtggtaaagccagtttgaagataatggacttcccttcctttttttttttttttcagtgatcccagacccagaagtttttagtactacaattcaattggttaatttttggaaagttgagtccctcattctttttaatctttaacaaagaacaagaaagctagtgggagttgattttccagtaaattttgccctatgtacttcgtaaatcaaccttaattttagttctatctttgtcttcagatcataaaataattagtattgctcaccctgtgattcttatacgggttaggttggatctgatttgaggtaatgtcaactgtaactattttattattatttaatttgattttgttttagattgcatgttgtagattcagacaaatttagatgaatgccacttctgttgcattcccatactatatcattttcagtgcatttgtcctgtgtatgtatatgggaggatttctgagtatatcaaattccccacttaaarctaccattcccacggtatgtgtctccttcacattcattatagaggaattttagtgagttttttgtgtatgtgcatgcggacagaaactgtttagaagggccatgttaaaaacggtttttaaccatgtaagataatttacataactgtgtaagataacttgcttaccaatgtacaatgtgattgtgaaataaaagctttgaattaacattcacagtgaaaacactaaagccaagtgtttcggygcccagagcagaaactgtttggtgatttagtgtttgtacagatttaattagttatatttactttcaaaatttcatctttctttaacaaattctacttctttgaagttaaatgaaacctttgcttttttggattcaactgagatatcagagaaggagcattagaattgattggttcaagttcagctgtgccatttcctcatttgtcaaatggtgtaaagaaagatacctacctcagaggtggttgggaggcctaattcgatgatatggataaaataaattgggatgcttttgaaaacattctgcaacaagttcatacggcaacagtttggaggattgccatggcaatgccttagggaaagtggttatggtgttgtagcaaataccatttctacccttggtgacttttatgttgtccctgaacatttacagagaataggagcagagaatattaaactagttattttatcaaaaggcagtgatatgtgttaatttcccatacttcaatatatgcatcaatcacatgatcagaaagcattcagtaaaacaggcttattagtttttgcccttcttcctcctcctcttttccactatttcatcttttctttccatctttcctccattcagcacgaaactttctctgagtattcctcttctctccagcccctattcgtcctgtttcttttttagaacatgaagttggaattgagsttattggtaaaaaaatgtgttaggttatttaataagattttgtttcttctccttaaattttcagtcagatgaattaaaccctaggtgtgcattcttaaaaacaaatagctcccaaactaattgctttgatacttccatgtggcctttaaagtaatttttctatgagccagtagcttttgaattttttaaacattaagtgtcttcagaagggtggagaaagaaggatggagttacagattgatcatatttttatttaaaagcagttttctaaggttccaaagaatattgcataccaaatatttccaaataacatatatagaccttatcgtctgttccattcattcgttcattcattcgttgcttgtgacctgctgattcttcttaaactgtcgtttcacttattctgacatttatatcttatctttctaacttgattagaagcatcttgaggtccagggccatgcctgtagtttctaggtatgctctacaatggtttcccaaatggaatcaggtgaataaacacatattaattaatctgagattttcttgaatggaaggagtcaaagaaagaggattccttctgagtaagaatcaaggccactaaaaaatcaccttcctagtttacattatataatctttatttacctgtataaagattttaaaactgagttgaagaatgccacaatgtgtaggccatttttggagcatttgagagtgtgtttagaagtgccacaaaatgctacagatgccatctgacttaaaattcactcacggagtagtttatttagatgtgtgtttgctgggaatctactaccaggagaaatgtggaaaccacatgaaattcactacataaagaaatctggtttccatttctgtactgcattttgtgctagcaggaagaagataaacaagctgtttaaaactaaagtgaatggcaaaggaattccatttttagatcccaccccgtaaatgtattttggaatttgcaaaacctaatcctatcacataggtcctttaagaagggagaaaatgtgttgagtcttctagtattagctatctcagtggaatggatgagtaattttgtttcctgttgatgtagtgtagtaatacaactatgacatgtgcttcagttaaaattaaaacgaaagtctcattctagtctttggtaggcagacattattctgagaatgagaagagggaaggaagcaagaaaaggctcttttctgttagtttaagatcaccccttttaaggagaggagaattttatcctaagttttaatatagctatttaaaactctgtatatgaaaaggtatatgagtaaggcagatgagaggaaaaagattgaactgtttttattttgagaaaaatattctggaggttccttttaaattttctatttagtgatccttatacagtttaaatatgttatgagattgccatttaaagaggaacacactcagttaagataaaatgtattgtgattaataaaaatgttaatatttgaaacataaaggccaaccatacaattgtgattttcctttaataaacatgaccaaatcatacatacctatgtttaggagtaataaacatgcatttctcaacttggtaggccttgtgctttgcaaaaaaaaaaaaacctgtaatatttttataagatcaggaagatcataacattaaattgttcatttacttaagtaaattaaaactttcattccatggcttaatttctctcctgctttatggtggagaaaagaagctaattaaggtttattttatatactcttatttaatatggtgcttgtttgtatttttgttagttttactattgtaacttctgctctggtgattttttagctggctacacttaataattaatacataatttgtctaagcctacactcagagccaaggggctttatatctatggaaagtgccatttttcaggtgagatgtaaaagtaaacatccagttatgtcattcttttattttttcactcactccatgaacatttatcagacgcctgtgatgttagactctgtsctggagatactaaggtagaaaatacaaactttataccttcaaggagtttgcttgggatgactaaggggcaaaaacaattgttaagaagaaagatagtgattttagtatttcagataaatataaatctacacataagtttagrtttatctaaaaatattatatggtctgtttagccaatgctaaaccattggttgttgttaggcagtagagtgcagtgactgagggagagactaaggagctagaaggccttggtgtgcgtccagcttgactgcttactttgctgtgtgacttggtgaatgttatttatcatttgtggcttttttcatccatagaacgaggataataagtgtttctacttcatagggatgttggaggactatatggattaatctgtggaagctttcagcatagtgtccagtgtatattaagcacttaaaaaaatgttagcttcagggatgatttccaaaatatttagcaacccagacagtaggggcatcaaccagtaagaactgctgttggctgtaaaaatctaatatgaccaccccagtgtttatggtatagataacagctcagttagccttcatcagttttattgtttctacttaaaactcatgctccatccccatcctatcctatggacaatggctcctggaccaggctctgtagtactaacagactgtggacttactaggtgcctgcaatttatatttttgtaatcttcttagttttgagtacctagacttagtatagatttatttcatgttccagacgattcaggatgtttttcttacctaataattcctagaaagacactagagccaagccttgggttccctactttttttcgcctaatgttggcaagtaattgttataatgtaggtgttcatttttttctcctcctttccctcctcctcctcctgtttttttctggaagagaaaaattatatctaaagctaattgccttaaattcttttttagaaagtgattgtatactrtaaataaactaactcttttcagtaatygctcatttttttatttttgcagtaaggatagaatgtatgtaagagcatttaggacatataaagcattaaaggacatataaagtgcaaaagacattgtccttttaagttagaagacttgattcccaacactgccacttgctagttacttaactgtagttaattcactctgtgttacatttttccatctgcaaaattgggagtaatagaacctttctcatagagcaggagacccccaacctttttggcaccggggactggtttcatggaagacaatttttccacagatcaggatgrggtggatggttttgggatgattcaagtgcattaaatttattgtgcactttatttctattattattccattgtaatatataatgaaatatgtatacaacttatcataacgtagaatcagggggaaccctgagcttgttttccatcatctggggatgatgggagacagcgacagatcatcaggcattagattctcataaggaacacacaccctagatcccttgcatgtgcagttcacaattgggtttgcactcctgtgagaatctaatactgctgctgatctgacaggaggcagagctcaggtggtaattcaagtgatagagagcagctataaatatgtayggcctggttcttaacaggccaaggactggtactgcgttcgtggttcaggggttgggaacctctgccatagagtattgtgaggattaaacaagataatacttatcaagcatttaggacatacatttcagtaaattcatttaatttattgtatttatgaagcacttaggatatacagttgaccctctgaattccatgggtttcacatctgtggattcaaccaattgcagaytgaaaatatttgaaaaaaattgggtctgtactgaacatgtacaggctttcttcttgtcattattccctaaacaatatgatataacaactatttacacagcatttacactgcattaggtattataagtgattacttacaatctttaaataagatgatttaaggtatacaggaggatgtacataggttgtatgcaaatatggtgccattttatataagggacttgagtatctttggattttgacatccatggtaggtcctggaaacaatccctcacagacaccaagagacaactgtagttaacattcagtaaattcacttaatgtattcagcaggtatttagagtacttactatgtgccatacagtattctaggcactggggatacagcagtaaatttaacagacaaaaatcctgcctgcatgataatmaagtgcaaacaatatagtaaggaaagagaatagaaaatctgggaatggggttgcaatgttaagtagcatggttaagaaaggtggtatttgagattatattggcaagcagtgaggaagtaagcatgcggatgactgaggaaagagcctttcaaatggtgggaacagtatgtgcaaagaccctgaggcaagagtgtgcctggaggccagaggagctagaataaggtgaggggaagaataggagtagataaggttgataactgggacctgcttaagatctgagtggtacaatgatgggcatggagaggggatcaggaatgtaccagtgaaggtttcttggaggagaaggtagatctggaaaacagagagaccatgaagaagcatatgaaaaaaggagaacattcctgctagtgggaagaacatgagcaaaggcacaggcagtggaaaagacagacctagagaacatccaggatcgcctgtccagaacagacagtgtgcagtgagaagagagggaaacaaggttgaataaatgagtgagatggatgatggaggccttgaaacctaggcagaggacttttggtttctactgattagaaagatgtttctagtcaatagaagcaaaccaatgaaaaaatctaaagtccaaatttaaaatcaatatataaactaactctctcttgctaaaagatactgtttgggtttgttttcagagacaagtaaagaatttaaagttttattgataggtttgatgtaaaatagagaaaaagttttgatacttaaaaaaagtgtttactattaaataaaagattccctaatactctactatgtgagctacagttataagcattatggcttaataaattaggtgttactttattaaaataataatcctttatgaataatcttagtgttgataaaaacatgctggggatcttgttctcttctttctgcacatgatcaagctttaaacctaagcgttgttttgcttgctgctatgtatgtatgatcacatactcacaaataaggggcaaaatgagagaggcagtgagtcaagtcatctaaatggtcacattcgtcctttggaaaattatcttgcaacttgagacccattggcattatttattaattactgcctctttttacattctacttaatgccaagctatgcaaaaaagttatggttggagaaaaaagccgtctatggaaaagaacaagcattacctgtgtgtgagtcctactagattcatcagacttttgtcttctttgcctcayactttttaaatgtattatcttcagaaaaarcatttttacttgaaaataagtttgtgtttctgctacagcaagttcatctcacattgagttattgtccaagactgccrtggtaaatatagtctgctycacctagaactgaacttattttcatatggattggtcctcctcagaaatttascatgtgtataaacatgtttctttagctttcaaatgtgaatgagatccagtgctaagttgattttcatgaaatctatcttaagaagtagatgatgtgactatcaattgtgtacaggatagaatgttaggaaacttttgattctattcctgccttttattttgcagcaggaatttggcaatgtgtgtgctccctctgttgttgagtttcttgagtgtcttcatgaaatagatgcaaaatatcagctaatggccacaatagattttcactaaaaggctacacgaaattattaattctgtttgtgctgtaaaatgtgaattacagtcatgcatcacttaacaatgggaatacatttagagaaatgcatccttaggtgatttcatccttgtagaaatatcagagtgtatttacacaaacctaggtggtagagcctgctatatacctaggctatatggtatatagcccattgcccctaggctataaacccrtacagcatgttactctactgaatactgtaggcagttgtaacacaatggtatttgtgtatctaaacgtgcctaacaaagaaaaactacagtaaaaatacagcataaaagataaaaaaaaaaaaaaaggtacacctgtaaagggcgtttactatcaaccgagctttcaggactggaagttaccctgggtgagttagcgagtgagtggtgagtgaatgggaaggcctaggaaattactgtatgctactgcagactttagaaacactgtacacttgggctactctaaatttatgcaaatatttttttcttcaacaataaagtaaccttaccttactgtaacatttttactttataaactttcaaatttttaaaaacttcttgactattcgtaatacagcttgaaacacagacatttaacaactgtaaaaaaaatttcttttttaatatccttattctatattcttttttgatttttaaatgtttttattttttactttttaaattgttttgttaaaacatatagacacaaacacacacattagcccaggtccacacaggattggaatcctccatatcattgttttccaccttcacatcttgtcttactggaaggtcttcggtggcagtaacatgcatggaactgtcatctcctttgctaacaataccttcctctggaatgccttttccaggacctgcctatgactgttttacagttaactttaggacaaaaaacaggtagaaggagtacattctaaaataatgagagatgtatagtatagtaaatatacaattcaatagcatagttgcttattatcattattaagtactatatactgtatataattgtatgtgctagacttttataagactggcagcacagtaagtttgtttacaccagcatcagtataaacatgtgagtaatgtgttgcactacaatggctatgaacccataggaatttttcagctccattataattttatggtaccaccattgtatatgcagtctgtcattgactcaaatgttatgtgttgcatgatagtgacttaaaatcctaagaattaccttattaataggctgaaacacactgtgtaaatcaataccagtttattaactttggtccgatggctggattatttactcttttcttcagtgattttcatgacagacttcagaataagtttgctagtctttggatgaccctggattaggccgtggttttcacctcctatatattattattatatatatgtatatattttataataatatatatgatccagatacaaagtggtgcttgccattcagtgaaacagtggataaagaacagaaagcagttcrggaggaacaaacgaatggcactaggaaggaagacaacagagcactcgaatgttatcatgggccgtttctcagcctaacttcagcattatgagacacttattaagaattttttaaaagtttatcacagtrttagagtgaaataatagggatatgagataaatcaacagagtgttgctggaatgggataaagagaagataaaaatcaatcaagaaaaatgcttcccctttgcttgacattggtaatgagacatgactccatttaatacctacattttaagagagatatgaaaaatttgagaggggtaccacaaatgagcaactaaatgattcaggactgcaatctggtaatgtaattggtgggggcctgaggaggactttatgggaaaaggtgttgttttgacttggacagaaggttaatatcgacttaactgcctcaaaataaattagatttcagggtaagaaggatgttcagccacagttcatcttctgaggtaaaataaacaaactagtataaactgctaccagagacatagattgagcaaaagaatgaactccatgaaattgactgctattgaacaaagagaggtaccatcatgataagttgtgggttttctttcagtgattgtctttttaaaatgagatttatccgttggggttgggtaatttggctgtctcgttttctaaaagtgtgattctctaaggcaatattttggataaagwgtatttgccaaggaattaaaagagctttgtctgacatttggttaaatttgttatttgcatactttaaagcattcattcaacaaatatatattagacatggacttatgttagtaaatatttttataatagtaggaaacataggaatatgtgctattattgtcattgagaaacaatgtgtaatttcttgcctaacctctgcttttgattatttatacagttttttctaatgagataatttaaacttagtataatatattgacgtatctgttgctyttgcttgattatcagctttgagattttccttagagaatgcatgatttataagttcaaaaaaacawcattttgggtcaaatcatacacataagggctgctttccaaacatttggcagtaaattctgacctcctgattaatgtcaagtagtttacttaatatatgatgttgtcatggtgacaattactcaaaaacacaaacatggaaagcagaaaaaaaatagaaagaaagagagatggctgacagctttcttatgtatttctcctgctttaaacgtattccactaaggggtaagaaagataatttttccttgcatgcctttttatactttttgaattttgagctatatgaatatattgctaattttaaagtgttacattataatattttaaaattttaaaacaaaactttggctttgttttataaataaaatctcttaaaaatttttcttttgaattaaaaaatatcagatttcccagaataatttacttcaatctattttaatctatactgagatcattatgtgagagtattactcttttctttgttttcagggctttgcataaggtgacttgaataatayatgcaaaagatattttgtgaatgaatacttgtgaaatcttttaaatattcctttaatacagaagcatatattcttttcaagacacttacataagccagtttttggtagaattctgcctattcatgaaagcaggcatccttgagacttatttttcttacagctttactgaagtatacttgacaaataaaaattatatctatttaaggtgtacaatgtgatgttttgatatatgttatgaaatgatgaccacagtcaagttaattaacatgtacatcacctcacatcattactatttttgtgtgtgtgtgcagtgggaacacttgagattgagatctagtctcttagcaaatttcaagtttacagtgcaatattctttttttgtttttttttttttttgagacggagtcactccgtcacccaggctggagtgcagtggtgtgatcttggctcactgcaacctccatctcctgggttcaagccatttttctgccttagcctcctgagtagctgggactacaggtgcrtgccaccatgcccagttaattttttgtatttttggtagatacgaggtttcgccatgttagccaggatggtctcaatctcttgacctcgtgatctgccccccttggcctcccaaagtgctaggattacaggcgtgagccactgtgcctggccaatattcttaactatagtcaccatgctgtacagtaggtttccggaacttagtttgttgtattactgaaagtttgtaccctttgagcaacacttccccatttcctccaccacccccaggcctctggcaacaacattttctactctctttttctatgagttcaactattttagattccttgtaagtgagatcatgcactatttgtctttctgtgtctggtttatttcacttagcatgatgccctctaggttcatccgcatggtcacaaatggcaagatttctttcatttttaaagctgaatatttcattatttcatatgtatgtatttcatatgtgtatatgtatgtgtatatatgtatatatgcacatgtgtatatatgtatayatgcatgtgcatatatacacatgcatacatatatayacacacacacacacacacacacacacacacatctcacatttttttttatccattcatctgttaagttgtttccacatcttggctattgtggataatgctgcaatgaatgtggggttgagactttataatgaactaaccactaactgagctttttcaaataagaaagtacagttgaaaacaacagtagcttcctacttaaagtaataaaggaaaaggggagagaattcgtgttttatttgtctttttccttttctctctctattttcttttcttttctttttttttttttttgaggccttactatgaaccaaaataatatgacacaatctaaggtgacaggcagtgttaaggkctgtgttcaggttagggtgctattacttagtattacagccagaggatcagaaatacccaagtcctctgagactacagcaatcacttcccctatggttgctgaggatgcaataatggcaaagaaaagcaaaataacaccttgttattttctggggatttgtccccaaatcttagtgcaaaaaactctggccagccaggccagaccatgtatctggagcaaccacttctcctgaggtggtgaggcataggtagcttcaaatcaaaggaggcctttactatcccaatgttcatacccaagtttttgcgtcttatcatattctaaccacacataaaaggacatcagccttgaccctaaagatgccaagcacatgacggtgtaaaccagagggacagctatgcctgtgtgtgctgatcttttcctgttaatccctttagcaagggtggcccaatctaccaaaccatagccactcctgctcctggaggacagaggcagtgtatgaggaaggtagtgggagtggttttaaaggaccctttttcctaagggcatcagacatggtaaccctagggtggtcaaaagtggctgggctacactgcagttcttctagtcatttgtttcaaagcccaaagcaagcatgcctcctgwttatactaatggcacatgtaaccctttttgtcctgaggctgagtacttggcacaaacacaagctggtcattttaaccaagagtacaatgtagtctggagatccagtgttattaattgtccattttcagcctatctaaaggagcaatcttagtaaatccacttacatgtatgtgcatgttaaagacctaactggtctttaacctgattcctttttcaaaaatacagctttactgggtgaagtgtaaatggaaactctctactattcttccaatgctttggtaagtctaaaattatctcaaaaaagtttttttagaaagtggaaaataaaagatagaacaaaatgacaatctctttcaggggaaaaaaaggtgagagtaasagagtaaagatattttactttaaggaagtaaagatatttctgcatgtttaatatttatacgcatacacaaaatacagcttttatgataccacactgctcaaaaactcttagtgacttcttataatttataggttgcagttcaaatttgttagtcttggaatgtaaaggtctcttaaattgagccccagcctaccttcccagcattataggttrctattatcctgctccagatccctagccaaactgggctcctccctgacctccagcagggatttcccmttctacctcatgaaatctacagcaaccaacgctgcaaggaacatttaaattcttacttccttcaagaagtcttcccggatcacctccaactcaaggtaatactttattcctctgtgacaaatgttgcatagaaatctttaatgcttctttaaaatatattatttttaatattcatgttatgtgcttatgtctcatctctccactagaatttttaagctattcaaagtcaggaccttatatatttttttgaattcttcacattgcctaaaaccttaattaattaaggaatcccacaaacttttatcaattatcttttttgtgccaggcactgtgctgggtgcttggaatataaagcataataaaaagatttcttaaggaagcctttcttgtttccccctggccagcttagagggtctctcttccgagatcccattgcatcctgtcctaatcactatcttattaatactcaggggtattgcaccatatggtttgtggagtatgtgtctgtttcctccaggatgcaagcaccttaagaagagacacttggtcttttttcattatatcccctgaactcagaataaaaatgtagaaatgctcaatatatgtgtgctgaatgagaaactgcagctgaaagttgtggttggttagtggaataattatagctgataccctcaattaaataggtgattagctttcaaacaaaatacattcttgtgatttcttttctttctcctcttccaattaatgtatatttttaatcatcatcactaaaktacctcacgacataagttttatatatgctgtaatatgaatacmtttgccatcatagtgatcacatcatatataggtactacagatatatacaagttttttgaattccaggaacaaatgtgcactgccaattygattatctctagctataggtatcaagttaggattagacctggatcccctgaagacaagtaatccaaygtgggttttaatctgtttttgaattctaagtatctagcgcaagcaaggtgcctagaacatagtatacaataaaaagtgtttgcagaattaattrtatgaataattacatttccccatcctacccaacatatttttttgctagtcattttaatctcatttttttatcaaagctgctaaaaaatagaacttactcattttaattttctactactcttcctgcctttttgctctaaaatcctaaaatgccaaaagtgggagcttgagactaaaaaggagcaacaaagatttatgtcatccagaagttcattctcagatctatataaatggcaaagcattgcattcttttttttttttaatactttaagttctaggatacatgtgcacaacatgcaggtttgttacatatgtatacatgtgccatgttggtgtgctgcacccattaactcgtcatttacattaggtatatctcctaatgctatccctcccccatctccccaccccatgtcaggccctggtgtgtgatgttcctcaccctgtgtccaagtgttctcattgttcagttcccacctgtgagtgagaacatgcagtgtttggttttctgtccttgcgatagtttgctgagaatgatggtttccaccttcatccatgtccctacaaaggacatgcactcatccttttttatggctgcatagtattccatggtgtatatgtgccacattttcttaatccagtctatcattgttggacatttgggttggttccaagtctttgctattgtgaatagtgccaccataaacatacgtgtgcatgtgtcttgatagcagcatgatttataatcctctgggtatatacccaggaatgggatggctgggtcaaatggtatttctagttctagatccttgaggagtcaccacactgtcttccaccatggttgaactagtttacagtcccaccaacagtgtaaaagtgttcctgtttctccacatgctctccagcacctgttgtttcctgactttttaatgatcaccattctaactggtatgagatggtatctcattgtggttttgattaaagcattgcattcttaactgaaaattgctgattcttactaacaaaggaaatctcattttttttccatataattgatgccctcacttatttacttgggacaaacaggtacataatttgccttcatagaattatcaaaatcagtgtactgaaaatttaaatgcagtcacaattatttagttcatgttgctccaaaatatcacattaggaacttgaagtagagagacttcgagttgttaaactgtgtcttgataactcatattaccacagtaagattttttttaagtgcaatttcctgcaaagtggagattaattcctgacgctttgaggktttgggttcttcagataaaagactacaaagggaaaacatgaacataccatctccgggagtaattatactctttagcattcatggatgttatgctattttcctcaacattagcacaactttgccctatttcagaataaaacaaacatttccttatggctttaactacctatatcataattcactgtgcaatagctttcagtgctaggatgttaggtaaatacttgattaatgagttactttagattactaatcattaaatatggtctcccttttttttttgtcttttcttaaaatattaactacactgggaaagcaagaaagcacacctgccatttcctcactatgggctatcatttctccttgtatgtgttaacacagagaataaaggagaatcctgtatattttarcaaaaggtttagtggtcatagcagggtgaatgctttaaatagggctgagtatgcaattgttctattatcgagacaattgcctgattgagaacagctctctggaaaagctccaagtatgtgtccagattaccacagggtgcttggagtgattagaattgctcatgagcaaccaaatgctctggcttgtctccactaagcaattgaagtatatgggatcctgagagacatgacttagttgaaagtattctcttcctgttctagctttctttgcctcactggaaatattaaatgcacagcagacctctatacaggaagcccaaatgcagacattaggtttgcaaggtgtccccagccaactccacatgagacaggcccctcacacggtcttattgcctatagagtcctgctctgatgagaactttcagacattttaaaattaggcatagattatcaagctgcaccaaattgccaagttgcaaaacccgaagattatcaaggggtttcttggtaaaagattatcaagaaggggtttctactatgttgtaagaggtgaaacttggcatacattttaagacgaamatggtccttttgcatttgaattttcaaaggtgcaaataattataagtcagggatggtgaaaatagtagtagtctttggatatatacattagcttttttcttttgagcgctcaccatagtatatcttgctcagttatcatcaccatgcaattttttttataagacagaatccttccctatttctgcaatttgtttggaatgaaattccatattgaggggatwttcctccattgcagatacttttaagaagaagcctctctaccaattctccatcaacctgaatgagctgagtttgggtactctcagagcttgaatgggtcaaatactcctttatttgccacttgggctcctaattaccccaagtcctgtctttttagctacatctctgtgactgctgcttctcagaagaaaatgattcattctgttattttcatgaaatcatgaagaatcccataatcttttcatcctatcattgggcatttagtcttagggaaaacaacattttgcctaagggtgtttggttttcaaatggttgagcctgactttttggcttctaaggccatggccactaatgccactgagccttgatcaaattgcccttaaaaatattgtagttaatataagcctttgagtttggcttatattaactagaatatttaattctagaaattaatattactagaattaataataaccagaaagatctagggtgacttaaaagaaaacttcatgaacaagattgacttactagaaagcatgtttgtaggcatgaacataggttaatattattccatttactggctgagtgatgtcaggctaagctgttawttgatgtgaacatcagtttctaataactaaaaaatggtttgttgtgatatttaaatgaactatccataattytgtttcttttttcttcttttgaagaattttgattttcagttttaacatcaaggaaccaagggcaaaacttaacagcataatgttgggttttacagtgtgcaaagaaatcccttgaagctctgtttataaacttagttgcatttttttctaagtatgtttaggaagcagatttggaaggagctagagatctatgcactacaaagcactagcttctagatcaatgttttcagcagggaaggattaggcagtagaagaatatcacatgaagataagctagagagttttttgttttgttctatttatgttttaaattcatatacattgaactttaatatatgttaaatacttatttttaagtcctctcaatatcaagtggaggtgccattaatattcccatttagtagataaggaaacaggcttgggatgtcagatatcttgcctcatgtctcatggctaataaatggagaagctgctatgtgaacacagwtgtgctagacttaagcatttaacaacaaagcaggagggtaaagatgcacggggcccactctggagtcaggtcaccacttactagctgtgaaacttgggttcttaatctctgggtctcttcagtttcatatctataaaatgtgaatgtgaatgaaaataggattaaatgagttaatgtgtgtaaggctcctagtatggggaaatgaaatatagtaagaacttcagtgttaattgctgttgtcagtattacaattgtttgttaatgacagtcattttagggtaatctgtttagaatttatgaatggcatatcacaatgctgtttttttgtttgctttgtttttctgactgaaggagccagggagcatttcagtaggcattctctacatctcaccttctctagtctgcccacaaatcccatcataaattcttgcacagtccatgtttgaagaagactgactggtgcattgcacctttttataactaaatcatggagaagaaaaattgcatttctgagtttctaggggtcatgccaactctgtcttcattttatactaaactaaaaaatagaggggaaaaaagatctggctgaggtgatatttctatactgttagaaatagtgacgttatttttcatgagcctggagtttttaacttctgcccattctttaattcatgatctcttctgtatgctggtcttgtttgtttgctccttttcaacataacttctgagaaatagagattgattagttttgtgcctcaaaggacatacctccaattgctctaataagtccaaaggaagatgtgaggaatagcacataattccaaacagaagagggtttgtagctggtatgaattaactactgatcttgattcttcctccctatacttactctatattaccttctttattcaagttcaactattttgacttttggggacatgtaacaataaaaatgctttctttctagttattatgatcatgttattgaataattcattatatatatttttaaatggaattgaatgctgtrtgataaaagtatatgaatagtttttgyattagaaggcagaagaaagtatgtgagttgaatataagaatgagttcctctgagtaaaaagttacatttcggagaggtatgactgcacctacctatttactacagaaaataggttagctgtgcattttatccaaacttgttatttacttgtcattttccatttaaaacagttaggtagagtagctgtatactgtctacaactgctgtgcagraagacctcagtgccagcttctccttggtgtagagtgaagagatacaatcatgctttggaaaatgtgttgatatcaaccttagacagaagggttaggctgaagacaatctctcacaatgattgtaaaattgacttaaccaatacttaccgtgtggttatcttcagtagtgctaatttctgtactcacaagatagatagaagtaaataggacagtgtcaaaaaaatttctgtaaatagtagttattgagtctttattctcttcattgyagagggaagctgagaaaaggggatgggrgattatattccagacacaagaaatctccagtatggaggtttgggagcatcaaagaatgggactggagaacagcacctggtgcctgttgagtaagaggtgcttgctgcttattgaattgataaatatttattgatggagtaaacagggtgctgtgagaagaatgatgggaaacaaccctctgggatgtaacagggaaagggtagagagccccctaaagaactgaaactccatcttctcagtaagtagttaacaacttgrgtgctgctgcctagtgaggaagcccaagttcttcataggtgtgtctccaggccttcacttattcatttttgttacatctgcaaatacagtwgtcccccctaattcacagggactacattccaagactccgcatagatgcctaaaaccacagatagtactgaatcctatgcatactatgctttttttccatctgataacygagacagctactaaataactaacaggtggwtagcaaagacagcatggatacgtcggacagagggatgattcatatcccaggtgggatgatgggagatttcatcatgctactcagattggtgcacagtttataacttatgaattgtttatttttgaaatttttcatttaatatttttggaccacagctgaccacaaaagagtaaaacttggggaaagcaaaaccatgaataaggggactactatacttactactgtattgatatcagccttatgctgagttggtgggtcatgtgaccaatagagaagggtacagttctatgtaaatcagagataaagataagacacaagatgtgatgtaatgccaagccaaccaccaaagaaaaactgcggaatttagtgagttattgaagcacttcccatcccgagtaggcaggacagcatgtgtggttgggaaaacatttcttcttaaacaaacggtgatgcagtgctgaagagctactgaaggaagagtatacactcatttccagtttttccaaacttggcatttttaaccattgttggccttttaacctcttttagtaattctatctatcatttgtgctatgcacataaaaagwtagtaagctaccattacaggtrgtgaatagctctggaaggggtttgagcaaggaaacaattttatgaggcttgtattttagagagattattctggtagaggtgtgaaggatggattggaaggaggaaaacttggagaaagggaaaacatttcagaagtgactgcaatgtgtgaaagatgatggatgctagaactaaggcactgacggtgaagatggagagccagggatggaagagggatgttaaagtaatagaattgatgagcagttgctaagggagttgagagagagaagagtcagggatgacgccaaagtttttgttaaagcaagtgagcagagtggcagtgtcaataactacatagggaatctagaagaagatgcagggggtggggatgttaaatgtaataattatttcagttttggatatactgagatttacacacatataagtcattcaggtgaagacatccaattgaaaatacaaaacttagtctcaaaagagagctttttttttttttttaaacaaggtcttgctatgttgctgtgttgcctaagctggtctcaaactcctgacatcaagcaatcctcccactataacctcccaaagcactgggattataggctcaaaagagagcttgaagtccccaaatgaatcagggaraagtctaatttcaaggaatgatttcagggtaaatttaaaaaggaaagaaaattatggttagatttacttctcattaaaagtattgaagtttagggttaatagttgagataattcttagcattaatgtttgcctttcaaggatttaatattcattaattttgcttggcctataattttatattttgcggtgaacataaagcatattcatccctaactggagatctctgcagcttaagtcttctggatcatatatggccaggaccaagccaggacaatagtatttaaaagccaratacctaagaggaataccaaactagaaatccataactctggaatgccaaacttgaaattatgatgagttactggtgataccatagtagtatgttaataagaaaatagtatgttaataatagtatgtcataatagtatgttaataagaaaaactagctctgttgatttcattgactagaaatataaattatgttattctttataaaatatacactctgcaaaatgaagactatgctttagaatattagaaaatatttcttaaaagtacagtagccgaacctgaaacaaatttgatggttgagtatagaatgatttttttttctcctttttttcctgggcttgagtccatcagcttaggaaggaaatataaattaatggaacctaagtttaaattttaaatccaaggttttgagacctgtcctgctgaactgtggatccatcgtgaatatgctctgttttgaaataaatttgtccataaatgatggaggaagatttcagaccaaaaaacacttttttccttggctacatctgagacttggatacccactcttgatttttgctgtttggtttagaagggactgacaagttacacgttgttgatttatcttccttggctgacattttttaacaaatgtctcagtgttagagttggtgttgtgcttgatgttttctcttcttactctttaatatcacttgttaatttaccttatatcagaaaaagcatgcaacatatgtgttagtaatgatgtctactgagggaagattggcagactatcctatgaatggtatgtagactgcaagtagatcattttgtgttttatattttcacaaatgggtgaaggatattgctgtttcaggtttactctctaacattgagggaaactacaataggaattcattatgaatattaacaaatattttctgaataagatatcacaaaatggttcagaaagtttccataatttatctaagtggctttatatctttcaagaacagaaagtcgaatagtgggatcagcatcaagttgtggatatactgatttttaaaaattatyatcttatttcatatggagtaaatttagttcattgaagcatacagcattctaacaaaacaagtaccagggaattttatttctaacaacagtttaccaatctaatggccatataccctctcctgactttagccaggcaccttacaaaatactgctgttgttcacacgggagacaaggagatgagtatgactggatcagcagaaatgtattcctacttttggaaaaataatgaaaagcacacacactggctctgaatcagtaatatctttatttgcaaacaataatcttcttttactaattatgtataaacctttgttttcttctttaatttttacaagtgattacaagtaaactgatatagcagggaaatcatatatttcagtgcctcaaaacctgttaatattgatttatccattagttatcattgaatacttactatagttgtagattgtgccatgggaaaaatagagaaaatgtaaggtatgatcctaatttcttaaagacctgacagtaagaaatggaagtatccattcatatatttaatttcagtgatgttagaaatyccatattctttgaagctaagtaagtggtatagataataagtacaaataagaaactggaggaaggagattcctccaagaactaatagcaagaaataaaatttygtgaaggagatgggagctaaggtgcacttttggtaaacattttattataacaaatttcacacgatcaaatgttgaaagaattttacattgaatattagtatgctctctaccacactgttgacattttactatacttgctttatcacatatttgatatattttaatgataggtagaaattggacaggtccagctaaaaggatgaaagtttgctcaagagtgggaaaagttagaaggtagattttgtggtagacatkytccagtggtctctatacacattctttataatcccctctcatgttgtttcaggattggtctgtgtaactgtggtaggctaagtaatccctccaaccctcccaagggtgtccrtatttgaatccstagaacctgtaaatatgttatcttatatggcagaagtgactttgcacacgtgatttgtgaataagttaaggattttgagatggagagattattttggattatctaggtaaacccagtgtaatcatagggtctgtttaagggggaggcagtagattcagagttgaagagaagatatagggtggaagcagaagtcagagaggagagaagatacaatttttctggctttgaaagtaaagaagctatgaactaaggaatgtaggtagcttctagaagccagaaaaggaaggaaacattttcccctagagctggtcataggaatgcagctctgctgacccattttagacttatgatctccagaactgtaaggtgataaatttgcattgcattaagccaccaagtttgtgttaatttgttactgcagcaataggaaactagtgccgtgaccaacagaatatggcaggaattagggcctgtaaatagccaggttagtgagcttggatgtttccctggtcagatcttcagatgattacagttccagtcaggagcttgactgcaatctctgggagtccctgagctagaatcacctagctaagccagttacagattcctgacccacagaaatgtaagataatcaatgtttactgttttaaacatcttagtttgggggcaatttgttatgcagcaaaagataactaattagtacagagtgaaaaggtaggttgagagggattgtgtacagttttgaatgctagactcattgccttctcagtggggaaccccagaaagtttttaatctgtgaagtgaccaactcaaaataatagcaagattgatctatttggatatattatagaaaagaggttggagggaggaaaaatagatgtagtaaatttagataataatattagatattgtaacgaaagcctgctctagggctatgaatataggaagggaaaggaaagaacatagatcaaactacaaagaaactcagtaggacttggtgactgaaggtgcttaacgcaaagggaaactgaggaattggcgatggtgtgttttgagtttgagagaacaatgatataattctgaaaatgtatttttttccagtaagagccagtttttcaaagtttcttttgcagtagtcctctcttatccatggttttgcttttgcagtttcagttacctgtggtcaactgtggtccgaaaataggtgagtgttgtacaagaatagagagagagagagagagacaccacattcaygtaacttgtattatagtatattgttattattgttctattttattattaattattgttatcaatctcttacagtgcctaatttataaattcgactttatcatagctatgtatgtatgggaaaaaagacatggtatatttagggtttgttacaattcaaggttttggacatccactgtggatcttggaatgtatcccctacacataaggggaagtgggggcrctactgtactttctaaaaccaagttggataattgaaaatgttgagaaagaagtttaggataaaggacttcattacctgccttgtgggggcttagaaatgtaagataactaagagacaaaattacgggatgagagtaagagttagggatgagacaataggagtaagggaagtaatgttaaaagatacctaactgtgtgttataaagcactttggctctgagtggacttatagccaacccaggggaaatgctaacagtgatgtggttttggtatccataagacaaacasaatctgagagaaatgtctccattggatcttcctaaaggtcatgcacatcctcagtattatcctgtggtaaatactatattttatagggtttytttcccttaatgtgcccaatgaatatacagtcatacattgcttaacgatataattatattctaaaagttgtgttatcaggcgctttctttgttgtccaaacatcatagagtgttcttacacaaagctagatggtctagcccactacatgcctaggctgtttgttttgttcctagattacaaacctgtaaagcctgtttctgtactggatactgtaggcaattgtaacactgtgctaagtattagtgtatctaaacatatctaaacagaggaaaagctacagtaataatactgtcatataatcttatgagaccactgtcattgaaggtgtggtctcttctcaactaaaatgtggttatgtggcatatggctgtaataagaagaagaaaaaaatccaattccaatccatccaacacactggtgttaaaaaataaacttaaatcttaagaaagtgtccagagattgatttttccattgagagtaatttattcatttatttaaaaatatttattgagtatttattatgtacttgagtctgtataattctgagagtacagtagtaaattttttacatatatgaagtgaagatgactggagaggggagtaggaggttgatgtgtaagtcagagaatccacaagtaaggaagggataggaatgaacatagatgaagcagttaaaagaagcaaggtagtaagatagtgcatgccgtgatgatgaagagagggagagagacagagagaaagggtgtgcaagagatacagcaagagagcaaaacagagagagaaagagagacagagaatggaccctggtttacttcaacttcaagctgatgttacagagatatcaatgaaaggaagaaagagtaagtcactgggtttgattattagttgatcatcagtgatctttaggatttcattgtcaatacaatggtaaagacagaagctagattgcagggggttaaggggtcaccttatggagatgaaatagaataagtcttattccagctccatgggcatgtctctatcgctttatgtctcagtccataaaatagagcaaaaatggtgatcctcctctagtctaaaatataaggaatgctttgaactgctgggtgagctaatactctaaagccagggcggtgatagtagttatctgtgtgtactttgaatgaaactggacttagaatgctgagctagttgttttgtggagcctactttcagaatgtcacctctaattttgcattcatgaaaagcattctcctgcctggactagaatccaaaaattttttgtttattattagtggtgactgattgtcatttgtggactgtgatctacatgtaatgaagtggaatttggccactggttgtgttgcaaagcttttctgagtagtgttattgcatcttagttttgacaaagtttgttactcccactagtatttaactggtattaaattcaagattatattttcataatgttgtttggaaaccaaaagaaaataattggtatgaacgtgckttgaaaagttaaaggattatataagtattaattataattatcattaaagtgatttaatagaagtattattctactaaaataaaataagaactgctaaattcaagatgtcattgagaagaggggagaagttttttttgctatggtttatttcagcttctgtataacttacatggactttctaagaaaaatgtatacaggcaatatttataaatatgtgtgtatattttaatgatgctatgccggatcatttctgcttggattatttgtggccttatttaattctggacttattttccagcatagttttgggaatacagattcaataatttttagatataaccaataagtactgggtgactactctgtaaaagcacttcttcatatctcacattttaatcttcacaatagcttcatcagagcaggtgttattacttttttatgtattaaaaaactaaggctctgagaggttaattagattttcgcccatggcgtacatagcagggattagaygactagaaccctaccattagtagataataagctcaggtggtgaaaatcaattagcttcartaaagcctaattgtatctgtaaatatgttacaaatatcataccgtgtctctgagttctgagtcaaatttgcagtgtttttgaagcagcattgccttctgttacctggctgctcttgtrtagtttagcatgaatgcatggcagtttgccctgtaggaacaaatctagtctatgtggatatactatcatgattcagttaggtctcaagatcagtaaattaatttatgtaaagaataagatactatgtatttcggtttttcaatacagaaccatgagtaggagagtttgtatgtttactgcatgctaaccaacacttgtttgttctttatggtttaccaatttcactcgttagatcctgacttttaccctgtatcgtagatagggctgagattatgcacctcattttackcacaaggaaactaaagccaaagaacagtgtgtgattttctcagtagccttcaaatatattggcctagaaaatattctgatagataaatagtctaaggacaagtggattcattgtaatatctgcaatgcattttatttcttatataattaagagcttactgctagaatacagtgtgatttaggtaaaacttctcaacatatagcatacttgagggaaaacagaagatcataaaaartttccttcttttattgcaggaatagcatatgatttatttgaagcctaattattttccagaggaatgctctacatgtttccaatagctgttttgtgtttctgtagagggttagaggagaagctgccagtttcctcccaatactgatgttgcaaatctcagaactttaatctggaacactctcctctgttatgtatatgyatgaaaatttgccctacctattaccttactttggcatgtggcatttacttgtgaaaaatgtcacaatatctaatagtttatttyctactcatggatataaggcaaaataacattaaacaagaataaatatctgtttaccaacatttaaatgatagttcttttgttgtcaactggcaagtacggagcacttaccaagtgccgccactccgctgggctctggggaacacagctcttccttagctgagctcataatctggactgtgaggcctacacatcagggcagaaagcttctagtttcacttttcatatagtaattttraaagcataagaggctttgcaaaacatcttttaaaataaagatgcttctccaccatctctaagataagttggttctttttggcaaaggtgattttaattgttagtacatttccaagacaagaaatgcaatctgttgacacgcccttcaaaataatcagatgaaaacaaggaacacaaatatgtccagccctgaactcttcatttttcctcttgatgaatcctttcttatgcttyaaaacacttgagtttacacacacacacacacacacrcacacacacacacacatatttctggtaggcgtggagatatatatctatatatatcttgctattagggcaattccctgaaagattacactaccttctttatgcataacgtcaatgcctgatattaaacagaaacgaactatgtgactatgctttcctttttaaatatgtgaacgtatttctctacagagttgttttgtagccgtattgctactaaactggtgcccagctccaggcctgcagactgctgacacacaattaatctcacaaatttatgaatgccaaagcatggagcaaaatgaaaacaactgggggaatgtttaagggaaataattggactgtatccagatgtgcatgtgtaaaacatcaccacttaactcctcccccatatcctgtctgaagacagggttttttttttttttttygaaaataaactggggttatttgaaagaagttgtggtctctgactaaaactgaataagcaaggccaggctggccataattctgtgtgttcttgtatttttgtttcttaattaactcattaggtgctgatgaatcaatctgcctcatgtctgtttttggtgggtgttgccacaactttatgaactctatttaaagataatatgtaaggggtttcaagactgatagtcgatttctttgagtttttggttataacgaactggaactttttactattagaaataggcaacattattgtagtgtgaaggtcatcaagctgggacgtgaagtctggtcaagaggaaaaaaatgtgacaacattttatagtttttttttttttaacagtctgtccaagatcagttaggggaaacaaacaaacaaaaaaacgatttctctaagatgcttaactcactagataaagcataaaaatggagataataatgttgagtttgtgtgcatgaaattaatttaggatctggcatcactgggatatgagaagctagaggacagggtgctctgaagaaatattttgcaggttgatgtctaaccatcattacataccttaaatggtactagagatgaagtaataaaacacactttttccctcaaatgcaaatatttcctcaaaaacaagataaccaagtccagcaataaatccaactcatttcaataaaatkttctccacagacttgcttttctcctactctgtttaaggacaaaaataaagatgaaatgaattgcaatgaacctgctcagaggtactcactaaagtggagcatagagaggccttctgctctgcatgcccctccctctatctgcatwgtcctcagagactgcctgaaaattcaaattctgggcctcattaggcacagagtcctaagattgtgtttctgtttttattcaaagagagaaaacaraagtagaaaaagttgaatacccaatcttttataccattgcaggaaggcttaaggaccccaatcgtcagttttcctgcaattggtgacttcaatatgagaatagtatcagcactttattttgagagtaagtattgataatgtagtatcattccaattgtgcaggtaattatttaaagtccaattttaataatcatgacaactgagtatagtttctatcaaaaaaaatttcttagttcctttaccaagaactggtaaaaaggcaactttttaactaaagggagctaggtacrgaaaggcactgtcctgtcccagacgccaaaagtttagtgggaagtgatggccatagagagggaaaggggatgagaagatcactggtttcagtattaatacagatatgcacatacagcaccatctctagatcatgcctgttattctccatatcgtctccacatactacccaatagagatatattttatttagccagttttggtttcaaacacaaataatttctgggaaagttcaatatattggtttcacacactttatggatataatatcatgatgttgaaaatattctatattatacaaagtttttttaacacaaattaaattttgatgtcataagtgaagacttggcaaataaatactaagaattatctgtgtaccagtataaggaaaatacagtgattctgggtttcaaaacccaaatacactgaaacattgtggagtttttaaagtaaggaatgtgcttggtytggcagatgataaaacatgttagttgcttaaaattattgccaattattttggtaaatacattcaaacttttttaaatttttttattttttgtgatagggtctcaccctgtcacccaggctggagtgcagtgatgcaatcatggcttactgcagcctccmcctcctgggcccaagcaatgctcccacctcagcctcctgagtagctaggactacagggttgcmccaccatgcccagctaatwtttttttttttttttttttttttttttttgkaraaacagggtttcaccaggctgattttgaactcctgggctcaagtgttccttytgccttarcctcccaaagtgctgggattacaggcatgagccaatacacctggcttcaaagtttttttttttttctagagaatcagcagtgtaatagaaattaatattctagtactcaaaacaacagcaatcataacaataatagcaaaatctatgttcttggctcagttrcactcaagtaatagcttgaccttggattagttgctttatctcaattttatttctgcaaagkagcgtgaggatccctatcctgctcacctcacaagttgtgaagytcattaggtttattgttgcaatgttttctaaatcttctcattaaatgatgttaaaacctactaagaactcaaacaatcccagacacactgatggagaatttagatatgtagtctgaatatagcatcagacaacctgaactgttaaacaagcaaagaaaattatcacaaaataaacatggaaaatatcattacattgaccaccatttaaattgcacagttcttgtaagacatacccactacataaaataaaacccatctgcagagacacagcagtttttctgcagttgggagttggtgattgaaaagtaggaatttgaaattaattttttttagaaattgagaaattttatcctcccttctaaacaatgaccctcaacacagtaatgagcagcacaatctggagggtatggtaatatcccagaatatgtccccaggctaggtgctcagggcctaacttgcctttttaagaaattcattgtttctgttgaatgttgctctcttcatattgtctactttaaaagacaaatacttctgggatgtgtaagcccaggaatgggaaaggaggaaaaatcatcttagagtttattaagtacggaatctgacccatggacttgatatgtgcattctcaytgcagacttgggtttggggttttacaaatgtagaatccaaatattagagaagttcatcgctttcctgtcaccctcttaagggaatgaactgtgtagctgagatttgatcccctagttggtctgccagcaagcccatgttctttcttttgcacaccctataccatataataaattaattcatgagatgctgtctttgtaacagctgagaattggaacactaagagagcatcgaacatctggaatagaagtaaagtgatttggaaaaaaaaagggaggctggaaacttagtcaacacataggggcagctcctctcactcagtgttcatgctgggtcctgaagataagtaggttttgctctttgcctcagtggtctttgacggactctgggtactaaagctaagatggaattgagggaagctcctaatgcctcctttatttgcatcggcagtgagattgaaagaggccccttcagtgtgtgaatacctgaaattaaagactagaaatatgcatttagactgtttactttaggtttcctgtttacatttgttccaattttattctctcactggggagtagaattggaatgcagagaaaaaggggtgagcacaagacaaagggaagtgaaactcaattttgaaagcagaaccatttttacatttaagttgaactgtggttttaaaacatttagctctctattggaaaccattgtgggtgkggtgcatttgtaacagagcttcacctaattcattctatatgcttggcagaggaaaggctgaaatcagagccaaattccaaagagcctctgagggaagcaaggtcacactctattcagaattatatagcaacctggcctaaacagaagatttttaatgtgtttgtgcacttaggaatcatttttctagactttggtaattgtttatccattttgtgaagttctattgtaaatgtattgcaaacactgcttcatagctagataagaacaactgctgaataatctaagtcaactaagtttatttcatagctggttttgaaactgggaataaaataatatagaagggtttattgattagttccactgtcataataagcctggagaaatgtcttaggagccacattttgacttttttgtctgacgaatttggcccatcctcaaataaaaattgttttttaattccaagcagtcatattatgaacagttgttatattttacattgttttataattggtctcctgcatgataaaactcatttgcaaggcagaaaggcaaaaatgtgagaagyaagaaaccaatttattgttaatcaataattacaataaaaatgggaayaaggagaaatgtgattttaactcacttcctgggaagacattccagagtttgggggatgacagaacatcttttgggtgcttagggaccaaaagggagtgaggacttcagactttgaagttatttttgcttacgaccaaccaactttacctcaaagtgcagagtgcttaaaagttaatttaaacgtcggttacaaattccaagaaatgtggagatataacccagaaaggcaacatgacctagagagctgaacaagggtttgggaatgtggacttggttgttaaccctgtgtcagttgctgtttttttttttaactttgtaatgatgaaatgcagtttccattctcctgaccaccttaaggtagtaccaatygtgggtaaaataatatagaagagatataatataaaaggggaaataatttagaaggacaatgctgtcccccccttttgaagatgacatggatttaragcaaagttttggttatttttgagaggtccagaatccaggcatctgcctcttttgatacaaargctgctacttcttgcttcttcaagggacttctcaccctctattgatggtcagccccctctcactgaaggaatcagaatcaattggtgatagaaagttttgagagcatcatttgccagcctggaagtatttttcatctctaccagttgttctttaactttttgaagttctgtaaacatttaagaacatcgtaggagttatagatgttttccttaggctattgcacacattcacagattgatttctgaagactcccccatcttgaagattgttcatggatcatgggttgtgaaccctagctatggagggtttgtgtctctaagctctgaaaacctcaccatccaggttgtcctctctgagaagctactctccatggccgagtcaccttaatgttgaaaggaaatatctttgcacatgatttgttctcttcttattctgcctgcctcttaagtgtcagaagacctccctggagggaacctcacaactttatgtcattactttttccaaggctcacttgtaggtttgggaaggttttcttttctccctcttttctttgcatgagagtctgtcccatctgccttttcccaccagcagtccagagtgatcactctcagatttttcacaccacttacgctttgtatcagcaatatgatattcatttttctctcttttggtttatttgtaaattaatttttactataaaatattttaatacatatataaatggagaatagaaataacacccattttaatacaatcttagcattataatatacttgcatcagattctttagaatggtaattacagttacacagtgaagatcttcactgcctctgccctgagcccttcttttcttccctccctggtagtaagtgctgttctttccaaacgtggttcatcctttacttttaaaaattattcttctgggtatagacctgatctattcaatgagactatattttcttgagaatggatagtagccttatttttgtttttgtttgtcttcagtgctcaggggtccttaatatgtgacagcagatgcatggaggtggggttgcgtggcacttgtgcctcctcattttaaggttcttctccatcttgtccctcaaagatggtttgcattgttacaaatgttragaaaatcactttttctcctttcctatttttcttctttctacagaagaaaattcagatcatatgagatttcatgtttctctgaatatcctgttgctcttcacttctcctgtttccttatatcaggaatgattctttgtcctggtttctcagttcctttatttgcagctttagagaaataatcttgctttaggtcacctttaactttattcaaatagtataaagtaagcaatgaaaaggtaaagacaattaatataaaccccaaacccactatatatgtctactaagaacaaaactcaataaaaaatatgccttgaattccaaaagtatgtgtgtgtatgtatgtaatatgtgattaaactgacaaatttatttgctttccagaaattttgtttctttattttgtgtatttatacactttgaaaatccatcaatttgtcttggcaattctgatattwctcctatttcacaagtaatgaaactgaggccaggatggctaaatgacatctcaggtagcagaactattaggagttagactaacgtctccagatttcttttccttaggctcaggtggttttcctgcttcagcctcctgagtagctgggaatccaggtttgcaccaccttgcctggattttcaacaaatgggactggctctctaaccaggaattgaacctgggctgtcatgacgaaagcaccaamtcctaaccactagaccacagggtggagatttcttcttttttaaaaatctgcccctcttgtcactgtttctttttattgctaaataatattccattgtctggttgtaccacagtttgtttacccattcacccatagagggacatcttggctgtttgcagttttttggcaattatgaaaaaagctactctaaacatttatatgcatgtgtttgtgtgaacatgttttaaattcatttgggtgaatacctaggattatatataattgctgcatcatatggtaagactacgtttagttttgtaagaaactaccaaattatctttacaggtggctgcatcattttgcattccttccagaaacgaatatgagttcctgttcctttgcatgtttatctctatttggcattgtcaagttttttaatttaaggaggcccaacttatttttttcttcatggattgtgattttgatgttataccttaaaactcttcaccaaacccaagttcccctagattttctcctatgttattttgtaagagtttcataattttgtgttttgtgtctaagtctgtgatgcattttgaattaatttttgtaaaaagtgtgaggtcactgtgtacatgcagttctttttcgagtagacttatagttctttcagcatcttttgttgaaaagactatcctttctctattgaattgcctttttccctttgtccaagatcagttaactagatttgtgtggtctgtttctgggctcttatgttgttccgttgatctgtttgcctagtttttcaccaataccatactctctttattactatagctttatggtaaatcttgaatttgagtagtgtcagtctctgattcttcttcttgagtattatgttggctattctgagtcttttatttttctatgtaagttttacaagcagtttgttaatatctacaagataacttgctattattttaattgggattgcatttaatctatagatcaagttgaggaaaatagacatgttaatgtaattgagtctccctattcatgaacatggaatttcccaccatttattgaggtcttctttgatttatttcactagagtttcattttcctcatatagatctttttcatatgttagtagaagcatatctaagtatttatgtatttatttttggggtgctaacgtagatgactatattagcccatttttgtgtcactataaagaaatacctsaggctgggtaacttactaagaaaagagatttaatcaattcacagttctgcaggctgtacaagtgtggctccagcatctgcttctggtgagggtctcaggaagyttaccaccatggcagaaggtgaaaggggagcaggtgctgtgacatgttgagagagggagcaagaaagagagaagggggaggtccaagactcctttaaacaaccagaactcacatggactaactgagcaagaacttatttatcaccaaaaggatagtgctaacccattcatgagggttccatcmccataatcaaatgacctcccattaggccccacctccaacattgggaatcacatttctttttttttttttttttcactttaagttctagggtacatgtgcacaacgtgcagtttgttacatatgtatacatgtcccatgttggtgtgctrtacccattgactcatcattwaaattaggtatatctcctaatgctatccctcccttttccctgcacccccaccggcaggccccagtgtgtgatgttccccaccctgtgtccatgtgttctcattgttcaattcccacctatgattgagarcatgcrgtgtttggttttctgtccttgcgatagtttgctcaraatgatggtatccagctccatccatgtccctataaaggacatgaactcatccttttttatggctgcatagtattccatggtgtatatgtgacacattttcttaatccagtctatcattgatggacatttgggttggttccaagtctttgctattgtgaatagtgccacaataaacatacgtctgcatgtgtctttatagcagcatgatttataatcttttgggtatatgcccagtaataggatggctgggtcaaatggtggtatttctagttctagatccttgaggaattgccacactgccttccacaatggttaaactagtgtacagtcccaccaacagtataaaagtgttcctatttctccacatgctctccagcacctrttgtttcctgactttttaatgattgccattctaactggtgtgagatggtatctcattgtggttttgatttgcatttctctgatggccagtgatgatgagcattttttcatgtgtctgttggtggcacaaatgtcttcttttgagaagtgtctgttcatatcctttgcccactttttgatgggattgtttgattttttctcgtaaatttgtttaagttctttgtagattctggatattagccttttgtcagacaggtagattgtaaaaattttctcccattctgtaggttgcctgttcactctgatggtagtttcttttgctgtgcagaagctctttagtttaattagatcccatttgtcaattttggcttttgttgccattgcttttgktgttttagtcatgaagtccttgcccatgcctatgtcctgaatggtattgcctaggttttyttctggggtttttatggttttagttctaacatttaagtcttttaaccatcttgaattgatttttgtataaggtgtaaggaagtgatccagtttcagctttctacctatggctagccagttttcacagcaccatttattaaatagggaatctttccccatttcttgtttttgtgaggtttgtcaaagatcagatgattgtagatatgtggtattatttctgagggctctattctgttccattggtctatatctctgttttggtaccagtaccatcctgttttggttactgtagccttgtagtatagtttgaagtcaggtagcatgatgcctccagctttgttcttttggcttaggattgtcttggcaatgcgggcttttttttggttccatatgaacttgaaagtagttttttccaattctgtgaagaaagtcattggtagcttgatagggatggcattgaatctataaattaccttgggcagtatggccattttcacaatattggttcttgctatccatgagcatggagtgttcttccatttgtttgtgtcctcttttatttcrttgagcagtggtttgtagttctccttgaagaggtccttcacatcccttgtaagttggattcctaggtattttattctctttgaagcaattgtgaatgggagttcactcatgatttggctttctgtttgtctgttattggtgtataggaatgcttgtggtttttgcacgttgattttgtatcctgagactttgctgaagttgcttatcagcttaaggagatttggggctgagatgacgggkttttctaaatataccatcatgtcatctgcacttttcctaagtgaatactccttatttctttctcctgcctgattgctctggccagaacttccaacactatcttgaatacgagtggtgagagagggcatccctgtcttgtgccagttttcaaaaggaatgcttccagtttttgcccactcagtatgatattggctgtgggtttgtcataaatagctcttattattttgagatacactccatcaatacctagttaattgagagtttttagcgtgaagggctgttgaatttygtcaaaggccttttctgcatctcttgagataatcatgtggtttttgtctttggttctgtttatatgatggattacatttattgatttgcatatgttgaaccagccttgcatcccagggatgaagccagcttgatcatggtggataagctttttttttttttcttttattattatactttaagttttagggtacatgtgcacattgtgcaggttagttacatatgtatacatgtgccatgctggtgcgctgcacccactaacttgtcatctagcattaggtatatctcccaatgctatccctcccccctccccccaccccacaacagtccccagagtgtgatgttccccttcctgtgtccatgtgttctcattgttcaattcccacctatgagtgagaatgtgcagtgtttggttttttgttctcgcgatagtttactgagaacaatgatttccaatttcatccatgttcctacaaaggacatgaactcatcattttttatggctgcatagtattccatggtgtgtatgtgccacattttcttaatccagtctatcattgttggacatttgggttggttccaagtctttgctattgtgaataatgtcgcaataaacatatgtgtgcatgtgtctttatagcagcatgatttatagtcctttgggtatatacccagtaatgggatggctgggtcaaatggtatttctagttctagatccctgaggaatcgccacactgacttccacaatggttgaactagtttacagtcccaccaacagtgtaaaagtgttccaatttctctacatcctctccagcacctgttgtttcctgactttttaatgattgccattctaactggtgtgagatggtatctcattgtggttttgatttgcatttctctgatggccagtgatgatgagcattttttcgtgtgttttttggctgcataaatgtcttcttttgagaactgtctgttcatgtcmttggccccatcaaaaagtgggggtggataagctttttgatttgctgctggatttggtttgccagtatttcattgatgatttttgcatcgatgttcatcagggatattggtctaaaattmtcttattttgttgtgtcyctgccaggctttggtattaggatgatgttggcctcataaaatgcattagggaggattccctctttttctattgattggaatagtttcagaaggaatggaaccagctcctctttctacctctggtagaatttggctgtgaatccrtctggtcctggactttttatggttggtaggctattaattattgcctcaatttcagaacytgttattggtctattcagggattcagcttcctcctggtttagtcttgggagggtgtatgtgtcgaggaatttatccatttcctctagattttctagtttatttgcgtagaggtgtttatggtattatctgatggtrgtttgtatttctatgggattgctggtgatatcccctttatcattttttgttgcatctatttgattcttctctcttttcttctttattagtcttgctagcggtctatcaattttgttaatcttttcaaaaaaccagctcctggattcattgattttttgaagaattttttgtgtctctgtttccttcagttctgctctgatcttagttatttcttgccttttgctagcttttgaatgtgtttgctcttgcttctctagttcttttaattgtgatgttagggtgtcaattttggatctctcctgctttctcttgtgggcatttagtgctataaatttcmctctacacactgctttaaatgtgtcccagagattctggtatgttgtgtctttgttctcattggtttcaaagaacatctttaattctgccytcatttcattatgtacctggtagtcattcaggagcagsttgttcagtttccatgtarttgagcggttttgagtgagtttcttaatcctgagttctagtttgactgcactgtggtctgagagacagtttgttataawgtctgttgttttacatttgctgaggagtgctttacttccaactatgtggtcaattttggaataagtgtgatgtggtgctgagaagaatgtatattctgttgatttggggtggagagtcctgtagatgtctattaggtctgcttggtgcagagcggagttcaattcctggatgtctttgttaactttttgtctcattgatctgtctaatgttgacagtggggtgttaaagtctcccattattatatgtgggagtctaagtctctttttaggtctctaaggacttgctttatgaawctgggtgctcctgtattgggtgcatatatatttaggatagttagctcttcttgttgaattgatccctgtaccattaggtaatgaccttctttgtctcyttcgatctttgttggtttaaagtctgctttatcagagactaggattgcaacccctactttttttttattttccatttgcttggtagatcttcctccatccctttattttgatcctacgtgtgtctctgcatgtaagatgagtctcctgaatacagcacactgatgggtcttgactctttatccaatttgccagtctttgtcttttaattggagtctttagcccatttacatttaaggttaatattgatatgtgtgaatttgatcctgtcattatgatgttatctggttattttgctcattagttgatgcagtttcttcctagtattgatggtctctaccatttggcatgtttttctagtggctggtaccagttgttcctttccatgtttagtgcttccttcaggaggtctggtaaggcaggcctgttggtgacaaaatctctgagcatttgtttgtctgtaaaggattttatttctccatcacttatgaagcttagtttggctggatagggaatcacatttcaaaatgagatttggagagaagaaacatccaaaccatatcaatgatgttgtatttttaatttcaaatcaaattattcattgctggtatataggaaggygattgacttttgtatattaatcttgaatcttataaccttgctttaattacttgttagttctcaaagactttgggacaattgttcagaatttctacatacacaattatgkcaccttmaawcaaagacagttttatttttcctttctgatctgtatttctcttatttccttttcttgacttatggcatcagctagaatttccaatatgatattgaatgggagttgtgagaggggacatccttgccctcttcctcatctcatggtacagcatctagtgtctcaccattaagtatgatgttagctctatrgtttttttgtagatgttcattatcaagttgaagaagttcccttctattcttagtttgctgtgagtttttatcatgatggttgttgtcaaatgcttttcttctgcatctatcgatatgatagtatgttgttttattctttaatatgctgatgtgaaggattmaattaattgattttcaaatgttgaaccctcctagcatacctggaataaatctcacttggttatgatgtgtaattctttttatgtatttttgggcttgatttggtaatattttgttgaggatttctgcatctatgttactaagtggattttttttttagttttccttttttgtagtaactatctgttttcatttaaacttctattttaggtttgggggaacatatgaaggtttgttacgtaggtaaactcatgtcacaggggtttgtttacatattatttcatcacccagctattaagcccagtacccaatagttatcttttttgctcatctccctcttcccaccctccaccctcaagtagacccagtgtctcttgtttcagtctttgtgttcataaattattatatttagctcccaccgataagtgagaacatatggtatttggttttctgttcttgcattagtttgctaaggatgatagcctccagctccatccatgttccctcaaaagacaatctcattcttttttatggctgcatagtattccgtggtgtatatgtaccatatttcgtttaaccaatcatttgtcattgacaggcctatagatttattccgtgtctttgctattgtgtatagtgctgcagtgaacatttgagtgcatgtgtctttatggtagaatgatttatattcctctggttttatacccagtaatgggattgctaggtcaaatggtagttctgcttttagctctttgaggaatcaccatactgctttccacaatgattgaactaatttacattcccaccaacagtgtataagcattcccttttctccacaaccttgccagcatctattatttttgactttttaataatagccatgctgactggcatgagatgttatctcattgtgattttgatttgcatttctctagtcatcartgatattcacctttttttatatgtttattgaccagatgtatgtcttctgttgagaagtctctgtttatgtcctttgtccacttttaaatgggggttgtttgtttttcttttgtaaatttgtttaaattccttatagatgttggatattagacctttgtcagatgcatagtttgcaaatattttctcccattctgtaggttgtccatttgttctgttgatattttcttttgctatgcagaagctcttaagtttaattagatcccacttgtcaatttttgcttttgatgtgattgcttttggtgtcttagttgtaaaatctttgccttttcctatgtccaggatagcattgcctaggttgtattctagagtttttattgttttgggttttacatttaaatctttaatccaccttsagttgatttttgtatatggtgtaaggaaggggtccagcttcagtcttctgcatatggctagccagttatcccagcaccatttattgaatagggagtcttttccccattgcttctttttttcagctttgtcgaagatcagattgttatagatgtgtagccttatttcctggctttctattctgttccattggtctatgtgcctgtttttgtatcagtaccatgctgttttggttactgtagccttgtaatatagtttgaagttgagtaacatgatgcctccagctttgttctttttgcttaggattgccttggctactcagggtcttttttggttccayatgaattttaaaatagttttttctagttctgtgaagaatgtcattggtagtttgataggaatagcattgaatctgtaaattgctttgggcagtataaccattttaatgatatcaattcttcctatccatgagcatgggatgttttttccatttgtttgtgtcttctctgatttctttgagcagtgttttgtaaacctcattatagatatctttcacctccctgattatctgtattcctaggtattttattctttttgtggcacttatgaatgggattgcctttctgatttgactcttgttttggctgttgttgatgtatagaaatgctagtgatttttgtacattgattttgtatcctgcaaatttgctgaagttgtttctcagctggaagtgcttttgggctgagactctgtggttttctagatatagaataatgttgtctgccaatagagacagtttgatttcccctcgttgtatttggatgcgcttttttctttctcctgcctgattgctctggctaggacttccaatactatgttgagtgaagtggtaagagagggcatccttgtcctgtgccagttttcaaggggaatgcttccaactttttcccattcagtaaaatgttagctgtgggtttgtcacaaatggcttttattgttttgaggtatgtccttcaaygcctagtttattgagagtttttaacatgaaggggtgttgaattttatgtaaagccctttcttcatctgttgaggtaatcatgtggtttttgtctagttttgtttatgtggtgaatcacatttagcaaataaaaacaagtctgcttatattgaacctaccttgcatcccgaggatgaagcctacttgatcatgctagattagctttttgatgtgctgctggattctgtttgcaagtattttgtttgaattattgcacagatgttcatcaaggatattgacctgaagttttctttttttgttgtgtctctgacaggttttggtatcaagatgatgctggcctcatagattaagttggggaggagcctctctcaattttttggaatggtatctgtaggaatggtaccagtttttctttgtacatctcatagaatttgactgtgaatccatcaggtcctgggctttttttttggttggtaggctatttattactgattcaattttggagcttgctgttggtctgttcggagaatcgatttcttcctgactgagtattagaggatgtatgtgtccaggaatttatctatttcctctaggtttcctagtttttgtgcatagaggtgttagtagtcgtttctgatggttgtttttatttctgtgggttaagtagtaacattccctttagcatttctaattgtgtttatttggatcttctctcttttctttctattagtctagttagaggcctgtcttattaattttttcaaaaaatcaactcctggattcattgttcttttgaatggtcttttgtgtctcaatttccttcagttaagctttaatttttgatatttctcatcttctgctagctttgggattgatttgttcttgcttctctaattatttcagttgtaaattcaggttgttaatttgagatcattccaactttttgatgtaggcattaagtgctatgaatttccctcttaacgcaggcttggctgtgtcccagagattctggtgtgttktatctgtgttctcattattttcaaagaacttcttgatttctgccttagttttattatttacccaaaagtcattcaggagtatgttgtttaatttccatgtaattgcatggtttttgagtgatttttcatagtcaacttctatttttattgtagtgtggttcaaggttgtgtttagtattatttcagttctttttcatttgtagaggattattttatgtccaattatatggtctattttagagtacatgccctgtagcaaggagaagaatgtatattttgttgattctggatggagaattctgtaagggtctatcagatccattttgtccatgtcgagtttaggttctgaatatctttgttaattttctaccttgttgatctgtctaatactgtcatgggagtgttgaagtctcttcctattatcatgtgggagtctatgtctctttgtaagtctytaagaacttcctttatgaatctgggtgctcctgtgttgggtgcatatatgtttaggatagtcttcttgttgaattgaatccttcaccattatgtaatgcccttcttgtcttttttgatatttgttggtttgacatctgttttgtctgaaattaggattgctatccctgcttttgcctgttttccatttgtttggtagattttcctctatccctttattttgagcctatgattgtcattacatgtgagatagcatgtaatgacaagacagcatactattagttcttgcttttttatccactttgccactctgtgccttgttgagtgggrcatttggtccatttacattccaggttagtattgatatgtgtggatttgatcctattattgtgctgttagctggttattacataggcttgtttgtgtggttgctttacagtgacactggtccatgtgtttaagtgtgtttttgttttagctggtagtggtctttcctttctatatttcatgttcctgtcaagatctcttttaaggcagatctggtggtaatgaattccctcaacattttcttatctgaaaattatcttgttcctccttcacttacgaagcttagtttggctgtatatgaaattcttggttgaagattttttctttaagaatgttgartataggcccccaatctcttctggcttatagggtttcagctgggaggttcactgttatcctgatgatgttttctttgtaggtgacctgccctgtctctctagttgcctttgaagttctttctttcattttgaccttggaaaatctgacagttatggccttaggataatcttcttgggtagaatcttgcaggagttctctgtatttcctgaatttgactgttggcctctctagcaaggttggtgaagtttttatggacaatatcctgaaatatgttttccaagttatttgctatctcctcttccctttcagggatgccagtgatttgtagatttggcatctttacataaacccatatttcttggaggttttgttcatccctttttattctttaatttatttttttctgattgtcttatttcagagaaccattcttcaagttctgagatacttttctcagcttggtttattctgcagttaatacttgtgactgcattcttgtattgtgttactcatttctgtcagactcattagattctttttatactggctattttgtccttcagctcctttttgccttattgtgattcttattttcttggatcgggttttgtcattctccagaatcttgatgatctctgttcctgtccatattctgaattttatttctgtcattacagcccgttcagcctggccatttggaggacatatggcactctggccattttagttaccacaaagttcttgtgttggttctttcccatctctgtgtgtgggtgttccttttaatggcagtatagattgagtacagtcaatagacttcttttttggatgctttcaccaggctgaggctttgtgcaaggtctttatttgaagctgcctttttgtctctggtttaagaggatgatatgttagtgaggtatttttggtgttgaagctttagggtgtgatccagcaggtggcacttaggcttattggtcagttggtagactcttgctcagtcatgtggctcccctatgtttcctcacagttacagccgtgttctctctcaatgctctgaaagtgtgggatcctctcccccttgagtgctggctgtagatcatgacttggtactccttggctgcccactgcagctctggggtgatctgtgtttatctttcttccccaacttggagacaacagaggaagggaagttagtagtggtcatggtctagggttgtttgcttgactcctggggccttcaccccaaagagatgcaggtcaacaattgctcagtgcaatcagcccagaatagagggtctgtgctatgggcccaagccaggggttccctgtgtggtgatgagcagtgggggatgtgtgggacccatgggagatggattggcctcctctccttgggttgactacagcttgttgtagtgtgaataaggcacttagggtttttactycttcattagtgcaagggtagcaagggcagttccactgcaaaggcaatggcagagaggctttcagttgcccctgggggcctggtccaaggaatttccgaattgctactggctygatagctctggcaggggttggctggaggcccaggcctggaggacctgtctagtgaggagatatgggaacggacacccatgtaacagtctgtctacttttctatagggctgctgtggcatgctttggttccactccaatttctagttgccttggattttcctgtacctgggggtatcaccagtgaaggtgcttccctgcaagaaggaggttcccctggctccgtgttgctcccgggtgggccattgtcctgtcttgcttttctttattctctgtggatcaagttattttcttgattagccccaatgtgagtacctggatgtttcagttgaagttgttgtatttacttgccctgttcattcctctccatgagaggcatgcacactagctacttctagtaagccatcwtgctttatctggttttgattttagagtaatactagcctcataggatgagttaggaagtgttccttctgtttttatttaaaagagtttgtaaagaattggtataatttcttctctaaatgtttggtgcaattcwtctgtgaaaccatctaggcctggtgctttattttttgaagattattagttattgaatcaatttatgtaatagatctaggcctattgagattatctatttctctttatgtgagttttactagattatgtctttcaaggaattggttaatcaygctttcaaatatcctacttattacccatatatacttttgatatgatatatttcacacttcattactttatatatgtatttcttttactaaattgtggggttcttgaaggtacaaaccatgtttttaaattttgcctccttaagacttagcgcggtaactggacatttcaaccaatgttgactgaaatgaactgaatttctccagattgtcaactgggcgtgagaactatgtctgagaacaccrcagatataagaagaagaacataagactattatttatattatagattttacatttgataaaggtttaatctaccaagttcttttaactggtttgtttctgtgtagcattttaatgttggactgtagacaatttactgcttgagaaaaggttgactgagagtgaatcagggatatctgaagttaaagagtttaattcaaagtgatgatgtttatcattgaaggaagtattactagaattataaaaatgtgactcacccttttccaaatttctagaaattatctgttgcataaaacagaacacacctgaatagacacaataaccatataactggggctctactggggctaacggatcattaaaaattacaaaacaggaagttagacttgtaatttaaacttctgcttagtctttggctgtaattaaatattatgttcaggacaaagaatgagctggagggtctcttcaatctctgctgtgatctgctaactgctattgtttaattgaggtacctcgtgttccccaaaggctgagccacaagctgctctttccagacgctgtgtttagattccttgtgagccctcaagtgctgcatccgctgagaattggtgttgcatttmattgatgtgttccgcctcttttggtcagataaaccgaagcataaacattgtgctgacaaacccgggtcgcagagtggtttttggtcgctgaactgcccaagcagattattaagggaacagcattttagcagcaacagcaagttgtttatatgatatctgatcccagacattttgcatatctttaacatgatatgaatctatttttgasgtttgtaatgattatggtaaacaaccagatttccttgtgaagtagactcatgttatttctcagaatttatcacattatttatctgtatttcttccctgtartctgtgaagttagcttttgtataatagggtgtgtgtatttatttacaagaaaattactctatgtgttaaaataatgtttagccttgttttcttcttattattaaatagtgtgttctatatgggttggtaccagactaaaatttgtataatcactcagcaaaaaggctaaatgttataatgtataaattctgatgtaagtttgatggttaaattggttatttatgttgtgtataaggtttgcaaggctacttaaccagcttgattcttcatttccatcactataaagtggataaaactgtmtgccacatttttaaaggtgaaaagattattgatatttttatgtaaaatggctggtaccaagggtgtcattgctattaaacatatacttctgcaggcagaggtttttactgtcatgaaaaagattttcttagcagtatgcaacatctcccagtgctatggcatattttgacagagaccaggtgtgctacttttcttctgtataattgagccatgtcaaggaaacatcacaatataatggcctttgtgaatttattttgaaacttaaaactggcatatttttggtatgttttattgtttttagtgatattgtcttctagaaccttaactattttgcataaactgatacaagcagtgcattatttgtttgttctcaaaaaatacacctaattgtgttaatataagactaagaggactagtgcagtgctcctaaaatagcagtgtggagacctaacagcaattatttttgtatttccagacttgaattatttccacttccatagaataaaatttctgttcccctcttgagcatcactacttgaacaacttgcaggcytctgaaactcagcccactcaaaactcaccaaaactaaattggtttattttttgcctttgcctccatgccctgcaaacctattgctcttytgcatgttctatctttgctaatggcctcagcagccacacgtttctcccaaactacacgtcctcagagtccctgtgggtgtatctttctccttctaaaaaaacagtatattaaacttgccttcaaatcctgatggtcttttctttctcaaatacggtccctcctctcaatcttctggctcagaccacatgcttaccataatgtctctgggccattacagcggcatcctgaatgttctaccctccacaccacattgtgattataaaaacacagatgtgatcatgtcacttccctgggcaaaacatctgctgcctcttgattgtccactacatgggacagtgttttacaagttacaggttgcaggcttttaataagtagtgaattcaaattagtgaattacattcagctattaaaatataatggaaaagaaaatagtagagtgtatcacatttagtaaagacattgttctgtgaaactctgttctagttgtatttttctgtataaacgtgcatgtgttttggtactgtttcatgatgtaaaatgtacttctgatcatgggtaatagtcttgaaagtttgaaaaccatcagaatagagggtaaattcaaactttttatcagggcataatcttttataatcttcccaggttaccttttgctatcatctctagccacctccttggagaagcctattcctatttccatttcaagaacacactatatttccctggcatgaactttgcctttattcaagctagctcgtctaaatggactaccagttcttacactttttagtctcaggatctgtttaaactcttaaaaatattgaataccccttaggagctttgtttaagtggactataaactacatttatcaacacraaacataccataaattaaaatggagaattttaagaaacatgtattaatattaaaaataataatgaatcccttatatgttatcctaagtgatacatttttgtgaaaaaaatctgtattttccaaaacaaaacaaaattagaagagtgacattgctttatatttttgcacatctctttaatgtctgaattaacagaagacagattcccatatctgcttctgtgttcactctattgctatgtgttgttttggttgaatgatatgaagaaaattcagcctgtaatgaatatatagtcgggaaaggaatgagtattttgataaccttttcagattattttgtagatattcttctttaatactacaccaaaactcaacaagtgatagttccttaaacattagttgcaatgagtctgataccctaccaattaacttttcacagtacatgacattaaaatctattgataagtctcctttgcaccttgaatggatcttttacccatgcatgaatttgcagtatcatgygttggtcatttgaagcatattggttccctgaataatatgtaaatcttccaaattttcactcatttcattatacatcaaaaaattacattagtttatatcaccactgattgcatcaaataagtctttaaatattgggatgctttcaagcttactatgacagatacaagttttgcaaaattcgaatttttacttacaggctgtaattttaggattggaatccaatactatcagctgttttccttgacatgttatacaactgaattaaggtttcatgggacagtaaccacagcttgtgatacatttgaattactgtagtttgtcagtgattctttcaagtaaatatagtgttttttgaaaaaagcacaactcaaacaatcacacaagtgtttttccttgaaacaagcattgaactgcaggaagcagaagaaatgttttatgtctacttcctcttttctttgcacagatattaaaaagtcacatattaaaaggtcaagattgttaaaaattaataatttttactgttgtatcaaggatttgcctaaataatactgctttttttttcttttactgcaagtacctggcattgaagaacaccactgcaggtacaatttggtgccactgctgtcttgtgctaaggcaccagcagttttacccaccttttcttctgcaccatcagtgcaaacgtcaacatagtgraaaaggcaaataagaagttaatattattatgagatagtcttcctatgggccttttatctgggtaccctaaaaagatcttgctgacacccaggagctgttgtttatactttgagaactgctsacctgaagtatcttctctaaacctatttcgtacttggaaaatttgtattcagacctaaagatcaggctcaaatgttatatactttgtgaagcttactgaagctccccagattaatttgtcactactcctctgagtttctgtatattgtagtccctatcacatttctctttgtccatgaggtgctcctgttacrgactgagctttatttctctaccacccacaaatgcctggtagatgctcaggatttcttaaggagcagaagcctgtacccactcattacacattctggcttttgttattctcccccaagtctaacacaggtcagaaggagaataattactgcctgaggcaagtaattttctgaggcaagcagggacatttcaccaacatgtccttagtgctacttccacaggtatcagaaaacactgacgtgatgcctagggttccagtgttatattgacattgtgacactaatgcagatagcaccaaaaaagctactgttcaataagtgtgtgaatagttcccctgtattctttagtccaaaccttgatacaggtcaaaaggtcattttaggtaactccaccctaactgaagatgcccttggatctcctagttctcatataattttcatgggaacttaattgaatattttttaragttttatttcttatttttgttctagaaacatttgtttagcatttaccatgtgtcaggtgctcagcattcaaaggtaggcaggacatgaactctgctttcaaggcagagtaacagggagagcaacaggagaaaggcattgaatttggttctcagatttatactgcttttattttctgtattttgaaatttggaagttaagtgagttttcttgtttctttgtttttatgtgtatgctttattaatgaatgcttagattataaaggttgtcgtagatatttcagttgtaaatgtccttctcctcctgtgtttaaaacagtgttgagtttgtttttggaaatctgagtttcagagtaaggcttctagaatttaaaaaatcaccttaayatattatttacaaaaatatrtcatagtatctcagcattgatttttcaactttatattagcttcatgctttttagagaatacaaagaaagtgtgtacttctttaagtgtaatatttcttttttaaaaaactgcctttacttccattttgagttatacagtaacaatgctaagtttgtatagctttatgtagaaagtraaaaaaaaaatccttgcttgtccaaagagtttactattttttgaatgagacagaacaagcacaaagatgtttatataaacccaagtgagaattttgactgatagtatctcaactacaaattgcagtttttcygcaagatttagaagagaggagaccacaagtagtagaagacagaaaacagacacagcagaacttttggctttgctctttaaatgtaaggatctacttctaaaatcagtcctcatgtatttttatctagakcatgttttgctgatgtgatgattaattttatgcatcaacttggctaggccactatacccagaaatttggtcaaacaccagtctaaatgtcactgtaagggtattttttagattagattagcatttaaattaatagatttagagtaaagcaggtttaccctccataatgtaggtggggtttatcaatcagttgaaggctaagtctgagatctccgaggaaaagtggatttgccttcagattcaagctgcagcatcaactcttttctgggtctccggcttttcatccttttgtgcagattttggacttcccagcctccataaccatgagagcaaattcattaaaataagctatttctacayaccctatttgctttctagaaagctccaatagggtacaggaagcttgcccatgtatttggtcttacgttagcccaaggaacaagatgctgccttcctctccgctactccttgacactgctaggcttagtctcttggaagtcataataatgtatcattttcagatgacaatgcagatttcaaagcacttgcacgtttgtgcatgatcaactatttctgtagaagtattcagaaagagtgaggactagggacccatggggaaaataaaatttgttgaaatacatggatccaggtagaaaggaagcgactggtggaagaagcaacagaagagagaaggttgggaaagctctgtcatgtgctgagttgtgtgtgtcccccacccccaaattcatatggtgaagctctaaccctcagtgccagaatgttactgtatttgaagataaggtctttaaacaggtgattaagttaaaatgaggtaatcacaggggaccctaatccagtttgactgatatccttataagaagagtaattttgacatacaatgagacaccaaggtccccacacagaggaaaaaccctgtgagggcacagcaagaaggtagttatctgcaagccaaggggagaggcctcaggagaaatcaaacctgctgacaccttgatcttggacttctagccttcagaatcatgagaaaatcattttacattgtttaatccacccagtctgtggtgtattgttatggtagccctagcaaaataatacaggcaccaagggtgaatattgatcatttttcaactttacttatactagatatgattctggtttattaaacatttctgtttacccaggagccaagtgagtggttctcaagaactaccctggatagactacactgactggtctctgaggccagggtgattattgctatttgcattaagcaaggagaagactcttccatatctcccaagggcccaatagcaatgcacttctgtgtctgacggtgctcctaccttggtccatgctgatccacaactgcagctccagaaatggcttgtaagcacatataaccagtgagccatacattacagggcacttcaaacagcccagtgatttttcagtctaatatttcccaggccatttttttcctcatctggaaaatgcagttactgatgtctgggtttaaatagctaagtagatttgtaaaatttaaaaaattaaaataattttaaagattattaattgtaagatgatataatacaaccatcaaaatgcactagcaagtgattctttattgttttgatgcttttccattttaatagtaataattacataataataatattgtagctaacacttactgtttactgtgtgccaaacaccattctaacctcattacaagatgttaaatttgaaatatgttgacatagactgtctcatttaattcttgtaacaaagatgtgagttaggtaaggaaggaattattcccattttgcagatgagaaagttgagacttagcaaagttcacttttttaaatcaaggttacccttctagtaaatggcagagtttgaagcataatttaagtcttcagattcctaagttactgatttttgcaaacaattctcttataaatgacatcaaatatataggtaattaagagtaagagagcgtgcttttttttttttttttttttttgcctgtttgcgttctgaacaaagaaatgtgggactcagtaaggtgagaaaaatgacatttgcctccctaaaggatcactaacatttagcccttgcaggaagaactgaggttgaagaatggagtccaagaagcacaatgtttctaacaccaggagctgtatggattggggatcagaaggaagctgagctggaacttaagatgcctaaagagcaagaagggattattaagccagtacaagaataataaagtataaagttacatctgaacaaatcaaaaagcctatacagggaaccaagatataatgtgaaacaaaacactaagaaaaccttttctttcatttttttatttgtaagatgaattcaatttatagaaggcaaaatatgttcaaaaagaaaagttgtgcctttgagagacagaagaaagcagataacatatgtctgtggaaaatccgaggcttcaacatacatcagcatgtcctttaaggtataaattgtgttggtttctatacttagatttcattcctagcgatagcaaaagccaagtgtgagggaagagtttagagayaaacatgatagagaaggaaataaagggcattttttacatccagcgatttcagccatccttccctccctcaaaacaaaaattctgacaaatttaagaaatttatgattgctattgcagccaaagggcagttgagtaaacggaaatatatcttacagtttgtttccaaaagttaaaaaatattatcataattccttttggtgatttcagtatctcaggtaggatagaatcaaccctatctataaagatatttaggaagcaaagtagcattattgcttaacaaataccttgactaactaattaaggcttcagaaaaagaagacagagagcgagatttttctgattatcatcactccrtaattactagtattttccataacctaggtaactcagctgtctaagaaacaaaatccagctgaaactgaaccgtctraagttttccttctacaattttttaaggcccagcgcaggatccctgtcatgctaaagtctctcctggatgtctggaaaaagtcttatagtctgggagacattccaaaatatgtgcagtgaccattgccacaggcgtgaacttcttaatgcattttgcagaaatctcctccacaatgaaattgattactgtctgaaaggatttttttccccttttcaaaatagcaagcagctagaatatgcttttcttatgttttattacatccttaagtatctcatgtggactgaatgtgactggagaaagttaccggtctgaatctgatacataatgtctagtttaaaacaatttttttacattgatgggttagatgaacagcgaaaggaaaaactctggatgtttgaagactacacatacaaaattgtacactgattactaaaacttgagtttctgcacagttttcctgctgcagaaactgaaataagatcagagaataaatgtgaagaaatggattttcaaggaacaggtggaaattgaaaagaaaatggaacctggagttttgtgagtgtgtctgtctgccttatgagaatgacatttatgaggatgaaggagggttggagggtttgttgtaatgcttttacataatcaagatcaaattgttcaagctctttaatgttatctatttgttgtatttarcaaaggaatgaatttgtagctaataggcagtaatttggtttttattcacctaatagaaatattgtagcagagctgtcaccaggcttgttgtaatgtcaaacaaaaagtctgataaatgagaaaaaaaggatatacagggaatatattgcaattgcaatcatagcaaagaaagaacagaaaggatgtcgattatgagatttctaattcttgattttgtagcagtttccatattcttgctagaagctggaaagttgctcagtccctggtatcaatcacacctcagctagacactgaggctagtcactgctgctggaagatttcttcctgacaatgattcatatgagccaattgtcaggagttttgaagttctgaaatagaagttgatgtatgtcttttactgtggtgcagtcactgaacatatttcatatgacggaaaatagctttgcagaaaaattaacctattccttatctttaaacaacgttgccttcaaaaattaccaactcattcacaagcattacattttctgagcttttcacatttcttaatcttatggtgcacagtcaccacaggagaaggtgtgatatgtcatttaaaaagcccaaacctttcgctttgtattgtcacaaggaactaaaaacaaggcaaataagtgtttcaacttatgytcttagaaattatttcttaaataccacaaactgatttgggtatatcacaaggaaagatcagataattctaatccatgctgaacatgtgattttgaaacagaaacagtaaagatgaaaggtgaaagctcccatagtaggaccagtactggaagagagagagagtgctttttgactgatgtactctcgccttacctgagtcttttggtgtgaaatcatggtcttttagcactggaacaaaccttagagatcgtcgtgtagtcaaacatcttttttttgtagatgaaggaaactaaggactggaaaggtgaactaagttgcccaggtcaaagagctacttggaggaagaaaatctgaatctcaagaagttggtttgcaaacttctaagtccagtgttctttcttctctttccacacactgtttcttccactgaactcttcctctgaacaacaggagagcagcagcagtaataagtccagcaccatcaggtccgggccacagctgatttttagaggaggccccttgcacacaaaccaagtttgcttctggccaatagacctagaaattacaggctgatcttgctttactcctctatacgtgcttcagaaatgacttctttgcagaaactgtgttggcatggttaattaaaaagcattgttagaagagggcacaaggggagtgtcattccaggtgctggtaatgttctgtttcttgatctggatgtgggttacatgggaacattcagtttgtggaaattatgtgatgtatatttctggatatttcaacaaaaagttaaacaaagcttacagaacaattaagaatccattgttacaaaaaaaaaaaaaaaaaaaaagcctattggtggccgggcatagtggctcacacctgtaatcctagcgcttcaggaggccaaggcaggtagatcatgagatcaggagtttgaaccagactggccaacatagtgaaaccccgtctctactgaaaaagcaaaaaattagcgaggcatggtggcaggtggctgtaatcccagctatcgggaggctgaggcaggagcatagcttgaacgtgggaggtagaggttgtgctgaaccaagatcatgtcactgcactccagcctgggcaagagagcaagactctgtctcaaaaaaaaaaaaagcatattggcatcagagaaattaaatacctctagaaatgattctgcaagcacattttaacaatttttaaacaaaattttaaacaaaaacagccatcattatttggcatagcaagagttttactgtaaagcaaatttaatcactccttcaggtagaaacgttttcctgatactgtggccttccttcatactgtgtaactgccaaaggaatcacttaaaaataaaagctattatatgcttcttacatctttagacaatgggaattattctaaattacagctgacagaaagcattttttctattcttcatttgamtttgtgttgtatatctaaggacttgagaaattgatttcaaaatttcatggtaacttgtcataatccttatggaggaaaataaaacatagaagttggtctggctgggcaatatattgtcctacttgtttaactattgctgttaacaaagaaaagtttaggagggatagcattaggagatatacctaatgtaaatgttacgagttaatgggtgcagcacaccaacatggyacatgtatacatatgtaacaaacctgcacgttgtgcacatgtaccctagaacttaaagtataataaaaaaaaagaaaaaaaagtttggatacatatacatacatatgtacatatatacacatacacacacctcatcccccccacacacaaataattggcatacggtgaatatattttaccactaaagctgtactaaacrtaattagatatgtttgggataagtcagaagtattttcgaatcttacagtaacttaattattatatactatagttaatatcctgcagctataaaaatgactgggaacaagctaggatataaatttaaaagtaaatgcataggagtgtgggtatagaaagatcgctgaaaaaattaatacttataaatcagccattttttttcaatagtaacactgagagaatgagaaaatacctgcaattagtgtattttaaattagtccttctttccttttacagctgccagtggagggcatattgatcagagaaaggaccaaatagacaaaaatgcagaaaacagatctatggtgtraagtgccgaagtaattgatccttacctagtaaatattcacatatgttaacgtaagttaatactgttaggaaactgagaccaatttcataaacaatatgcaactatttggaaatttcaattatagatgctcaacaaatatcaagtaagcacatttaaacctaaagacgagtgttcggatatttcagtggaacattttagtattggttctgactgtaataatcctggccaatatgtgtagactcttttagtagtcattgtttccaagctgattgggcagagaccatgtctattgcacttttgaatagcaacttgaatcctcttggcttctggaacatataaaataacaatgttctccagaaatgctgccatttggtaacttctctttggagtgcaaacttaaattcttggttataagtagtatgtgcatatgccccggtgtccacatgcacagatctctatgggcatcaaataaggtatgcttgctgggaaatagaatgatttttgaatgcataagaacccaaagaggatgacataaacttagcgaagttttcaagctccagtctttattatgtatgtatgttttaaattaaggagcaatccaaaggttgaaaatcagggaaatcagaggcagttaattttatcagagaaaaaaattggaagataaaagctttggaagatatcagagcaaaaattggaagataaaaaaatgagaggaatagcaaaaamaaatttttaaggtaaaactataaattttcttttgaaattgtacatattcgttggactcaatagtcatcttctcttactggaactaactaagagttagtccctgtgactgcttacaaggcagagccaggtaattgatgcgtcagaaacctagctgttgaaccactgtgtgaatctttaggccatgaggcttaattctaattttaagcagatttggctcttataaatcctaaagagtkataaagccttgagttattttcttgaaaatatctgataattcaatttataatttattcttaacactctctttaaaaaaaaaagaaagaaaacttaaagtataataataataaaattwaaaaaaaaaaaaagaaaagtaagggaccagatcaggggtagaacaaagctgcagacatatatttttcaaacctgctgtcaaggaaatcagaggcataagaaaacttgaacagaatcaagaaatttaccatttagttataaaattagatgcagcattccatatctcatccaaatataataatctattgggaaatcatattcaggagtggcttctccatcraaggtataattcccttggaagattcacatgtattttatacagtttatccctaaaaatgtttaaagacaastctgtgtaaaatgtgaagtacttgacttccttattagtgactttatctgaggcatggtctaccatagtagtgattacactgcccattaaccagtgagtattgatctatttattcctgaaaawtttccctccccatttaaaaataagcagaaataaaaacctggcttcrtcatttgtgatggatgctaaagtcatgactagataaaagacttcaatttatcagtttatgtctgaagccgaaaactacttgttgatctcttaaattcaaaaggttacttggaaacactcaaggccaaattggagaaaaatgattaatccattttagtaagtgcttctttcttataaatggaatttaactccttgggcaaatgtaacgttctttttacttctgtgattgctaaagtttctttaggataaacatagaaaaraaatgggagtagagggaatacacacacacacatgcacacacacacacacacacacatgctgcaaccacacaaagcacaaagcaattgttgaatatgtctgtgacctttgtttatgttcatatttcaaagtcaagataagccaattttcccacctagagattttccctctgtaattggatatgtatctagatatttactatcataatggattctggaaatgacactaaaatttcatttcactaccagccaaccaaatttctgatctttcaaaaattaggtcatttaaaagctttgcaagaatctcagtttattaattggggtgacacatttatagttattggttacaatatcaatggaatctttcttaataaaacaatgttctcactataattatagtccacaagcactatgagccacatagtggcatttaagatgctctcaccttcttyagcctccttayacctcactcttagagcatcactactatcccttaaaatatggaaaggtggagaaatctttctgagcttgggcacttccactaactcttattttgctgctggtccctgtccctttgaggagcaacagcactaaaaagctactttcagagatccaaaamcaacatggttcgtggaaagccatgtattggtatggctggggcctgccaaccaattgtgttcagtcctttactctcagagatatttaaaatctcctactggctccttttgtgtagcggtaagtgaagattcaatgggacaaggctctaaatggactggaggcctcttttccattagagatgtgtttcctcatagacttttgtcttcacactttattttcttgtgcccactgcctcttattcgatcatttgttrtttctattctcaaactctctttcttcttctcctaattttgtttctgaaaatttagcckgtatcttacaatctactatataccaggcagtgctccactctctccttacttttttaactacagcctatcaaccaaagtttattctatggttgacttcctctcaggaaaaagactgagaggaatagacaaaactttgtaaagaaatgtatgggatggttgtgggagggaaatcacaatgagtgcatttggaaaaatacataaactacctgtcttcttatgttcatgatcatattttaaactagaatggttaacagctgtgtctttcctgaattattataagctagttttatagtgaataacattctatatttgttcagcgtattttagataatgaggtaggaaaaatttctgtagtatatttattcctgctaaaatagattatggtctatagaatctggttatccgctatttaaaatgtttcctacatgtttgagggtttcaaaagtgtccttttcatttgtgraatttaattctattctctagacataatctcagtgttatatcattacagagagtactttagtgaacagtcaaataggaagagagtaaaagaagaacactggcatgttgagccagactcttaagaaaagcaattaataagaaaatagctctgtarcccaatgagaattaaatagtgagattaatagaaactaaataattggatggtttgggtttggattatgtacatgaagatttttttttttaaagtgaaagaattttgttctttgttacactggtaacattaaaattaatgagtaagggtaaggaggactgaggaattgaggtaatttgtggtttcactgtaacaaggtgaagaagacaacttttggcaagttttttgttggcatatctgatttgcactaatatgatgttatttacaatatttatcccacttaagtgagtatttgcatattttactatagaaacgtgggggtttgtggtatatgatatatacaaaatattacctttataaattctaaaaaaaatctgaattctgaaatatatgtggctccaaggacttcarataaggarttgtggacttgcatatctattgactgttgggaggaaaactttaagaggtattatgagtgagctataacctcctctttaataagaagagtcagtaactgttgtctaaagtggttaagttgagaagtaaaagtataagcatataatatagtgttatggatcagaatatctaaagagaaattaaaagaaatttctctttgaagtagaggtaaagagggttggagcsggagacttgcttctcatcayaccttcttcmaaactatgaactgttatcatgtgcatgcattattaatactttagttttaaaaattaaattaattatttcaacaaacttgccttgagtttatgtaatgtgttaggcatggtatctggaagcgtgaaaattgaaacctttgtctgggcacaatggctcatgcctgtaatcgcagtgctttgggaggctgaggtaggagaattgcttgagcccaggaattcaagaccagcctgggcaacatagaaagatctcatctctacaaaaaataaaaaataaaasaaaactagctgggcatggtggcatgcacccctggtcccagctgttcaggaagctgatgtgagaagatcgcttgaaccccgaaggtcaaggctgcagtgagctgagattgcatcactgcactgcagtatcactgcactccagcctgggtgacagaggaataccctgtctcaaaaaaaaaaaaaaaaaaaaaaaaagaagacgctctcaagagttctaatatgtaaaatagacttgtaaacaatgaggcttgatatgaaacagtaaagtgatcatttttatagcattatatacagagaagacagtgactactattttccagctaagagagtgtacatctaggtgtgtatgagggtaatgggcctggtgaactgtaggrgagggaagaggaaagtcagtcaagggagccttcacagaggtgctggacctttttagaacgcaaaagactcaatctgagaggcrtcagagggagacagacacaaggtgaagatgtagaaaagttcttgatggagagcactcttccatgccctccttgtagctagagaaaaccaggctgtagctcctttaatttaaatctgccttccccagcaaacaagaagctatttggatattttgttttgtttttcctgaagggtgacagtagagggtgggaaaggtacattttacataggagatttatatcttaattttactctcaaaatagaagaccctgagaaaawacacatgagcagggaattttttaaaagaaattcagtttaaagtcagctttttctagattgcaagtaagctgtgtagagtaagggaaacatggctcatctggccagggttctaaagtaggcaagctaactaaatctcacaggaggtcttcgaggagagcaaacccagaattcattgcattaatccagcctaaatattttaaggacatgaacaaatatgatgatgtcattgaagagaaagggttgtttgcttccatacccattttggcagctgtagcagctgtggtatctcttcaaacactcagattgtaggttaaaccctaaagttgagcctttgagtttcagggctagataggagtttcttgaaataccagccttctgatataacagaaattatgacagaggagctgtatacaaattggctataatggggagtgatcagatacattgtgaataaatacaatatacaaagagttaatattaaaaatatggagaatgggggaaaactcaaaaaagagagctcaagaatcaatgcttcaagtgcatgtagagttaagagtgcacatgggggaggcagtgaggcctctgacaggtggtaggggaagtaagttgacagatgagctttatatttcttgaaaattttctctttatctcagttcacagaggcggatgggaaaggaacagatgtcagaaacagcagtgattctcagggaagattaaatggtagaggaaatggagatcgcattaccaaataagatgggaagggaaagcagtgtgtttaagtagaactagacagaatgaccaggtggaatttggatttgaagtttkaggggatatcatgttaaagcagtaaacaccaagctatcacaatctgacccgttgagattccattaattgataacgatgatgagtacttctttatttgttaataaaagcgtgccataaagaataggcacattaaagttttcatttaaaaatacatgtattgttccatttcagaattgttaagaagttgaaatattcttataacattagaaagaactaaggtttaggaagatttgggattacgtgagagttgcttgtatcacatcatgttacttttcattcaattttctccttcatcaatccctcttcccttctccccttttccttcttcattttttctccttatagggacatatggaggtatgggaactcagacgcagtattcaaagaaaaagaatgtattattaagaaacttggtcacattattattataaaagtatacattcactaagaaaacatttacataagaaaagtactcaattagatttctggtctatatataaaagatcttctcaaccaaaaacaacttgaggctggcatttagaaaacctgagctctagttctaccctatccctcattagccctatgacttcagacaaatcatatgccctctttggctctcagtttcttcaactgtgaagaagagcttagatcatgtctgtaatatatatgttttaattatttgaataccatagtctaggtggtgatcttaatgcaagcaaatgccgttcactttaacaatccacagggaagagatgggagagatggttccaagagcagaaaactatcttggtaaaggaattcctacatttttatccattcattctactaatactaagtaaacatctgctgtgatttcctatgcctgggaatgcatttcttccagatatccacattgcttattcccttgcctcctttagggcttcactgtgtggtcatctcgtgaggacttccttctttcctatttaaaattatgtgcatgcacacaccacactgtctctcttgctatctctctttctctctccaattctgggactccccattcctctttctgtgatttatttttcccaataacactaaatactttctaatattctaaaaagttacctatttattttattatttaaatcccccgtttgaaattaagataaagacaaagactttgtagggtttgttcaatgcatagaatagagtttatcacatagtaagccctcagtaacagagttcaagtcttaatcatcaagtagctgaggaattctagactcattgcgagtatattatttcaatgggaatagataaggagactaggaaagtcagagatagtaatggattcacaattctgattttcaaacatcttgagcaacaggatctttgtttctgacgaaaactcatgtagaagccacatgtgaagagttaagtgcagacttggtctaagtgaaacaggtraaagaaacatggccacttgctttagctagaatcactacctaaactatggtattcacatcatmaagaatgtacacgatggatatatgatccaagctcttgcttttctcctgcctcctcaaggtggtccctgaagaaattctgaacagattttctcaaagttgcctaatatcaaaaattacttggaacactggttaaaaacacagatcccctggggctttgcccctggaaaggaaagggaatataccaagaagttggtgaagaggccaaggtttgcatcaaggaaggtgattatagagaacaagaaacatctggattttccgaggctgaataaagagaaaggttagcaagaggacaggggtctacttagtaaagtcatttcaatggtggtcagtcacttacacttgtctcccacataagaagaaaaaattggatcctggtttgggctgagaattggatatgtttaaaaagagaaaaacaaagccatatttaggggtttgttttgttgaattttattattgacaatggcgccaaagaaccaacatacaaccacttgaactaaatagaacattaacagagttctaaacattcaaacatatgatgaagggaaaattccactagtcaaagatctcagaagagatataacttgctcattcaccgaaaacttgtacacaaacaaaatctagaaaaagatgtatgtatgattcttgtccttctctattatcagtttctttttaaattttttaagtgttattttgttttttacacatagtagttgtatatactatggggtgtaatgtgatgtttccatacacrtatacattgcataatgttcaaatcggggtaattagtatatccatcacctcaaacatttatcatttctttatagtgggtacattcaaaatcctctaactatttttaagtatacagtacaatattgttaactatagtcaccatactgtgcaatagagcaccaaaacttattcctcctgtctaactgtaactttgtatctgttgatctcttcccatcctgcccctaaccccacctctccagtctctggtatcagtttcttttttcttttcttttttttttttttttactatcaacagaacctcatcaaattatctcatttaatggtaccacctctccaggcatatcggcaggcaccaattggcaggcaccattgtatatccattctgtcataaaaaaaatcccatatatcactataaatttttgaccattagtctttatagttttttacattcgttgaaatataacttttctctgagagcatcatatcctcaaaactatctcaaatagagggtacttttgtctccattactccatctcctcttggatgtctcagattcctcagcatcaaaacatctaaactgaatctcatggctcccactgaacccatgacttgcctttatctattgttccctatttcagtgaatagcacctctatgtccaatccatcattcaatctctgttttacctactaaatagtttttaaatacatatactcttctattctccaaccaccttagtccaagaaaccactgtcttcttccttgattattgtaagagcttcgtacttgttctgtctacttctggccattctrtaagtcttctctaagtgtagctctcatcaatcacttccttgatattcccactgccacggtcccattgtgtcactttgtctgggccattggagtagccaacactccagttaccttagtctctgccatcttctatctacactatatttttataccagcttaatctccataaagcgtacatgtctcccaactgctttgctgcttactgaatttaatccaaacttcttagtttagtgttctcttgaccagtaataccttctccctatacctatgcctaccccaatcctacccaacatgcaagactcctgtggcttttcctgacctctattcagcctgataggctattctgccattagaactcacaacacagacttaactttcttgtgagcagtgtcttatcacatttatatcagcagacacaccttgcactgcccctttcatatagtgaatcctcaatgcacttaatgaattttagtacattttaattttatttgaataggtttttagactttgagtttcaggaaaaggctaaattactgaattcattttagtattgtggaaatcaaatggaaaccaccccacatatgaaaacatagctgtactctatttgttttatttcaaagtgatccaggtccttttaccaccagagaggaagaaagaggattaagctgaaattaatgttttgatgaagatgaggtggatggtaaattgacccragggaagcaaaaaaaaatcaacttgccacatgttagcaaccgagacctcatgattgatgttcagtgacttggaaattctctccagggcaaactgcattttcactgcttacttacatacattttgaggcatagattaatttcaaaacaagaayttaaagctaggaggaacctcagacatcagcatagtttgtggtttycaaacttttctctccttttctgtttttaaacattagaacmctttattcaatcaaaatcttccatgaaatcccattgtataaaataaataaaaccagagctgtcttggttaaagcagggtgcgagcccaggatccagccctcttgccttggggctctctagcttccatggtggcccctgaagcataacaagagaatctctagaaggctggtgatctcagtttgaaaaccaaggatctggtcttccctctcatttcttacaagtggaaacaggttcagagaagcgacatgatgtgcccagtggtagagtcaggactaggactcaggtttcctgccatgcaatgcagtattctcctccaattcctctttgctattttctttggtggcatgtccctcctgtttcttcttcctctttttttttttttttttttttttttgagatagtcttgctgtgtcgccaggctggagtgcagtggcactatcttggctcactgcaacttctgtctcccagattcaagtgattctcccttctcagcctcccgagtagctgggattacaggcgcaccaccacgcccagctaatttttgtatttttagtagagacggggtttaaccatgttggccaggatggtctcgatctcttgacctcatgatccacctgcctcggcctcccaaagtgctgggattacaggcatgagccaccgtacccgaccgtccctccttctaatgacctcaatttagtctttactttttcccagtgtcagcacatatgatccaaaaggccttctgaacttctatcaatattttgatagcttctattctcaactctttagtaactattaccaaatgaccattttttttttgccataactctatctcttaagatactaccatatttccctataaaaatgcattaacaagttggtaacatgttgaccatggtaacatcttgagcccaggagatggagtttacagtgaggtgtgattgtccactgcacttcagcctggtgacagagaaagaccctgtcccaaaaaataaatataaaaaattccaacatcttatctcaccattcagagaaaacctcttttaaacatctgtctttcaatgaaaatgcatgaattatatatatgatatatatatgaattatattatatacataaatagaattatgctatttgtgccattctacaatttgattctttcagtcaagaaaactcttggtgctctttccaccaaatatagatttattactctcttttatagttacacagtgtacttttgtatgaatttattgtaatttatttaaccagcatcctataagtttagtttctagtttgtaactattttttaatgctgtaataaacatcactatgcacatataattgcatccaataatcacctcaggataaattcatagaaaagaaaatgctgggtcaacagatatcttcattttaaattaaaatatctctaatatttattgtaaayaaaacctttaaacaaaacaagacagaacacagacaagtatcaaagtctcctccaaccccctagctgttatgccagtctccaaaagaaacctggtatagacttcagacctttagttcaatataaaactgtaaacatagatacttttaaaaaagatagtagattacagagtacatacttaactataacttatttttaaaccaaataatggattctgaccaaatttccacatcaggacatattgtactagctcttttcttttttggactgcagagtatttcatgcacagatgaaaggaagcaaaatgtggtggctaagagcatggaccctggagcctgctccctgccaccaggcatatgaccttaagtgtaagtckctctgtgccctactctctacatttttaaacttcgatgataaatacctacttcataacattattggaagaattaaatgactaaatatattggaaatgcttagtacaataagcactcaaccaatgttaactattattaatatgtgtcataattttttagctagtccccatttgatgggcatttattttcagtttttcagcgataatgatgcaagtcatatttcatatatgtccatttgtgaaagcatttctttagggtatattactaaaaattaaaaatggatttactgggtcaaaataaagacacattttgtttcatttaaattttttaatttttttatttcaatagctctggggggaggtacaagtgttttttggtcacatggattgtatagtgtgaagttggggattttaatgcacccatctcccatgtagtatacactgtaccagtacgtagtttttcattcctcactcccctcccactctccccctctctgagtctccaatgtccattataccactttgtatgtccttgcatactcataacttagctctcacttacaagtgagaatatgcagcacttggtttttcattcctgagttagttcacttagaataatcaccccccagttacatccaagttgctgcaaataacatttcattctttttttttaatggctggatagtattttgtgatatatatatatatatatatatatatatatatatatatatatcacattttctttatccactcgtcagatgatggccacttaggctggttctatatctttgcggttgtgaattatgctatgataaacatacacatgcaagtgtctttttgatacagtaacttctcctttgggtagatgtagacacccagtagtggaattgctggattgaatggtagatatacttttgtttgagagatctccatactgttttccatagaggctgtactaatttacattccaaccagcagtgtataagtgtttcctttttaccacatccatgccaacatcaattgtcttttgactttttaataatggccattctggctggggtaaggtggtatctcattgtggttttaatttgcacttccttgatgattagtgatgttgaacattttttcatgttttttggccatttgyatatcttcttttgagaaatgaagatagatatattttgaattttgatgttttcacatccacccctcctccaaaaggctgtgccagttaatattccagccaatggtgtataaaaatatccatttcctcacatctggtcatagtggatattattagtctaatatacaagttcacacacatgwgtaattttaatgtgcatttctttggttattactgaagtttagtaacatgttttatttagcatttgtctttcattatctgagaactactaatactctccttgacacttttctattagggtgtttatttttttaaacagatttttaatggctctctgagtattatggctattaacttttattcatatatattgccaatacttttctcaatttatcatctgtttttcaattttgttcattattttgccatgaagaagtgtgycattgctatgagtctttyatagtttcaggttttatgccaaatgtcttttttttttcttttaacttcaatcttcccaaattgtcatctattttgtactctggggctttgagatttgacctatctaaaatttctattttgtggggaagggtagatgagaagccagttgtcctaaaattatttgttcagaagtctggtttgtaatgccgcctttatcataaactaacttctcaggtcggtttcactctttcttcrctctcttctattcacctgacctgccagtggacttttaccacaggcttctgttgtctaatttttatattaaatttaaatcttaatatttgaagggcattttccctctgattacttttgttttctttggttattgtttagaattttcctggctatttgcaactgcctgttcttcaaatgaaatttacaatcattttgtcaagttacctctcataaaattgttccaaagtttttttgcctaagattttattatatcactgtataatttaaggagaatttagaactttaaatattgagatttctatccaagatctgtttctctatttcagctttgttatatatccctcagmataattttataaatgtattcatataagactgcacattttctggtaggtttatgaccagatgttttttagtagataccctacgttcatttaatggttgatttggagtgcagtmccacaagttgagtctaaagtgtgaaaataaattttttaaaatttttatcaatcattgtcaccaaagacctcttcttttgccactttctactatgaaacacactttttccaagtggctcaatgcaagctgtacctcagaatcctgtcatttctaaataacatcttatctatatgctatttccatgaaaagctagtttggccaagattttgctrtaaagtatccaacgagttaggctttcattatttttctggtcttacttaatgaagaaacacatctgggaaatcaatgagtatttgaactcactgggcttcataaacactctaaattcagtcaaccaaccattatgcttaattcacattcaaccaaccaacaattattgagacttagtatgttcagaattctagaactagaaacatttctctactctggagtgacttattgtgtaataggaaaaacaggtataaaacaaataattgaaatatatgttataaaacaatctgagaaagtcagtaagaactcacaatcaaatggcaattaaataactggtgaatgtatataagtgtctaattaagtagcatttatttgtaatgaacagcacactcagacagacacatgcccagctaaagcagtttctacaggatgtgatgtgaactctttttcccactctacatatgaaaatgttgtctttaataatcattagatctatcctatccataggtttaactctagcaataactttttgaatttaaaaacccaagtgattaatattttgtgagaatgattgagtccgtggcatggaataataactacatccttttcattacatagatatgtatgtatattataataacatagattatactacaaaacatacacgcacgccacacacacacacacatacatacatgtgtgcttcttggggtcctagaatttctagcttctcctcactgagaaactggtgaggagaatgctscttctgtcaytgtccaaattgtgctgattcttctttgtgtatgccaccctgttctcttcttctgctggtctttgctaggacagtgtattgacatagaagttcattatttctctgcacagacaactcttatcctttgctcttgcttttattcaaagctccctctctagtgttactgaagggttttattttttaattctttcactaggggagtcaaaactattacttcctgcttaacctataactctgatgatggctttgccatgttgwcatggttttttgtttgtttgtttggcctatattctgagaattctgtgtatcttggctctgccccatgtgagaatgagcgagatttattatttcatggggacaaagctcttcattaggatacaaactataaaactgggttttttcaattgaacaaaattgtggatgtgataacacacccatgaaatttcactaaatcataactctgtcttcctcatctcagcatttaataawttaaattattcaattgattttgagaatttgactaaagctatggactctccctacctccttacaatatgtatgttttgtaaaagtttgcatattkttgtaggggattgattgttttgctgaacacttggtgctctattgatttcaggaaagaatcctttgtttaactacttcatgcccaatataggacacatgctatttgaaaatgagaaaaaataaatatagtaacagtgttttaacaaaattagaatgttccttcaaatgaatgttattttcttacttaccrtttctttttttattacagcttgaatgttaaatgtttcatgggtgtatagtacttcctctgtttactcattctctttgaccctcttcagcccattgcgagcacacttctgtttccagcactctaccaaaattgtggttctagtggttacttttctagccatatcctgctgcatttcttagaaataaatgtaactaacttctccctccatcttagaacacattctcctcttggcttccataacattacattttcctggtttttcccattctacttacttagtcccctttgactagtttgcccttcctctctcttacctctaaatgttgaaatgacatagatcttctcctcttttctgtcctcatacatcctctctagctgarctcatctaggagttcagctcctagatgagttcatctcatttaaataccatcaatatgccatatttatgtgactaccatagttatgtctccaactctgaactccaaacttggatatccaactaccctactggggggtgcctcccagttaggctacttggcggtcagggacccacttgaggaggcaatctgcctaactgggaggcaccccccagtaggggcagactgacacctcacacggcctggtacccctctgagacaaaacttccagaggaacgatcaggcagcaacatttgctgttctgcagcctctgctgctgatacccaggcaaacagggtctggagtggacctccagcaaactccaacagaccttcagctgagggtcctgacycttagaaggaaaactaacaaacagaaaggacatccacaccaaaaacccatctgtacatcaccatcatcaaagaccaaaggtagataaaaccataaagatggggaaaaaacagagcagaaaaactgmaaattctaaaaatcagagcacctctcctcctccaaaggaacacagctcctcaccagcaatggaacaaagctggatggagaatgactttgacaagttgggagaagaaggcttcagatgatcaaacttctgcgagctaaaggaggaarttcgaacccatggcaaagaaattaaaaaccttaaaaaagattaggcaaatggataactagaataaccaatgcagagaagyccttaaaagacttgatggagctgaaaaccatggcacgagaactatgtgatgaatgcacaagcttcagtagccaattcgatcaaatggaagaaagggtatcagtgatggaagatcaaatgaatgaaatgaagcgagaagagaagtttagagaaaaaggaatagaaagaaacaaacaaagcctccaagaaatatgggactatgtgaaaagaccaaatctacatctgactggtgtacctgaaagtgacggggagaatggaaccaagttggaaaacactctgcaagatattatccataacaatattaaccttaaatgtaaatrggctaaatgctccaattaaaagacaaagactggcaaattggataaagagtcaagacccatcagtgtgctgtatcaggaaacccatctcacatgcagagacacacataggctcaaaataaagggatggaggaagatctaccaagcaaatggaaaacaaaaaaaggcaggggtttcaatcctaatctctgataaaacagactttaaaccaacaaagatcaaagagacaaagaaggccattacataatggtaaagggatcaattcaacaagaagagctaactatcctaaatatatgtgcacccaatacaggagcacccagattcataaagcaagtcctgagagacctacaaagagaattagactcccatacaataataatgggagactttaacaccccactgtcaacataagacagatcaacgagacagaaakttaacaaggatatccaggaactgaactccgctctgcaccaagcagacctaatagacatctacaggactctccaccccaaatcaacagaatatacattcttctcagcaccacaccacacttgttccaaaatcgaccacatagttggaaataaagcacttctcagcaaatgtaaaagaacagaaattataacaaactgtctctcagaccacagtgcaatcaagctagaactcaggattaagaaactcactcaaaaccgctcaactacatggaaactgaacaacctgctcctgaatgactactgggtacataatgaaatgaaggcagaagtaaagatgttctttgaaaccaacgaggacaaaggcacaacataccagaatctctgggacacatttaaagcagtgtgtagagggaaatttatagcactaaatgcccacaagagaaagcaggaaagatctaaaattgacaccctaacatcacaattaaaagaactagagaagcaagagcaaacacattcaaaagctagcagaaggcaagaaataactaagatcagagcagaactgaaggagatagagacacaaaaacccttcaaaaaatcagtgaatccagaacctagttttttgaaaagatcaacaaaattgatagaccactagcaagactaataaagaagaaaacagagaagaatcaaatagatgcaataaaaaatgataaaggggatatcatcagcaatcccacagaaatacaaactaccatcagagagtactataaacaactctctacacaaataaactagaaaatctagaagaaatggataaattcctggacacatacaccctcagaagactaaaccaggaagaagttgaatctctgaatagaccaataacaggctctgaaattgaggcaataatcaatagcttaccaaccaaaaaaagtccaggaccagacagattcacaaccgaattctaccagaggtacaaggaggaactgataccattccttctgaaactattccaatcaatagaaaaagagggaatcctccctaactcattttatgagtccagcatcatyctgataccaaagcctggcagagacacaacaaaaaaagagaattttagaccaatatccctgatgaacatcgatgcaaaaatcctcaataaaatactggcaaactgaatccagcaacacatcaaaaagcttatccaccatgatcaagtgggcttcatccctgggatgcaaggctggttcaacatatgcaaatcaataaatgtaatccagcatataaacagaaccaacgacaaaaaccacatgattatctcaatagatgcagaaaaggcctttgacaaaattcaacarcscttcacgctaaaaactctcaataaattaggtattgatgggacgtatctcaaaataataagagctatttatgataaacccacagtcaatatcatactgaatgggcaaaaactggaagcattccttttgaaaactggcacaagacagggatgccctctctcaccactcctattcaacatagtgttggaagttctggccagggcaatcaggcaggagaaggaaataaagggtattcaattaggaaaagaggaagtcaaattgtccctgtttgcagatgacatgattgtatatctagaaaacctcattgtctcagcccaaaatctccttaagckgataagcaacttcagcaaagtctcaggatataaaatcaatgtgcaaaaatcacaagcattcttacacamcartaacagacagagagccaaatcacgagtgaactcccattcacaattgcttcaaagagaataaaatacctaggaatccaacttacaaaagatgtgaaggacstcttcaaggagaactrcaaaccactgctcaaygaaataaaagaggatacaaatggaagaacattccatgctcatggataggaagaatcaatatcatgaaaatggccatactgcccaaggtaatttacagattcaatgccatccccatcaagctaccaatgactttcttcacagaattggaaaaarctactttaaagttcatatgcaaccaaaaaagagcccacattgccaagtcaatcctaagccaaaagaacaaagctggaggcatcasgctacctgacttcaaactatattacaaggctacagtaaccaaaacagcatggtactggtaccaaaacagagatatagaccaatggaacagaacagagccctcagaaataatgccacagatctacaccgatctgatcttcracacctatttaataaatggtgctgggaaaactggctagccatatgtagaaagctgaaactggatcccttccttacaccttatacaaaaattaattcaagatggattaaagacttaaatgctagacctaaaaccataaaaaccctagaagaaaacctaggcagtaccattcaggacacaggcatgggcaaggacttcatgactaaaacaccaaaagcaatggcaacaaaagccaaaactgacaaatgggatctaattaaactaaagagcttctgcacagcaaaagaaactaccatcagagtgaacaggcaacctacagaatgggagaaaatttttgcaatctactcatctgacaaagggctaatatccagaatctacaaagaactcaaacaaatttacaagaaaaaaacaaccccatcaacaagtgggcaaaggatatgagcagacacttctcaaaagaagacatttatgcagccgaaagacacgtgaaaaaatgctyatcatcactggtcatcagagaaatgcaaatcaaaaccacaatgagataccatctcacaccagttagaatggcaatcattaaaaagtcaggaaacaacaggtgctggagaggatgtggagaaacaggaacacttttacactgttggtgggactgtacactagttcaaccattgtggaagtcagtgtggcgattcctcaggatctagaactagaaataccatttgacccagcaatcccattactggatatatacccaaaggattataagtcatgctgctgtaaagacacaggcagacgtatgtttattgcggcactattcacaatagcaaagacttggaacaaccaaaatgtccaacgatgatagactggattaagaaaatgtggcacatatacaccatggaatactatgaacccataaaaaatgatgagttcatgtcctttstagggacatggatgaagctggaaaccatcattctcagcaaactatcgcaaggacaaaaaamcaaacaccgcatgttctcactcataggtgggaattgaacaatgagaacacttggatacaggaaggggaacataacacaccggggcctgttktggggtggggagagtggggagggatagcattaggagatatacctaatgctacatgacgagttaatgggtgcagcacaccaacatgacacatgtatacatatgtaacaaacctgcacgttgtgcacatgtaccctaaaacttaaagtataaaaaaaaataagtaaaaaacattgttagctattggggccatacaggcgtatgccaaatccaaatttagctcttgggactatagtttgccaatcagtgctccactccaaaatgtgttcccaaacctaacygttgctgtcctcaactactaaattacttagaaggatctctgtctccttcctcctctaccatgttagtctactctttggttttcctgctcttgcccctacctccaacccatagctccacagagcagctaagtgttcttttaaataagacgtgccwtgtctcatgtcaaggaaaacttcctagaagaacctataaaaaataatgtagtacgatgtttttgttatacttcaagaattgagactttttcatggagagaaaagagagagaaggggtggtatttctagaaaggcaggatagctctgaccacttctagttttattttaatgaatgctgttacttgttaacattggtagttaaaaataagaaaagaatctgcgatttatcattgtatataatcattagggttttcatattgagatattattctggattataactcagtatttaagcttagagcaagtgaggaaaggaggagaaggaggaggaaaaggaaaggaaaaggaggggaagaagaagggggtagagaagaggacagagggaggaagaggagaatacatactctgttaactaaagtggaatgaaactcaatatttacatttacattgtttatctctctttgtgttgctctggttcttcattggtcttgtcttgcctgtgctaaactttttctatgacattaaagaggtctggtgtgaaaattgccactaccctacttccttgctattcctttctgtcagcttcttgaggatatctggatgtgaagcarcttttcttacccttggaacctttgtctacagttctcccttcctcttcctcttcctctatctcactcattctctcctgttttattaagggccgaacattattgtatcgtttcgccaatatttctaattcttctacagctctttagtttgcgccacacaactcagcattttaccaacccagtttcttaaaggaagcagataatttgcagcgaaattaaacataggttcaattacatatgtcagtatgaattagatgcatgttgctgagatattttcaagagttccttattaaaatagtacttcttccccctgaaaagatgaaaatgcttttgtatctattgcctctttgttctcataaagttaggtttatttttttttcttttttgaacttaaggattgaggttagtattattatccctgctttacatatggtgaaactgaagcagagagcaggaaaacaatctccccaaggacacccagtgtatgttccagccgtgcctgggcctcccaggttctgagggccagatctgcacttttctgctggtcttactgagggcagttagaagctaaagcaatttctaagctctgatccaaattatttgtaagtcaaggccatttgtttgtacctattttgartacttcaaccctttcgagagaattccaaatacactttttctaaatcaatatctctaaaacttgggtaatgtacaaatatcttttaaaggatgagtcctcttggattctgaatggacacaaattgttttactcacaatgttacttaagtatttacaaacagaaaattcttttattttacatatccacaaacatatacatacattatgcttattgttctacatcaaaaaagccaaccaaaattacaggttaaatttaagtagaaccatattactgagaaactttagctgatcaacaacattaatgtgagagattatattcttttaggaaacataattagctgatcaaaagcaatgtgttcaggcatgggttctttggagactggcgttctcaggctcccctgtactgggtgaccccaccagtctgctgccactttcattctgttggaatgaaacttccatccactcaaggcattgtgatgtcactggaggaaagtacataactgatgtattgatgtctgcctctgccctttttttcattaccatactataaatacattactaccacttggtgcaaacacaagcactaaaatygaatggtggtgtccaattataaagtcatgccccagacagttcagcaaatctcttttactaatttttattagataccaacacaagatttctttttaattctcacaagaactcacagactctgggggtcagaggactacagttggagaaatactgccctacacttcctggtttaaggctgggagaagctgtcaagagttttcatgtccaaccttggattaagcagctacccactgggatgacttaagggcaacctaagccaagaacctcacccctactaatttgctagtgtacatgaataattcattccttgtaaatggaaggactgaacgactcaacttaaattcaaatatattacccaggaagaataattaataagagtttattctgtagcaggcattaatttattctaattatgcatgaaacaaagcctaggggaatgagacatgggataggtgagttttgttatcttcgtaagtcagcatgtattaagtacctgctagtatcagagatcggcagaggtaagcatgcagtcccattcatggtacctgaaatccagttggtaatacagaacaaatggaacgagaggggaagctttgttgggatataagagggagaaacctagaaactaggcagcagcaatagcagctgacccaggccatctctgtttgaagctaacagaaaaacaaagctgcctgaatggaagacttcaggataagaaaaaaaaaaaacaccctttcccactttacagttttctagccagtcttgagacccttgctcagtttttaatgtggaagaacattctgccacaaaaggcaaatgattctctaattgcggaattttcaattttcagtttcttccagaacttgcctttttccccaagtactttccttgacctcttctgcacaatccactgtgagtgcaaggggaagaaataagtaccccctctcagcctgyagtcacatcttccctctctctatatggctatggacgcagtcccagaattctggatttcttgcatgtctgcctttaataagaaagcagagtttaaataggctctcactattgtttcgctgcttcacaccctcctggtttgctattgttcatgttcaatgtgtgtttctctactaggtacataattaactttctatttttccctcacagttcaaaagcttacaagtataaaagcttgctgttgtaaatacattgaagagagaacaccatactgtgtttatgggtgggaagatggctagaaaattttttccaaggaaaaggaaataaacatgtatccgaagtccctgaatacacggtcatctgcatggtctcaaatctccataccctctctgaggcatgaattatcacctccatacagrgagaagagaaatcgaggaacttacagaaggttcacatagctagtgtcagagctcctatgtgaacctctatgttaactccaaaccatttgtcatttcctcttgctgcactacccctcatgggattcctcttccatggtctttgtctccagaagctgaggatagatggggccacctgagcatgcagtgaacacagagagcacttctgggttgggcagctttaatttctctctaatgataccttctcagttcaytctctgggttcttggttatctctctcccctccgcttcttcttttctccagcccygtccttttttttcytttyttttttttttttttttttttgtagtgggcaggctaggaggcatgattaggattgatggaggaggggaactattccagttcatttattttttccctgtccaaagcccagtttcggcatggagatgtgttggagccagtagtggtgcacagaccaccagctgtgcttgcagtgatccagccaaatatcatcttaaatacagggctgagtctcaraaggcacatggaaggggcccccttttccctattctatcccagactcctgtactccttggaacacagggagaagggctcttaactaaagtacaaagggcatggtgcccagctctgcttttcaaagaaactatgttcctctcagaatacacctcacagaatcacgttactgtcagtggaggaaaaaaccaaaacctacaacagttcaacagtcaatgcaaagggcttcagaaaccttcattaatttggttatttggctgaatgctcaggccctttgcttttctccttagtgctgcctctttttgagtgtttctttgcctctttttgagagagaggggaacattcagctttgatttttgtttgcagcttggtgacaaatgatggggggaaatttaaaccattcatctactgagttctgggaattgtcagaggattttatttgtacagtgattttctgacctccattttctcagagaagtaaaaatcatgctgcatttgtaaacaaggtacttttattaagttgaacttttacaaacatatggtatatttagccaaaataacactgttatttaaggcaagtacatccaaagggctagcrtgtagaattatgtttgattaatgtgcactcaaaagctgttacacagtaagcataatttcagtttgtggagtgtcttaaatttactttgtaatttaatgtgaagccacataagtcagagttgaaagacatttgtctttgcattttaataatagaaatccatagcatgttacatggactttcaagtaaagcaatcactattctaaacttgaaagtttctttttttaaaaaatataaattgcaatgccttggagcacaaaaagaaataggaaaattcaaccattaagcatttgaaatgggctaatttgaagtgcttgaagcgtgttttgccatgctgagtaaatttttcccttcctagtaactgaaaaagtataaaacactaagtatctgtacttagctcactagtaaagaaaatttaacccatgaatagtagtactgctattatagaggtagtttgtaaaagtttatgaacatgcaaaccaccaggatttttttttctgttctactattttctgttgccttatttagtttcttgcaaagttgctcaaatgccatctctctcactcacaccttgaattctcaatttaaaatttttcatgcatggtatttatcatatatatgtatatatacatagatgtgtgtgtgtgtgtgtgtgtgtgtgtgtgtgtgcacgtgtgtatttcttggttagaagctctttttgagcaaaaagtcctggaatttcaaaactgcataaacgtatggcatacatacatattaataattgatttgtgtaagttttgactcttattatgtgggaagtattgcagggtaatgccattgttctgctttactggctattcatttttgctaagccataataatatatgttgactagatattattatactattttcaatgttcttaattgtcaaccacagaatcaactctagctagtttaagtagaaaataatttattaagagggataaatcactctgagaatcattgggagggcaaacttgcagaactaggctgagtttccaggaatggctcacaaaacagaatttcctgggactgccaaggagctgttgtctccaccaatctggaggctgcataatcaggaagccactgttccactgtagcctctggatccagagccccatcacctctgctgtgattcaggccaacaaaacaggtgccacacactctgccggtctctcatttgactcattttttgaaacaaagtctggcatgactacatctgattggcagaaagtatatctcatctggaactctggctgtaagagcaagattgggaagggtgagaggattttgaattgcactcaaacattacagggcattggaagaagtgttgagatagcccatcttcagaatccactccagttaagagccttgacttgtctaatctattaagattctgtgccattcagttgcttgaaaattgttggaggagtgtgcagaatacagaatcttcctataaggtgatcagtcagcagcctggctttttcattgaactcatggtgtacagggcatttcccctgaatctatgagtccccagagaagaagagttcactatctttcctggtagggacagggaagcccatctggctgctggcgttctggggcagggcaagaaatgggctgaaggacaacattttagtatgtagactttcactaaactctctggttttgaccccaccccttgctgttcaccctgcctggtatctctcagcctgaaacttctttggtataatttctctaggaaaaaagcctcttgtctcctgctgaaggtaagaatgagttgccgtgagtagaaaaggtagtcctgtgccaacaattgtcttgtgtacttctggtttttttgaaacaggatctcactctgtcatctaggctggagttcagtggcatgatctcagctcactgcaacctctgcctcctgggctcaagtgatcctcccacctcagcctcctgagtatctggaatcataggcgccaccacatgtggctagttttttaaaaaaaattttggagagacatggtctcactatcttgcccaggctggtctgaaactcttgggctcaagcgatcctcctgccttggctccccaaacaactgggattacaggcatgagctcctgtacctggcctgttttgtatgcttctatacatggacttctgtctgatcccgctgccacaacctcactaccatacccacgcatgtgggtaccaggtgtctccaaggacaagaagccaaatgaggtggtttctcctccattctttccccctgtaggtatttggagaataacccttttctttatgctaggtcaacaaatcctcctttgtctcttctctcttagaaagcttttgaaaatattttgttcactatttttcctctcccatttctttgttattgtggattaatatctttttaaattattttactattataatatcatagtaggtttgggagaaggagaagagatacatatatatgatcgatctgccatctttagtcataagtcctttaaatttattctttagtgtgtttatcattattacattaccaatctcatatgtacaaatatgtaggactatttctctaaatttaagaatatagagattaaatataaatatwtgagaacaaaatccttaatgttytcactttcaaattataaagtactttttttagtgggaggaaaggggaatgtgcatttcaaggatattagctgtatctgagaatacagggcaatatatgctaagtgaggaaaaaaatacatggccgaagaatgtcatgagaatggaaaagggagccctcccatgggcttgtaaggccagaaagccttcctggaggaggtggaaattgagctggactctgaagaggaggtaggaaccaggaagagagcaggatctccagctggggtaatgtcaagtgtgactggttatctttctcctgccaagtggagatatcctagtgtgtagctccctttcaggatctgagtaggtacgagggtgcagccatgaagccagtggtctaaagaccgtggagttttcttgagactactagaacagtccatcaaacacagggagtttatacagtgctcaagagaaaaaggttaaaaagtgctgttgatgagcaacctgctggttcacagatgctctttactattcaaaatataattctgattaaagcaaggaattaaaatccaaataaaaagatgcatagtttatactttgagtttcatacttgtacatctctatagttataacttctttttttttattattatactttaagttttagggtacatgtgcacattgtgcaggttagttacatatgtatacatgtgccatgctggtgcgctgcacccactaactcgtcatctagcattaggtatatctcccaatgctatcccttccccctcccctcaccccacaacagtccccagagtgtgatattccccttcctgtgtccgtgtgwtctcattgttcaattcccacctatgagtgagaatatgcggtgtttggttttttgttcttgygatagtttactgagaatgatgatttccaatttcatccrtgtccctacaaaggacatgaactcatcattttttatggctgcatagtattccatggtgtatatgtgccacattttcttaatccagtctatcrttgttggacatttgggttggttccaagtctttgctatcgtgaataatgccgcaataaacatacgtgtgcatgtgacaaaattgacaaatgggatctaattaaactaaagagcttctgcacagmaaaagaaactagcatcagagtgaacaggcaacctacaaaatgggagaaaattttcgcaacctactcatctgacaaagggctaatatccagaatctacaatgaactcaaacaaatttacaagaaaaaaacaaacaaccccatcaaaaagtgggcaaaggacatgaacagacacttctcaaaagaagacatttatgcagccaaaaaacacatgaaaaaatgttcatcatcactggccatcagagaaatgcaaatcaaaaccacaacgagataccatctcacaccagttagaatggcaatcattaaaaagtcaggaaacaacaggtgctggagaggatgtggagaaataggaacacttttacactgttggtgggactgtaaactagttcagccattgtggaagtcagtgtggcgattcctcagggatctagaactggaaataccatttgacccaaccatcccattactgggtatatacccaaaggactataaatcatgctgctataaagttataacttcttaaaagcaataaacaccagattttagttttcaacagcatgtggaaatattattctggtattctcaatatttgcatagcctctcattattctttgatactttgattattktatgagtcagtcatcatctctgagtccttgaactaggcaaagcactataccagcccaggagggggctgttcatatgttcattcagcaagtgtttgctgaatgtctatgatgcaaccaaaactaataaggaaataatttatttcctcaaagagttgatggtttggtagcaaagtcagcacacaactacagagtaacaggggagcaagacacatagartgattaacaacgataataaataaaggtaataatagtaatggagttgcttgtttctttaggggtttatcttgtagttggaaaggcagagcatagacacacttaggtgaaacatatagactcttagaaagtaagacaaaagcacaaagtgacagtgtaaaccaagcacagggtatccgaccagggtgcgaggaaccaagcacaagggatcagatgggaatgtgaggaatcctggcaatggtggaggaggcccttgccatgctggccatggtgggrgcttctgatggctctagagcaccacaggcttgactgagatttggtggacacatcaaagtgcctggttgggtagacatggtatcacaggagtagtttgaatgaaaggttcagtgaactgcactcacatttctgggagacgtgtttgctcagttagaagtcacagggagctagatagagctgctccatgtagagcacctgaagacagagggcagaccataaggttccagccagacggaggtcagggcagagtcctgccactgtgggaacacttggaggataaggctgccaggtggaccrgctagggaacaaggatctggaaatttaggcctgtgttctagtcatccacaggtgtattagtccattctcacactgctataaagaactacctgagactggataatttaagaagaaaaaaggtttaattgactcacagttctgcaggctgaacaggaagcatgactgggaggcctcaagatatttacagtcacggctaaaggtgaagagggagcaagcacctctttcacatggtggcaggagagagaaagaattaaggggaaagtgccacatatacttttaaaccatctgatctcatgagaattcactcattaccacaagaacagcaagggggaaatccacccccatgatccgatcacttctcaccaggtccttcctccaacattgggaattacaactagagatgagatttgcatggggagacagagccaaaccctatcaacgggcattccaggggtgtcttagaggcaataccagggtgagaagatgagtttartggacaggtttcctcatagccccacttgctgcaatcagaggagctccactttttaatctatttaatatataggacttgtcagaatttttttttaatcaacggattctactgattaaaaaaataagtctgcaattgtgatgggaaaagacaagaaggctggaaaatgagacctataatacttttagaaaaaaatgtaaattaagtctgagctagataatctcttttgaggcaaagagaagcagagtggcaaataggcaaaggtatttctagtggaagagatagtttagtcaaagatgagaagatacaattagaaacgttctgtgtggaaaatgaaaatgcatggactttcctgggaagcaggaatcccatggctggtgcagtgggtacagtgaagagtttgaatttactctggcrggcaatccagtgtctcagaaaatgaggtgtgggtgaggagcatgatgaatatgtatggttacataactctgtgtcagttactcagagcatgaagggcttggattaatatatggagccatcacatttttcttggctttggtccctacccataaacccaggataatgtctccagtttccctgcttgcaaacattctggccacaatgcatcaaagaaaaaaatgagactttgttaggaaaaatattgatcaacattattatctcttgagcaacaagcaaattataataattgaatactccatggtatctcatgagttttcagtattctgcaaaaacatttatcgtccctgggtgaggaatctttttaacttggacatatctatgcactactgtcctgtctttggactgagttcttggtggcatagtcattctgttactcctctgttggctggcacagtggtacttcgcgtgtggtctacgcacgtttttggtgcggatgtgtcagagaaatgttccattcattgccaggagagtagtgtagcactgagagaggacaaataaatatcagtttctcaataggagaaaaagacaacaattaggagtataaaatatggcaaatacaataatagagaacacacatggaatgttatatgagtataagaagggggtggtaaaaactaggaatctttgttctagtgaagcataagtactctctgcaacatagaatattctgttagtctgtcatagaacctgtttgtaatttgattatttgatagcttgagaaagattgtcatgtttcagaatgttagagcaagcaagtgaagaatttaacaaatatcacatatttaaaaaattaatttggtgccattagtgcatatttaaaaaacatatttggtgccattagcggctttttcgtatgttaatatttctctttattactctattattatttcttatttatttatttatttatttatttatttatttatttrtttgtttattttgagacagtttcgctcttgtcacccaggctggagtgcaatggcgtgatctcggctcactgcaacttctgcctcctgggttcaagtgattctcctgcctcagcctcccaagtagctgggattacaggcatccaccaccacacccagctaatttttgtatttttagtagaaacagggtttcaccatgttggccaggtggtctcaaactcctgacctcaggtgatccacccacctcagcctcccaaagtgctaggattacaggtgtgagccaccatacctggcctttattcttattcttattctaatataatctcttttaagttctaccatttttgaaaacttttcatcagttcatatctcctaggagcagaatctatgctttttttkgtatgcttttgaagtatattggattaccacagtacatttatgtgttaaaggtttgtatgaatcaaatcagagatattggtttaggttagtaaaacttcatctaacaaactgtatgatgctaagcaaaatactgtaagttaatttaaaatcaatctttgaagcattaaaactaagtgtttttattcacctctggttaatttttacacaatggtctaggtaggcccagcatgttggggttttatttattatggatcatcagcagtcaatgtttattaagcaatgtctgtatatacaccaatgtaataactgttacatgtaaacacaaaagaatgatgacataatctttaccctcaaggaacttccaatctgtgcttgaagaggcaagctaaacataaataaagattgccatgctagatcgcctatgacaaaaattgtggaaaatttgagagttatagaagaaaaaggtctatgatgtgctataatcaggaggtggccttgaaataaatttcaaggccacaagaacctgccttctttcagagaaggcgttcctggcaawtagaagacaacacaaaggcagagatagaaataaacatggcaatcagtctagactttgtaaagatttagtagtcaaaagcagtgtctgtcagttaagcatttcatatagttttcttcatagaatttttacttgattatcatatatatgtgactatcaaacatcttaatcaacacctggctttggttgtcagacattttcaaatcaattcaataatatttataatayacactgtaagaatttttatgcctagcatcatgctaggcattatatagaaacaaggaaggactcatagtcttacctttgaagatgttgttgctttaayagaagaaaaggtatgaacaaatacaataattaaagctgtcatcaaaccaaggctactcaaataattcaagttatgaaactccctatgtataaattgccacgtgaataaagtcctcccagtcctttgcatatgcaggtcctttgcatatgcaggagctattcccccacacacctgatcctctgctcatacccattgtatctccttctagtgcctaagttatattgatggtgctctgccagctagagaccatcactgcgcacttgccaagcccatacctatctctcattgactctctggtttcctttcaaggtcagcgagcacatactgtagtcatcccataattcccaccttctaccaccttggttcctctgccttttactactcattgttcagttacttccacctcagacccctttcacacaaagatgcaccctttttggacctgatctgtttcttccgtttcttctaactcttgccaagtgaattcagggaaagaacactacactgatgctctcatgttccctctctctttgaacaaaaatatctctatcatcctggatgcctcccatagaaatattgctggcgaccctcctgtattgaggaaagatactatatttaaatatgaagaaaagaatggtgttgaatcagtgacctcagcctctgaagcctttgaaagtatgcagaagttcttttatgaatctctattaaaaaaatctttctctagaagtttaccagtgcttccttcaaaatgtctactcaagataaaatgtttaaaatatcaaatttcatttcttatttattacaaaaaaatgctgtaaatttttgtttttctccataacatagaatattatctgttagtctgtcatgaaacttgtttctaatctgattatttattagcttgagaaagaatgttatctttcagaatgttagagcaagccagggaataattataacaaatatcacatattttaaaaataaattaaaacaacttaaacaactrtattgtgtaagcttatataaactgcttaaacaatatataagctacttaaacaagagagttgactgaacattctaaattccaaatgagcaacgttcacataaattttcaaatgtaatgcacttataaattgaagctgtctcgtatagtttgaaatgaatagaataaataatacctattatattaatataagggagagagatgggaggtgacagaaacagacaaatggttacaagtttgagaaaatcttttgcacagaaagtagaacttgaactgaactctgaatactaaacattgctatgttagggaactattgaaggaatatctcaagttgggaaaagatgtatttggaaaagatgtatttggttgaaacagaaacttcttatggaggagaaaagaagacattggccaatcaggattgagccaatttgtaagtgtttttaaacctcttcacattaaagaggttagtggattttcttccataaacaatggaaagctattgaaagttctgaaggattgcaatgaatttgacaaaatcgttttcaaaaatcatcttctctggtgatgttagagaaattggaaggcaagagactagataggagaccatttgtgaccacatgcttgtgagatgccagggacctggaataatgttgtgggaatgtcaaaggaggggaactaggacaaactcttcaaacacgatgtgacaaagtcttgaagtaataaaggaggcaagaaaagacgatgggtcagaaatgatagtgaggtttcagatggggtgacagggagaatgaaggataaacctgatagcagaaacagggaggtcagaaggaaaaactgtttggatggatgagaggaaggaaagagttaagtacatggggtatttagtgctatcrgtagaaatttaatggaactacatatgtcatttaaaattgtctgacagccaacttcaaaacagtaagaaaaaacaggtgaaattatgtttaataatgctttgtttacccccaatatattcaaaatgttatttcaacatataatcaattaaaaagtattaccaatatagtttacattctcgttttaagtttttgagatctggggtctatcttgcatttctagctaatcccagttgagctacatttcaagtgctcagtaactgcctgtggctagtggctaccatattgggcagcacattattaggcagtcatagaactgacaaaaaagatttagcacayttcttgattaagatgatgctaagactgtattttggaaattataattctgtatattatttctccttctctatttcttttgtttattttagctattttagattcatgatgttcttttagcagaacatcattctttccccaaagcaccaagactttttagaaatatccatgatatacttttttattgcctagagttgctgctgtctcatttaattctccatttgacttacaactttaataaatacatgtctgaatacattttcttcttcctttgtcagtcttcaaagttttgattatgaaataatttagcaatgtgtcctcaaagcctgggataaatgacatttagtactttggatatgaggaccatttttcatgttccccaggctgcatatgtgtgtgtatttctctcatgtttaatatctggcataaacttgctggagttttggtcttcacgatatgctaaagaatgcagtataaaagagagcctacttctatagaaaacaagccaaggacattgtgttccatctttacaatgaaattcagatttcccattaaaaggcaaatctatcatttcaaaaggttgaataggatggtagtttaaaagaatccagctgcttaaatttagggcactgaaaaacattcaataaaaaaaatgttccctgggtctcaagcattttcatttgattatgtattggatagattttcattaggcctagaattttgcctcttagaattctgtcctaaaatagtttgacaactgttttgagaaagctggactcaactatggtatctcatttacgattaaattatgtatttgctgtttagaatattcttgtgtttgataatatattcttaacttttgttgtagaaatattggactaattttgcagtgctttactttttcatgtttattgttgagcctctctcactcctatttagtttcctttatgtttcttcttttctttggagacattgtcagaacagctattttgttctctaagcgacttccttcaatgttttcagtcacctgttcacacgtgactttatttttgtagccaagtagaatgctacctttttgctattctaatgtgctctgcccaacttttttctgattaatttaggagtaggaagtggaaaggtgggtgatactccctacaatacaacatgttacccacaaactgattagggagcacagaagagctctatgctatgcagctgagctacaaattcttaaggaagtagtctatatgctgtaggaacaaaaggatttatgtcagacatatttgtatgatgcacgtatttcccatgggcattaatagtcgtttattaaaagttatgactaagtctccattctctccagctctggactttagccctgctctctttcacksgtaacaccagagatgtaacctgggaccatacagaggaccatggttaacaagggcagcgcttgttatacccctggtaataggtatttactaggtttcttaaattgagtatttggctctctcctactggttgttaggcatttttacatgtaaataatattgcccgtgggccagtccctaaaagtaaatgtttccaataattttttggcatccaatgttttactaacactaatttggtcgcatttgcagacmttacctcttcaatgttcatattcttcctaaacaattgtttattttgaaagagagtttgttctagtcaatatcagtccacttctaatgaatttttccccaaagagctcaacaattttatggaataattctttttcagaattcatattttattctagacccaaatgagcaagtactttttatgctttatcatagtttatggggggtatttcatactggggtcctgtgcttccactcccctgccaacactggctatcaaaactgcttaggctgcaaataaaacaagaaatgaaatccatctggcatttctcattgaattaggaccagaacatttttgttaaatattaacagatggctaaagtcttaatatcaaactaacatttaaaaacatctaaaaggacccacatgagggggaaaggacggaggaccatgtgttttcttcatctcagagcccttcctgtacaccattccccccgccatttttccaaccacatgttgagaatcactggggcctcctatctctaataacttttattccttaatagctggtatcaaaatggcatgtgatgatattatcaagatagtgtaatcaagtgttagccaactcaggtgatgtgttgccattggcatgcctcaagatcttttattaaagtcaattttctgtctctcctctcctctcctctcctctcctctcctctcctctcctctcctctcctctccctcttttctttctctctcttataataggaaaaagaaaagaagtacatgcttcccttggacaacctgaaagttcgggatgtggaaaagagctttatgtctagcaagcacatctttgcactctttaatacagagcaaaggtaagaaattgaaacagttcctgtcttcagatttttttccttgaagttctacatgattcagagatcatatttgaaaatagttcctttggtcacaccttgaaatttgtctgctcttcagttttcctttcatttattttgtatttttaaattccaccatgggttatggcttcaaaatataaaaactcagactaaaaaagatcttcaagtgttaactaattatttcttgcttttccacctggcatgaaaataattcttcatccattttttttttctttttgagacgggatctcactttgtcatccagaccggaatacagtgctatgattatgattcactgcagcctcgaactcctgggctcaagcaatactcctacctcagccctctagagtagctgggactactgcgtgcatgccactgtgtctggataatgttttaaaaattgttttgtatgcagttgacctcaaactacctgggtgcaagagattctcctgccttggcctcccaaagtgctgggattacaggcatgagccactgcacccagtctgtcygttcttaaagctacattttgttaccttaaagtmtttcttgtcccaatatattgtttacatacttacaaactactctatgataatttttaaagtatctgtctaacatgaatggatatcacttaagctcttcttgaagagcggacaaatttcatatactatgactaaattcagggaatagaattattcagttatggcaaataaaaatgtatagtattttacagtttttcaaagtgctstctacattcattgtcattggtttttgtaacaattgcctttgagatcaaaaggatacagttacaaataagaaagcgtaggctcagggatgctaactcactttcttaaggtcataaaactggtgcatgggggarctggaacttgtattaggacttcctctaagtacacttttccttccactcattttccattgtgtgcttattttgttctgctgttcatgtgcagtatcaaaactgtattttgagctgaccatcacagagtgccatgatcttcactgaaacttagcagtaaagttaaataagcaaatggagaggtaagagaggatggactagagaagtataaaaggggtacaactaggaaaggataataaaggagagtttttccaaawgaaaatgttataggaaaaagctaattaaaatttgtgtgagtcagttattaacacagtaagtcattaggtaacagaatctaattttaacccatttttygaggctgccttttwtctttatttagcaatgaatgaagttacttgattaggttcaatgactggcccagggtcaatcacacagtaaattaaaatagcaaaagaagacgtcttcctacattcccagtcagttgctcagagtgactcataatacaaaaatacttagtaaaaccacaaagcaagccatttaaagaatcgacaggaaagaaaattaagtacaactaactcccctaccaaatattcaaatgggatttttgaagacagtattatttgagagcagcttatgaaaacacactgaaaataataaagaataaaaaggttttctagagagaatagtagtgagtctgccacactgcagccaagctcagtactagtttacatgccttcatcagarcagcagagactcaggagattctaaagcaatcatcagaggtgtgctcagccttcttgcctagatgcagagtggaacaggtgactgccaaacaggaagtcaaacaaaattgaatccatggtcaacctgaaaagttcaggttataaaaaagctgggtgtaaggtaaaaacaaggctatggtagactatcatttttcataaaatacaactgtggattttaaagacagcaaaagtcaccgaaataaggaaactgtggactttgaaaaatctagatattttgggatcttggagttctaaaaaggtattgaattctgctgccacttctcagtgacctcagtgagtatatagatgtacccacattggccattgtcttctcctttgaaatgctgattcctttaaatcatttttgtgctggcaaggacctccagtgcaatgttgaccacaagctggaatccttgtcttatttctcattttaaggctaatttaaggatgattttaaaaattgtatagtgaaataccttttgatagatgtctgatatcaggtgaagatttcttgtgtttctagttactaaggtttctgttttcatttttaaatcatgcttaggagttgaattttatcaacctctccacctggaagattgtatgattcttcttctttaatctgttcatgtggtgaaatatactaatagaccttctgatgttaaaccatcctttgtctcctgggattaaatttagttaggtcacaatgtgctattctttattatgagttcttggtttaagtttgctagtattttagcaaatgctaaaatgagttagattggcccataaatttcctttttatattatttctgcctggttttaatatcaaggttctgttagcttcataaattgaggtgagaataagtccttattgttctttggaacccttcataaaaggtagggattaactattagctgactgtttggtggaagtaacctgtaaaatcatctggccctaggaagtatttttggtaagtaggcttttaactagtgattgaatatatttaatgatttcagatttatttaggttttctgtttgttccatggatccatttgaataattgtattttttctagaacattgtccattctgttttgctttaaatatattgcaccaactatttcttaatattttatttttctaagtctctgttgtatctgaaatttgactgatttttatttctaatattaatccttatctttttttatgatcactcttgctagagttttgtgtcttttcagagaaccagtttgtggcacttttgaacatctattgtgtatattttttctattccaataatttctgttctcttaattatttccttccttgtattttcttgtgtttacattttaggtcttttcaaacttcttaatttagatgtgtagctcattaatttttatcctttccttttcttatatatctgcatataaatctatagatttctcgccaggtagtgtttagctgcttactacaatttttgaaatttaacaattttattaccattcagttctgtttcctattcttcatcatgttttttttttttttgagctatttaaaagtgtgttttacattttagaatgcagggaatcttattgttttgtatcattgatttctaacttaattgtattgtgaccaaataatatggtctagtacatgatgttaataaatatttcacatatacgtgagaagaatgtacatttactagcttggaagtgtaggttccatgagagctgattggattatgcttgttaattgtattttgcaatgtctatagtcattatcttttcttcatctcaaataattccaacattcagcaagtatatattaggcagctgttatgtgccagatactgttctatgcttaaaatacacctgtgaatcaaatagacaaagacaattaaacattttagatactatctagaaaggggaacaggcgrggagacaaataaaaactcacaaagaatcttattttatcacatgagcattaaaaaggtcgctttgtgattgtgagcttgaataagcctgccaatttttgcttgaggccaatctatgttattagattcatacaaatttagtattgtattttcctggtgacttaaaaaataattttgtgacagccctcttcattcctaataatgcactttgccttaaaatttattttgtcttatgttagtatagctacactaactttttggttaatattttttattgatacataatatttatacgtatttatggagtacatgtgatattctattacacgcatagcatatgtaattatcaaatcagagtatttaggatattcatcatcacaagtgtatatcatttatgtgttgagaacattccaagtcctcacttctagctattttgaaatatacaatatattgttgctaactatagtcaccatactctagtattgaacattagaatttattccttctatctaactgtatgtttgtacccattagccaacctttcttcatcctctctccccaaccsccaccaacacacacacacacacacacacacacacagacaaacagacacacacacaaacacacacacacaaacattatttccaccgtctggtatatatcattctactaactacctccgtgagataaactttttaaactcctatttatgagcaagtacatgcaatatttgtcttcctgtgtttggcttacttgacttaacatagtgatttccagttctatccatgttgctgcaaatgacatgattttattctttttttatggcagatagtattccactgtgtaaatataccaccttttctttatctattcatccatttagaacatttaggttgattccatatctttgctattgtaaatagtactacaataaacatgggagcgcgtgtgtctctttgatatactgatttccttttctttgactgaatacccagtaacgaagtagttctagttttagtatttttagaaattgccatactgttttccataatagctgtgctgatttacattcccacyaagagtgtatgttcccttttctccacatcctcaccgccatcaacagattaaatctcattactcattattggttggttcaggttttttatttctttctgattcaatcttcgtaggttgtattgtccaggaatgtatccatttcttctaggttttctagtttgttagtgcatagtttttcataataagctctgatgttttgtatttctgtattagttgtaatatcttttttatttctgattttgtttaagtcttctgtcttcctgattagtcttacgattgtcttattgattttatttatctttttaaaaatgcaacttttcatttggtgatcttttgtattgtctttttcatctccatttcatttagttccactcttatctttattatttatttccttctattaattctgggttttgtttgttcttacatctctagttccttgagatccatcattgtattgtttatttaaaatctttctatttcttttgatgtaggcaattattgctataaacctttatcagcactgttttcactttatttcataggttttggtacattgtgttttgatttctgtttttttcaagaaatttttaaattttctccttaatttttctcttgactcaattgtgattcaggagcatatttttcactttccatgtatttgtactgtttccaaaatatctcttgttattgatttctgtttttattctattgttgtctgaaaagatacttgatatgattttgatttttaaaaattttttgagatttgttttgtgtcctactatatggtctaccctagacatgttctgtgtgctgattaagaataatgtttattctttagctgttggatgaaatgttttgtaaatgtctgttaggtctatttggtctaatatgcagtttaaatccaatgtttcttcgttaattttcagtctagatgatctgtcttatgcttagagtggagtgtagaagtcccaactattcctgyattagagtctttcccttcaggtctaataatatttgctttatatatctgggtgctctggtgttgggagcacacatgaggatacaatcattacaatcattatatcctcttgatgaactgacacctctttcattatataataattttgtcastttttattacttaaagtctgttttatctgttgtaagtatagctactcctactcacttttgagcaccatttacatggaacatctttttccattcctttattttcagtttatatatgtctttataggtgagaatttcttgtaagcagcatatagttagatcattttcaaaaattcattcagccagtctatattttttaagtgcaaagtttaatctgtttaccttcaaggttattactgacatgtgagggcttcttatcattttattacttgattccttattgttttttatatccttttttcctttctttttctctcataatttatctttgtggtttgttggcattctgtagtggttacatttaagaattttcccttccttgtttctgtgtttgctccactagtggtttttatatttgcatgtgttttcataatggtagttattattcttttgcttttgggtgtaggtctcccttaagtatttcttataggggtggtctagtggtgctgtatctcttascttttgctcatctgtgaaagacattatatctctttcatttaggaaggataattttgctgggcataatatttttggctagcacattttttcttttggcactgtgaagatatcatcccattctctcctgtcttkttagggttctgctgagaaatctgctgttagtctgatggggttcctttatataggtggctagatacttttctcttgctgtttttaattttttttctctttgtctttgatttttgagtttggctataatatgccatgaagaagaccttttcaaattgtatttatttggggatctttgactatataggaatgtctaaatattttgctaagttttgaagtttttaacctattattttattaaataggttttctaattctttcattttttttcgttgtttcttgggacaccaaaatttgaatatttggatgctttatgatgtcccatatgtcttgaaggttttaatctttttgttgttgttgtttttatttttgtgtgactgggttatttcaaaagatctgtattcaagttctgagattctttctcctgcttgttctgtcttactgttgaaggttttgaatgtattttgtatattattcaatgaattcrtcagttccaaaatttctgcttttwaaaaaattatatctctttgataaatttctcattcatatcctgaattgtttttctgatttctttgtatygtttttcagaatcttctttttttcacccattttaaatatatactttaatgagttttacagatatgtacagttgttcagccattaacacaagatatgcaacatttccatgatgccccttcttgtgtctctctgagcttctttagtgatagtatttttaatttttccctaggatttaatgaatttcccctccctccctttcttccttcctctccttccttccttccttcttttgagacagggcttcactctgtcacccatgctggcgtgcagtgatttgatcatagcagcctctaccactgggcttaagtgattctcccaactcagcctcctgtgtagttaggactatargcacatgccrctatgtctgactagtaaatttctttttattgggatctgttgctggataattattgtgttcctttcaaggtgtcaaatattcttgctttttcatctttcctgtgttcttatgttgatatctacacatctggtataactgttgcttcttctaatttgtttgaaattgcttttgaaaaggagaactcttttctgacatgtatctatggtattggttgggtagggtactttgcttttgaatctgactatgcrtagtggtgtagtctctgtatgacttcttcatttgtagacagcatcagtggtgtctgagactaccttggtggcttagaatgcagttgttattagtagaggctatgaaaaagttttgctgagtactataacactaggtgggctagtctttaggccccaggccagtgtgcactggtgctggtgttggtgggtccaggaaggccaattcttgtgcctccaggttgctttctcagatgctgctaatggcatcagtgggtctggcaagtgaacaggttcttaagcccctgggcagtggrtgtggcatgggcaatggcagtagcaatggtggaacatccatctgggacccaagtggtccacccctgtggtagcagtggctgcaagaggttgggtgggctggcccacagactttcaggtggtgtgtatggttgggtgccagctgtggtggtagtgcaagttgaatatggctggtctcagaccctgggagaagtgcttargtgccacaggtggtcaactggcctggatgatcttcaggcccctggaaagtacatgcaggtgatgctcargcccctggaaggtgtgtataagtgatgcccgtgtccctggatggtatgctcaggtaaagggggaaggagtggagctgagccaggtggacttgctctcagacccctcagtggtactggctatggtaggcagaagtagggtgatccccagaccactggaaaaatgcttaggtgagagcagaaatggctatctgtagcccttctactgggaagcctatggttgctttccctgggtggagccataagctgggggctgggaacatgggcttcatttgtgtcttggctccgcagcagcttaaagcagtggtggttgtgggcagtggcatttgtccttgggggcatatgaaaaggtgtagttacccctctgcagagggccacaggtaggtatgatgggcatgggatcactgtctgtggctcctgccttagccctggcaatggagtagaatgcagcttggtggggtgggggctgtgctctcaaaatggcgtatgcagcagtgccttcatgtggtctccagacagctctctatgttagtctcagaacttgtaaggattgaggtgttctctcatggctaggactgtaggaatctccagcagaaacatggtctactgggggtctctcattcacactttccccacattaaggagccactccagaccctcagctgatccagctgaactgtttccctctcctttcttgcttttggtgcttcctgtcacttctctgttgaattccagtgttctctcttagattatctactcaaagtatgattatccactcattattttggttcttttccatggaagaggcaaataccagattgatctaggcagccatcttgaagccccctctttgtatttgaacaggccatgatatacttgcgtgtcatttttctttgctagtggatagactttttttagtctgtcttttctctgaggatgtgacctttggaggttcctggattcacccaagatcttattattattatattttgtggacattaaaatcaaaaccttttggttactgaaactgatgccatccagtggcaaaagttagaaaagatgtatttcctcttttgcggggaggaggcaattgataattcttttattttggagctttggcatgtaaaataatrtttttcatatgtcttataggaaatagtttttattctcttcctgcagttttggctgaaatgaagtggcctttcattatcaatagattgtagaaacaaaaaactatgttcctgatttcttctaggggtgaggactgtgataatagtgaacttagaaggtcaacctttgattcagtgtgtatacacacatgaaagttttacaaactgattagagagaaatagcaataatttattctctcaacaagtatttattctgttatccattccaaagtatcaaagtaacaaagtatctgttatccattccaaagtatccgttccaaagtatcaattggaatgaaattccaatttattctgttatgcattccaaagtatcaatgaaatgtattatctatcctgaatgtcagtattggtactgtgtattattctgttctcatgctgctaataaagacatatctgagactrgataatttataaagaaaaagagatttcatggactcatagttccacatggctggggaggcctcacaatcatggcagaaggcaaaagacacatcttacatggtggcaggcaagagagtatgtgcaggggaacttccctttataaaatcatcagatcttgtgagacttattcactatcatgagaacagcatgggaamaaycagcctccatgattaaattacctcccactaggtccctcccatgacatgtgggatttatgggagctacaattcaagatgagatttgggtggggacacagccaaaccatatcatactccaattaaaatataagatgttttcttgttttgagaacatttgcaatcactagtgtgagtgtcatacatttatttttcattgaacttaaaacagaaggactatgttagaaaagaagaaaatgaagtttagttgtgagattattatayatgaaattaatgagttatagtgtgtaaggtaacatctaactagattacaggatagggtattccactgcagttctgaagtgtcagaatagcagacagcatagtatttagccacagcaaaagagttagcatcatagaaggtgactttcattaggtcatggcatgaattgatgtagaggacatagaaaagactacttcaaatgggaaatagtattagtcaaagccaatagcaagaaatgttatttaatctgttgctagtctcttctgatgagaagaagctaatttcaaaggcaagatgagccctagtgacaaaaataaaaacattcctttttgtttccatagaatttattgaactggacttacccatgtcagtttaygtattttaatcctctgtgttgtggtaaaatcatgcatctttcaaaagcccatatgcttagcatgattctatcaactattcttaaattacattcttttcaccacttatattgattctgaggttatgttcctaatttgttttctcttctgagacaagaccttataagaaaataagtgttctcattccttgcctttagatgaggttacgcttgattaatttagaatagattttctaaatgcctccattactttgtaatttttatccctgtcctccacatcagtgttttggatcaatttgtttatccattcagcagacctatatgagatgcattgacttggagctaagagtttctgtttgaacaccaatgcaagtttaaaatatcatggctttccgggggtttccagaaccttatagataatctcgtcggtctttcttacctcacaggttaaggagctatatctataacagttaaatgccttcctaatgtcacaaaaacagttaatgagagaaccagaactacaacccaggtctaatatctcctaactcaaggctgtttctgatactgtagtttagagattaactatggaataggaattctgcctaagactttaactggaattgctcctaaaagatcagcaatgaagagatttttaacttattgtgtagggatttcagtttactgtaagatcatacaaatttccatggaatgcttttagtctcattttttaaagccctgcatggaactgaccattgctcctgctacagttcctgacaaacttttagtcatggctatttgtatggcaacattattcctaagagctcattcagttgctatttcagctttccactatataaactttaaaagagttactctgtagtcccccatcatcaggtgtgtgggaattaatacatttaacatcctttaaaaaaaaaaaggcttcggtgtcctggtgaattaatataatctttacaagccaggtgaccagatttttgagccattttaaacagtgtttcagtgctaagatttataaatgaaaggatttgttgctagttgcagtgacttcagcacttgaggagagcgaatttcacactcagactggtttagcctacataaactcccggtaagaatacccattcctgagccttcctctggctctttyaaagatggcatcatagatatctggggagactaacattgtgatactctgttctcacattaattgcttcacctaattataaactgaaagttaaattttagttaacagactcctaaagttcactgtggcatggtctaaactaaggattcaaatgctcctccaggtttttgttctatttgattttgttagaaatgccatgttttctctgatagaagtatgtctagataatggcctcactgtgcttctctcggctctccccaggcaggcgttcagttttaaggtcatgctaaggcccatttggttcaaggtatgtcagctttggtagccaacagagaactgtttctgtccagggggttgtagggcagccacatggtattttctgagcactccttggggttgtagagccttgttttcttttaaaataaggcattctttctactttgtagcttcaattcaggatatggtttatcaatattaccaagtgttccaattcacctcctcccccttttcctatagaaagtgattttaggatgtttcactactccacttagttcccagcatattgctgacactcaataaatgtcaaataatgccgcaatatagttagtgtgtgctctttaggcattctgaaagaatgactctttatttgcattgttgagtagtggtatatttttccacttgttagctggaaagaaattagagtcaggttgttcatttatatacctctatggctacatttctatactaagacatgctcagagtttaaatttgtttgaaaaagtgtttaaatgaatattctgggtggtatacaatgctttgtctaaaagatcatgtctcaattggatatggttgagtgtcggatctacattaaaaaaggaacaattactcttccataaatagggatggcagagactcatatgtatcagaatttcagtaaggtaaaaagcatgtaatattctggactcgggaatgaaatactgtgtaaggaacacaattcaattaagcttgtttatgcaacataaacaagacaccaggataaattattttatttcatttttatcccacttttgtcaaaacaatgtttaagacattacttcttgcctcacaaaatgctaagtgagaattgcttgtcttctaaataccctgattcaggaaggtttttatttgtcagatgattcagtcagtaatcagtcccaacccaagtagagaaatgaaatgtatgttatcctatccacccacaccccccttggagtgtaggtgggtcatctttccagtagaggtgtgtgtaataccctctatgagtatctggtggagggaaaaaataaatcagtttgagagtagaaacactttatcattctcaattgacctagagttcattgtactgtttctgtaactttacgtgtgatataaaaatttggttttccccatgctttatcyttagtcagaaaaaaaatcccactagatatgagaccaattgacacctgatatattgttgtccagaggcaaacacaagtgaactggtggcactcaggcatgagtagtgttactagggggatcacctgaacaatgagtttaagaaatggagtgtgttaagtgaacattttaataccttattcttccttctggttttaacacaatgataagttaaataattaaaatgtaacaattctataacttctctactgtgagactgctttccatgagggagaggctgtttttcttattcattgctgtatccccagggcctaacacagtgcctggcatttttgtgagctcaatagcatgagggaatgaatgcatggatgcaaaactttccccctctgttatatggagaagatagaaataatgccaattgctaatataaggcattcttaaagtaagtaagctctagaagcctagaacttcaaatgcaagtgggatgaaaatggaaatacagattcagactctcagaggaaatagtttgaggacaaaaggaaatatttcatttagaaagtaataacctcggtaatatacagactgtataaatgagtgctgtttgaactaaatagaattctatgacattgtcctttaagaaaaaaaaaagcatagatgttttattgtaaattgtcttaacatcattctcataatcttaacgtttattattcaaaaatgctttgtagwtagctacactaagcattctaaatctttatttcttggttctagcaaagtattgacaaatttcaggttttcttttttttttwtttttagagatggagtctcactctgtcacccaggctggagtgcagtggcaagatctctgctcactgcaagctccgcctcccgggttcacaccattctcctgcctcagcctcccaagtagctgggactacaggcacccgccaccaagcccagctaattttttgtatttttagtagagacggggtttcaccacgttagccaggatggtctcgatctcctgacctcgtgattcacccaccttggtctcccaaagtgctgggattacaggtatragccacggcacctggccaggttttctattagttttaaaagttaagcaggaggagagccagaagacaatttcaattctctgttcataagttttcacttcttttttctgctagaactattaagttcacagggctcagacagagacttgaggactcttacagttattgattgtgactgcacaagatgagggtaatgtttatttgtcattataaatctggaaagataaaccctgtgctttccctgttaaggggctggataggaatacgtgttcagcaagtcagtaaaaaaaaaaaaaaaaaattgtatattttgaaagttgattccaagtccaaatcttggaaacagagatctctgtttttgcgtttgttcttttcctttgttctagtccctcattgcaaagatatttgttgtcatatggttctgatcctgcttgttacaagtttcccaattctcaatactgcatctttttcctttaagagtgtccctctagttgtgaaatagcatcattaggaaatcctaggtacaccagagaggagggggaaaatatttttaaagggagcctggagagggatggattggagaaccaaaattctcggcccatttggtttatttgattcaccaaccacacccagacagaaatcaaatataatttggtaatatttttatgaactaagtctgtgacaattgaattcacagctaagatatattctcatgaaagacaacrtaatttcttgagtatgaaatgcctgtgacttaaagcaagcaatttaaattctttattgtttttcaaatgaaactctgaaatgaaataggagtatgacgtcctacttggatgattgtttctgccttttttgagggagaaaaatagcaagttagtgcttttcaacgtttttaaatgtcattaaaagattttggaggaattcttcatgcttaaaacacctgtgtgaagtctagattcatttttctaggggaatcaggcatcgtacttttcaggagcctttgcgtatttcaaacaaatagattrataggatagaatcagcaacttcagttgctttcttcccaaggattcagtttctctcttcccaaggatttaaactggagttgtaaccgaagccattagtagtgccagcaaggattttggtcaaagtgtttgaggcattcatgttcaggtttctgtccaaagactgtgttgatgaatgagcccaacacggctatgtaaagttcaagaacaaaaagaaattatgtccttcacagcaagtttacttttcttctaggatttcagagcaaacacattgccctctctccacctattttccggaacaagtatttgctttccccactaccctcgtcagacaaacactgcagcttgggacagaagtgtgcctccatttggaaaccatagaacaaccccagctgctattcattaatgataggggacccaatcgctagttgtaaacatgctacagaaaaaatatgatcaattctaagagacatgctttaaatgagacactgtagtggtaagctgtaagagaactgatagatcactattctaccttaaaagagattgatacaaatgattgctaggctttgttaaaaaaactagcttttctttttgaaagctattagtcactctgaagaactggattcaagatattatctgtcttgtttcaggcttttatttcaaagaataagtttatattttggttacttatgttaaggatggaattaaagtgagttgtgtgctgcagcttcsttttagccagtgtggtggtgattttgtgaatttgtgatagcgtggggcccccaggctgaagccagtagtgagacagcaagtgttcaggtatttcagtcagcaacctagggagcagagctcttcagaaatgaataagcaggattgcgaaaatatccctagctgggcccagcctgaaggaaatgtttaaataccaatatctctttggccgtcttagaggcctcccaagaacaaaaataaaggaaactaagggcatgttttattgactattggaataatcaggtttttagcrataacatgtagaatatagtaagaaaaaaacttacgtcaaatagtagaataaacataaaaagtccaaagaggattattcttcaagtctattgctgtttcaattcagttagagttgaataatggcatctctggcagccataagtgttttctattattagcagtgttaccatatactatcctgacattactaaagtaataacaccttgcctaggagttcttgaatttgaaaaaaaaaaaaaagcctttaagccaaacagcacttgtaactataatgctaaatgaagataattgagctacttcaatcatgcactcaagatattaataataaacctgtcttttaaaaataacaatttacaaataagaatctttgtgtgacttaacattgcatgtctaatatattttcagttttctttagttgacttatggtgacaccaacttacccataaagaatgtctttagtacctatacctgctgaaaaaaaatactgtgaaggtttgaattatattccttacacataaattatattattctgcttcaacttgctgcattcaaagggaaactatttactggcatgtgtaattaattttaattaacacacagcctcagcaaagggaaccgacatggtacaagccttggtagaaaatgttagtcacactctgcagctaactctgagcagatgcatagtttcatgaagaaaatatttgcaacgtctaactgtagcgagtttttctcctttctttctttttctaattttgaaactgcctgtgtttatttcttagaatctgaaaaaaaaaagtactgtgggtataaaggaacagtttcaaaaaatgcagttgcagagagtagttttgactattcaaacaagtaactgcctttgctctcagtgtgtgttaaatccacacctcactgaaatcttttataggtaagagtatgagtgatatgtgttatactaccagatattagcctaaactctttttaatattataaaatgattttgcttcagaaaataaataagttgctctatcatcactgtactaaggaggactccttttcactcttaaaaattgttgaagaccacaaagagcttttgtttatgtggactgtgtgtggattatatcaggaatattgtgagttggttgacttcacattgttgtttgaaactggccatagtgagagtatttataccagaaaactagcaaatgctaaaatcatagcttctcctttttctagaaagtctgttgataagcttttatcagcacaccaccaattatatttattgttagaaattaaaaatgaggttttaaaaatattcatttatttaaaactaaccctaataaacccattttatgttaacataaattatatgttttactttaaaaattattgaaaagagtggcttttttttacagttttgcaaatcttcttaatgtgtagtttaacagaagacagctggatacccatatctgcttctgctttcaatctgttacaatatgttgttttggttgaaatcaatgatgaaaacctggcctcacacagatgtgtagaaaatggaagagtattttaatagccttttaaaattgtggatcttcttctttgatattccaccaaaactcgacaagtaattgtttcttaaaagttaattgcaatgagggatctgaaatcatatcaatgagctttctatattctgctacactgattcattggtctatcatgcactttaaatggatcttttacttatgaatgattttgtaacatcatacatttgtcatttggaaaacattggttcactgatttacacagatcttccaaatgtttatacatttcattctacaatgcttaaaaatcacattcattaatatccaccaatcttatcagaaaaagggaaggtgtcaatgacgcccatggtgatagatatgagttttccaaaactctaacacaaaaatttatcattggccacaaatagtgtcagttgttttcctttaaatgacaggctwattttgtttatttttgagaaaatatctgccaaaaactgaagttttagtaacgatagattgttagccagtttttcaagtaaaaayggaatcccatgaaaaacagcatctgcttcaccttacaactgctttgcttgagacaagcacttcaggatacagcagaagtgcttgtgtgtacttcttattttgtgacatggaatattaaaatttaatctctagaaaatattcacttataattaatacataattattatctagaatatatgaatctaaattaaaatttaatctttggatataatagaattaatatttttaactgcttcatcaggatatccttaagtgaaacttgctttttttaaaactgtgatgacatagcagtgaaggctacaatgaccatcagtcagtacctcattgtgatgttgccttggtttatgctagggcacccacccttgcctttgcaccatcagtgcaatgttaatatatttgttgctccataaaccatgaaattaaagtgattctacactttggctatttcagtaatacttgtgttcattgataagaattcatttaaatgaatatctttgaggattagttagtactgataccagacaaatagaatcaaaacaagtgtcattctttagacttgtccattttasggcaaaagtataattctgcagattagagttctaaactcatgtttcatggcagcaactaaatatttaattagacaaattaactctgtcattttaaaattatagtcatttctttttcttgacttctgttatccagtagacattcagcaatgccaactgtacaaaagcttttagactctcagctagtgtgcacttctccagctaatgcagcacaatgatttatcctawaaaatgcttcaaggactttttcacttctagtttgaaaagccctaacaaacaatattgggcttacaaagaacatacctatgtctaaaatattttattcttttttctttaaatgttcaatgattcatctcaaaatgargctgtaacttaagtggcattaaaatgctattcaagtgttcaattgcaaaagacaataggtaaattatatacatatgttaaaaaataagagaaagctttatttgtagttttaattttttgttatttatagttttgtcctgtttctttgcattagatgccttccttctaggagtcagagcactaactctgacatgtcagtcttatcttcttcaatatctttagatgtagctgttgcagctagggttgagaaagtttctcttcaaatctcccttttttaagccaatgagccatccttaaacataaggaaaatacattttcttttattttagaactactaaatcctaaaataatacattttagataaaaattttaaaactacaagttttgtaaattaaagcattgcaaaacaagacaaaaagatatacttacttcttgttgtgtctgtacataggcccaagggaaactttaggatttcaaaatcacaatgtattggatgataatgaggttaacaaagattatagcaagcataaacaaaaataattattaagggtgtggtagaagcactgagaacaaatgagttaatctcagaaaatgcacatactctctttcaaatttctagtacacaactttactttccattaattgccaggtaataacatcatcacatcatgtccctttttgataaacttctctgtatattcataacagaatgaaagtgaaaaaagcaaactagtattatgacaatggttttgatctggagaaacatctgaaaggatcttggggactcctgaaagagtcctgtgtaccccagtagtccccagataatactttgaggactattgtgaaatggcagttatgcaatacgtgatataatgattcagtggtgtcacatcagcttaagctgtattttcatgcaatggggggtgtgcttattgcataagtaagtctgttggatgtttctcttacttgtgaagaatcaatattacattgattgccaaatttgatttttcaagtcccctacacactgtcgtaaagcagatggtaaagacagaatacctctgaaaagtcaaactcatgtcagctaaattgatagatttatcttagcatcgaaagccatgtcactcagtcccctcctactcaaccccaatataaaaaccgaaacagtgatggaatttccagagcatttgtttactccctttaactaccattgctctttgctgagtgatgatgcagggcagatggtgtcagggagagaaatcatcaactagctcaggattgaaagsggatgaagatgctrgaaatgtgttgatgtttgagaaggatgtgtggaaatgaagaagtgactaaagaggacagccttatcaccaacaacataagcatatcccttgctctttaattytgccccagagggaaaggaacagggcttcagtctcaaatgagagagccacttttctagtctggggtaaagatatcatgcatacctttccttccttcccctccactgtgatagatytgagaagtgatgaaagccaagaaatattgagctgttggattttttttactaaatgctatgtatgccaagggttatttgcttaatatccttcatcttggatcaaaatggtgagaaatttaaaaccgagaatttccctgaaacactggtttttaaaccttctctagtgaaggttttttttttttttttwaattttcaattacttgcaratcaatgcaaggtcctattgcacgcctgagcagtttgcaacttgcatggcatgagactcaccttatgagttcagcagcactcaaactggtctaaacacttgaacaagacagactagtccactgatcagggcttggatgtcatagcagtgtcaaattgctacaagggcttccaactgcttactctttgtttctgtatttttgtcattatacactagtaaacaagcagttctgggacctgaagcaatgctctgttattggccatcacaaatgtaaggttgaatttgccacatgcactgtctagtcaaggttaattattcctagacaactatgacttgccatctgtgtagctgttgctagatgcacaagtagaattagttatggtagtgtgggctcatcaggtagaaccattcaaagtgtatatcacttatatctcatagattagaacacatggtccagatacttattaaattattggatagatcaaattwccattaactatacctctaacacagaggctatcatctgtgtgaatatacagatgatagaacatacagaacaagaacatgcaggctcaatatttgtcactaaagttattttatcattaattattttcaacataatctaattttcttctacaatctggaaaatatttggattttttggcatgctgcatgtctgcttctttatagtgccttctttcaaatacctgaatcataaatgaagaaaaaaaaacttgagaaagatacagttgttgacatttyaaccttcttgctcttttcaaaaccaccttacctgctaacttctgttgcctctccccaccagagatgattattaattttttctttcacatggctcaactggtctgacactcttggaaaacaaatatttgtttccagcccatggaaacacacatagtgtactcaagccagaagttctgagaaagcacactgtcaggtgctgctactcctttggagaacctggctcccatgaaaacatctgaaatatagttccgtaacatcatctattattaaaagataatttttattgccttgaaatttctccttgaagagtatttccttactgaagtgttttatgtttaacttgtcaaaaattaaggaaggcatgaaagttgccttatggaactgaaggactcgcattctgcgttgtctttccagaggactgaattagtaatgtgtaaaagtggctcagaaaaagatatcagcatatcatcaggaagaggtttttaatactcttaagattttatgtattacatatatagtatatatttttagtatagctttttaaaaatagaatgggcaacttgtgagttagcaagcctccccccatttccagagcactttagcagaagctagataacaacttattggtagggtgtcctaatttatcatcactcttgagagtaaaaggggacagtattaataattagtgtgggacagcacttggcaataaactgggactgtctgggcaaaaagaaacaaatggtaaatcctacctgtgaatgatgtcatagaagagagtcctgcctgatgggggaatttggcttaggtgacccctatagtatatactcacttgactattttctgcactaccatttcctcataactttttccgataacttattttgctaatattctctaaacaggaagaagtttgaaatgcattattaaggattagattttaaattatgtttaggaagatttatgtgtaaattgtgttataattcttttaaatcctgtaacacaaattagcttgtaataatcacagaaaaaaaatcttaatgtgtgtgtgtgtgtgtgtgtgtgtgtgtataggactatgttccagctggccttattgagtgagtgttcttgttaattataaaccagtcttgagtgtgataccactgtttattattgataccttcaacctgcttctgagattcttcttatgagttagagtatccccagaatcctaaatggggaacctcacttccatattmgataagctgatgtcaattacaataaagagtatgagaattataagttagacaaaaggcaagatagttcctttgagaggaaagcatgccttacaactctatgagttgtttggaaagttaagtatttgtgacaataatgaatgaataagtacatatttaagctttcaaatagccattgacaaaaatctgaatcatggtggaattcaaaaaaagttcattatgttttctttaaaaaaatatgtggctagaaaactgtctctgagaaagattaagggtagaaattattcaacctataagtgctttattgagcatctgttatgtattaggctctgaggtaggagctaatgggtacaaaaatggtccttgtcctctgcattcatgactctagtagtgtattggaaagagatggatatttctgttaatgatatagtataacaaatgagatttctcatgatcctaattttctagatttctaggactctaamcagccttaacgtttgtataagtaatcagaaatactttgcaaaaactcatattttgcagatcaggctcacttgggtagtgaaaagacaatctttagaggatttcacagcgttttagtagtgagcaggaaaatggcagactaattgaaatgtggaaaaacctgaggtgtcatgtaaatttakaggaaaatggtccaaactgtagtcatagattcttggagtctgatcaaaggcagtgagtgtaggagtctctgtagactagttctgaaagtatctatgcaatgtgttgatgtggtcaagtagacatcatcaagaatagaaaacacactactgatgtacaaaattatggtgttttataacctaacacattatatattaaaaagttgccagtcaattgcaaaaaaaggtgtaatataaccagaaaagattctgtaaataataattaaaataattgatgaggtaagagaattatcttttatgaaaatagcraaagcattaggattcttcattatgaaaagatgagatgtgttttcaagtgttaatgtcattgaattatgtgactgtgattttcccccaaattgaaaactactagaataagaagccttgaataaaaaaatataggctgcactgaagttctgtcaattatattcctaatagattacattagccctgagaggtggtacagatacttcccaaacaatttatataaaattatgactgcataaaaaattagtctgttcctaaaggaaakcatctctgaaagcatctctcagctcagagattcattgcaaggaaaacctctctgcctttcctgatgttttctgttatataaatacagttgaagtgaacacttggtttgacccataattctactttttttgtattctgttcaaggtacaagagaatcaaaatgacaaagcacttatgaagaatgcgccagtctattttccttaggtgtataaatagctatggttttttttctgcccaaagtcaatatttcaagtattttcttactttastaatgctgtcacaactcatcatttatagccccttcaaagggccattagtgtttcacaatatgtaatgcaggggtgcccaatcttttggtttccctggccacattggaagaagaattgtcttgggccacacataaaatacactaaaactaacaatagctgatgagctaaaaaaaattgcaagaaaacctcacaatgttttaagaaagtttacgaattcatgttggaccacatccaaagccatcctgggcctcatgcagccgtgggccacaggttggacaagtttgaattgtaacaaatgtagtcaccttcagggaagcactcactatacattttttgccatgccactggggagaaggcaagtgtgtgattcactagccctttagctcataaacatccctgctgtgtcctgccttcagttaaaaatcaggaatatcagcatgtgacttgttgcataagtatacaaactcagccagtgtctcattgtaccatttacttcactgcctctaaagttctgtggcatttccataacaaaccccagcacatgctgactagagaagaaccccagcagaccacagtgattgacttaatttggaggttaaaatgttctttctctggtagtttctattatcactgcgacttttcccgggacacaagatcagtctscccatgcttaacccagaggagttaggccagttttctgttgctgaaattcactttgcttattttcactagcaaactggtttcataagcataatcttgccagactgtatgtcatttttctccctttattgtaggaaatgattgagtgtgtgtgttgaggaaasgattgatgctttgccacctttggagggagcaattattttgtgagaaagcttgagaataattaatttatgttggattgaaaaataattggaagcatttttcagttccttttaatacacagattcttatagtaaaagcatattcatttgaaatacacaaactttagaaaactatttaattgagtagatttggatagtggactattgtrccccaaaaagggtctcttatgtctatacatttgcacagaatactagtgtatgggtgtttgcacttgaataattcccaaattggcacaaattaattagcaaatgcatgtgcttggttcttttacattgctgttgtcaatatcatcaatcttgatttccagcaagatcctgaacaccttagtcacgaattttatcgtgaaaatgttaagtgcgcttgttccatctatatgctgttgaccctaaaggtacacatccaactctgattactcttctgggcttcaaatctatatccaggcttcttcctaccaaccccagcttaaaattaaactcttggtctttccacccagacatgctcctccaatctcccagttgctcatgctggaaacttaaacatcaccttggatttttctcttgccttcactttccgcacccagtttctcagaaacatatgatggctctgccttggatatatatttagaattcagcctcttctttcttaccccttggcctcatcggcctagtcatctctttgactttggcagtagcctcctccttgctgttgtcatcctgcagttagtgtgttcttcatgcagcaaccagagtggtattttttaaaaaatagatcagatcctatcagacccctctgcttaaagtccgtgtatttttccatcaagctgacaaaaaaattcraatttatcatggcctatgagcccctccattgtctggcttctggctccttctctgaactcatttctgagtctccgcattgttcaccctgctccagtgatactggcctccttactgcttcttgaatatgttgagcttgttcctgtctgagggcctttgcattcaccaggaatattctttcccagaaactcccgtgagtcatgccccaccccctcagttcatgtctgttttcaaatgccaccacctcattttctgaccaccctatctaaagaggcaccttcatcactctgttcttttatcctgctctattttgttcatgacacttattactttttgatatttttattcattgttgtttgctttgtcttctccattttagtataagttcagtgaaggcaaaaatttaatcttttttaaaaaatttattcactgctctatcctgagggcctagaacactgcctagcatatggtagttattcaggaatgaaggaatgaatgagcatgtgagtgaatacatgttagtcttgattatgaatatgctacagcttacttcttactggattttttctctcagttttaagcttcaaccgatttatttaatgataactacatgttttgtgaggatataaaaatggtactgaataattacatggcactttgtactttacattctgcttttacatacattgttttattgtgttaaatgtttaagaaatcatccaaagaaattccaggctagtaatacaaagacaaaaagaaaaacatttatgaaaatcttataaggagcatcactgaaactcaaattcatgaaaattaatagtatccagattttagaaatacacacatgcatgcatacatgcacacacagagtgagagatgaaaggaatggttcaagccaagcatcaataattaagttatcctgaaatattgtaaatgggtgaaaggactagataaaagtggcattccacatctggagattggaatatgggaagtcatggtcagagacagacaattatgttcaaggaacagcaagttttgctttgatggaaagagactctttataactggaagttatgaaaaactaaatgtgataatattgtgtgtgtgtgtgtgtgtgtgtgtatgtgtgataatggagagagtgtgatagcagaattaaattgtgggaagttttaaagctatagaacaagacactcctccagattttcagaagagaactgacagaagtatagagaaggatatactacttaatgaaatacagagtggattgaaaggaggtaaggtaagacacggaaaggaactgaggagattgctgaaatgtttcaagagatggaaaaatgacagagttccagatgaactctacacttgaaatcgatttctttctccatggttcacaaatgaatcatcacaatggcaatctcaagatgagagtaaccaggaaaatcctaccccaatggagattaagtaatctgtgagctgacacccccattttccccaacataagcattcttgagccatatggagctctaatagaaggaaacacatttcctggatcagctctttgcctctacaaagtagcttagagcccaaattattgatatatataatttagtactataagttacttaatagctgtcgtatttaatataagtaattattgttactttttaaaatataccaatgaacttgatcttaggattttttttcagtgactcgagctggtttgcagaccccactccataattatagacttctgttcttaaatgttagcttctttgtttggcagtattatacttgtttctttctcactgagataaatgttcctaacaaaaagagataataaatgttttgggtgrtggatagtccggttacactgatttgatcattatacattgaatactygtatcaaaatatcacagtaccccataaatatgtataactcttatgtatttacaaaaattaaaaaagaaaaatctaacatataatttttggtcctcccaattctttgctctgaaatttctaaattatataacattggcattgaaagagaccaagagatgtcatatcccacctgtaggcaagaccatatctaaaatacattagcaagatgaaaagctattgcagtacttgcttctaagactgcttagcccagtgtttccaccaaactcagggcagagctatggaggagctgaagtttgtgttttgtcttgtccgttgctcatcctcgccgctcattctgtctacctccttctttgatcttcctttctcagttaattacatcatctggaaatatggccttgtgaactawtcactttctccaggaacatttccattttaataataatcactaccagtcaccatgctaaatgctttgcatgcattatttcaaattcttaaaacaaccctcttartactatccccatttaacaacaaagaaattgagtccccgagaacttaagtaacttggttcaaagtcacagactagcacacataattaacaagtatcagggtttgaatttctctatctgattgcaatgtctacattccttccatcacatcatactaattcttatagaaacctaaagccctcaagacttaaaaaaatgaaatttccagaagcttacttaactagctggtgaaaaatttgataaggggataaggatattccagatgggatatctctgtttatctactccacatatttaaaagtcagtctgactttatctgtgtcaggaagcaccttttgttaaaccactgtgatgctgggcttaactctacttggagagagtcttaggttccttgtttgtcagtatagttcatcagtcttctttggcaactataccccagtggacatccacatgtgttcctcataagagaagaaaagtacagtccttcagttcaggcacatggacagcttatgtgactgtcttaggcttcaggctttacctttgggtgggacatatttttatgcccacacagttccatcaagtagcatcgcatcaacttgcacctgttttactccagaacttcttcctttccaggttccagccatcttagagcgttgctagttactgacaatcaggcagatctgattgtcagaggcttctttgcattatcagaaaattatccttcatatccttgtgccacattgtcagtttcttctcatttttttcctcaatggcaatggctaaaacrccaggggctccatattgcttcagacagtacttcatctgctgctgtcatcttgcagatatcttcccttggccttttagcctcatctctcttctctttagtcactttggaggctttctccagctccttcccactgtgccccacctctttatttagttcctagaactggacacagtggttggcaggacttgaccaacacagggcacaagacagcagttaccttatattctttcttgtggctaatttctccattgccatttcctgaagccttttcagtcattcctcaagtatattcattcctatagaaaaccaagtcaggctgggcatggtggctcacacctgtaatcccatcactttgggaggccaaggtgggcagatcatgaggtcaagagatcaagaccatcctggccaagatgctgaaacgccgtctctactaaaaatgcaaaaattaggcaggcgtggtggcaggcacttgtagtcccagctacccrggaggctgaggcaggaaaatcgcttgaaaccaggaggcggaggttgcagtgagctgagatcatgccactgcactccagcctgggtgatagagtgagactccatctcaaaaaaaaaaaaaaaaaaaaraaagaaagaaagaaagaaaaccaagtcaatgttgattttattgagatgtaagagggttatattctaaatttagcagggaagaggcagatttccctmggaaagtgctatgttgtctccttcctcagctaagtttttataaaaggttgcctttgggttttcgttgtggttaaaaatgtgcaattgcttgttttgcaataggttttgttctgtgttgctacaattttctcttttatatattgtttttgcttacaattaaatccaggaaaatgtggaagaaaaagaagtgaaataatctcacagctgctacgttttcctggaaggcaaagacacctccattttaaagttagttttaaaacatgaaatcattgttctttgaaacagccatctggtcaaagacccctttgtagagtacatttttaaacaacaatttttaaaaaccactaggagctttgtaaatattttctttatctgggttatgaattattttcagccttttgagtaattgttaaaatgatgaaacttactggaataaaacagatgtctgttttttgttttgtttttaggggaaagaggaaaatgtcattgggatattgagatttacttggtaccttgacagtgaaatctgaataaatggttgttagtgtccttcttagcaatccatttaycatccttttttttctctctgtaatgccagaatataagcttcatgagaayagcaaccttatctctgttcatcgctatgtacccctaagggcctagcacaatgcctggcacatagcttctcaagacatgtttatmaaacaaataaatcaagaaatgaataccataggaacattatacagaaygacttttcatgtaatcagttacataattcatttgtccttccattttcttctacagagacacttggcatggaagtctcccttaatagaaactttcaggttgaagatatgcctaaaaattgctaccgtttttactagtccattacggttctcttatccatgatttttatgtaaatcaactctaaattgtttatacttttaccacctctgaggacaataaatcccacaaatagaagggagttatggttcaactcaatggatgtataagtaaggcattaagtgaatacagagggagaataatttatgcaattattgctaagtgggctagactcagaggaaggaatattccagttgaggctgtaagggtgagtagaaatttaccaggtggtgaagcagtcaggggaatagaggcaacaatgcatgaaaagtcytaaagggatgaagggcatgccatacagtccctcacctcaggaccatcaccagcactgtcatcatctgtctgctgaaatatcactcatgcaaaacacaggctgccactgaagtgcatgattttttaaaattgagaatgatattttttctttgaagagtcggttatatccattattttaaaaactgtcagttcacctgaaacagcctccccaaacraatcactctatagccaagcctcatggagaccaggtttttaccaactttttgcagcaagactacttatgtggcccaractttgggccatgaataattttgtgcaaaactcaccccatcccaatctcactgaatgttagcagtggggtgctgcagagtctgaatgaaggtggcggtggtgttggtgatttccctgggtggggccaggggacacagcatcttgggcccaagcacatcttaggcaaccctatccgcaaaggcccaaacttcccagatgcatccaagacatctttttgaagcctcagacagagcagtagtatgaagacctatttttccatgtaataaaggctcatataaaacttttcaaaatcarttcaaggaactcactttgatatgacttgacatgaatttaaataacaacaataataataccaagaggtaataatttagaaataatttgaaagccgagttttgtggggaaccattacataaaaccattggcaccatgatcctaccactctcattcttctgaaattttcctccacccttttctgtttcacagtatcttaatgttgataaactaacacagacagccccaacgcagtcccaggctcttagagctcgcatctaactccctctgggtgtttgtgggataacatgaatctgcaactgtccatatgatttcacgattgttgttttttggcttcttgacctacgttatgccttctgggataagatgctgcttgccttgcattgatagttcctcaaagatcttattttttagaacttttaaagtgagttatttatatatatatatatatactattatcatttagtcattaactcaaatgaaagatcccacacagagtaatttttatacatagtaaatatggaaggaagaggccaagctagcacagactgggcagcaatttttcctgtcatgtgaaaagtcatggcatgggtggaccaatggcctctctctctatttattcctctgatttcagaaatgctgagtttcagcaggctattaccatatattctgacctaataaatgagacagactgagaataattgtggttctctctgctttcttcaccagttccttttattccattccactcctttcattgctttgcgctaaatgaaatttggattgcaacaacaactttttaaaaatgacattgtaatattggctaatttgcctggtattggttatgcccaagtagacacatgacctgtggctgtttggcttgtccccctatgggaaaatagtttaatgaagctaatacgttgtactaaaataaaataaattcacatggcacccagcatcacagccacaagcaacatggttattatttattaccctgagacaccagccccacatctccaactgcctactgggcattttcactgtgagggccttctgtcgcttcctctttaatccatctggaaccaaaaccatcaccctcctttcaaagccatgcctcactattggagttttagggggccaattaatcataccagttacttcccctgtctagttaaaattgttgctgttgctgtttttagaagcagtacacaaaaagcaaacagataaggcatgaaacaaatagatccagatctgtggccaaatgtcttgctcatacttcaactcccagtaatcacaaccacagctgagcaaccacagacctctaccagagggcagagctcaycagaacatcttggaataggagagaaatgcctgtgtcctgcaggcacgtcttgctcaatttctcctttatagctcaccagtcaaatcagccagtcctcctcttttgaggggaagaaaatgaaggctaaggaaaaggggccaagagctgaagtcccttcaagaggccaggagatcaagttcccactaactcatcactcccgcattttctatttttgtttagatattttctttgtttatatgacatcaaattattttagcatttggggatgagaaaaaatagttagatattaaacatcctatattgtgagaggtttctaccatttaaattgtaatctattttctttatgacctttttcaccataaataagacccccacagttataaccaaaattcacactttcagctcattacttgttactgtgattaatgctgacaaggacctggcaccatggccattggcagccagagaaggtcaggactagtggtgactcagctgactctgcagctgcacttacagtaaatgtgttttgcaatgctcttatatttaaaaatattttctacaaatttttaattcttatttaattttctattcatgttttattatcatttrctctttgctatatcaagagaaggaaataacagatcaaatatcaaatcaactgaggtccaaaaaactcgtccctttggcaatgaatcatggtactttgagacaayaggcaacggtcaacctccaatttgaatggttgttgcattgatctttgaggatgctatagaaagataaggaaaaaagtatttataatatatataaaatatatatatatatacacatgcacacacacacacacacacacacacatatattttttgagacaagatcttgctctgttgccaggctgtggtacagtggcactatcacagcttatttgcagcctctaactcctgggctcaagccatcctcctgcctcagcctcccaaagtgataggattacatgagccactgtgtctgaccaaggaaaagtattttaaataaatgagggatactaagctaattcaaccattggcgaacactttattctgtcatgcattcattgcaaattattaccaaacaccagcgctgtgcttaggttctaagaggaacatgtcccmtattctcatggaattcacagtatagtgagagaggctgataacaaacagtaattacttaatcacaactgctaattacaactactgtgagaatttataatacagtgacctgtccatttggggatttcagggaatggtcaaaactaacactagaagaatgcatagaaatagattaggtgaagggagaaggggagattgttccaggcagagtgaacagcatatgccaagaccctgaggtagggagaagctttgtgtgttcatggaactgatagctggagcctgatgggcaagaatcaggggccagatcatttatgatcctacaggccatgttagggttgctttgttggtctttaatgcagcagggaaccactgaaggggagtaatgtggttcagtttggctgcagaatggagagtagagaggaacaagtgcaggagttgggtttttgtaatacagataagaggtgatgacatcctggactagaaagatggaatagaggaataaatgggagctattaactggctacgttgacagaactgactgattggaaatgaggtaggggagaaagagatgtcgtgaatgacacctaggcatctggcacaagcatctctttggaagaagctgccatttactagtaggagggaactttaggggaagagaagatttgggagcacatccagatttcaaaatctgagatatcaagagagcaactgtagctcagagatgtctggcatttattagcggtcagtttatatatagtactaaatgcaagtagtctcttagtatttctcatagaaagttatcttaggaaaaaatcctagctggtagtaatgcctgggtctttaaatttttcattaagttccgtttcctaatatatatttttaggagtttcacatttctattcatgrgtgagattggtttaaagcgatatattgaaaagtttgttccttttaatactagccccaggagaagctcaagggggaaaaaaagattcaaaggtgaagtaagcttgggaagtcctgtatagcctattcatttcttggagatttaaaatatgtattagactattataatttctgagaggttctgaataaaagaagcttactcttaaaatctagggaaaaaggtatataaaactctctgaagccagaactattgtggagaaaatttttaaatttttttccaatttatcctgtagatactggtcagatgggattttattattttggtgttatatttcctatatgtaacatccataattgatacaaatttactatcataaaagcatacttagaatctcttaagataatttaatcttttgtctgttaactatatgtcgtctcatttctaattttgttttctcatcttttatattacagaattctgttttattgtctgattcattagagaagaaactcctaaatgtaacaataacatatttggttctccacattaattcttgactttataaaatattatattcttctttgcttcgttttataattttccaacttgctcaatttaatgctgacaatctattttttgtttctttttaataataaagtgtacctgattgtgattttgtctctgaatagagttttggttgcatgttctaagtttcaatactgtgtgtaaggttgtttagtaaacagtgtgtaattatacttttgagttactatttgacaaaaatttgcatggagttttaatttatctgaagtggttttgttgttctttcctatttaacttttatcataatttgtagttttattgtactgttgggttttctttaactgtagatatgtgaaatcagcaatattatctgtaaggtaaaagacaatttatagtcctaatttattaaatttatattattgacatcataggtttgatgattaatttgtgatamtgtaagatctttgtgtcattaatttattgtcaataatctttgaagaactttgaatgctgagaaaatactggtgagactagtcagtcaacaaatattaatgagcacctactatataacataaatgctaggaatatattggtgaacatttaaagctccatcaatggacttgtgctgtagttagatgaggcagcagatagttaacatacctaattttacatacagataattgttatgatgaaaacggaataatgaaaagagtaagaatgggtgaagggtggcaggattttagctagaggggttaggggaggcttctctaggggatattagtggattatcaatgtgaatgagatagaatatcatttccagcaaaaggattggcgcctgcaaaatcccaaggaagaaacatgcttggcatatttaagaaactgcaaataaaaaggccaatgtggctggagcagaatgaggatgggaagaatgaaaatgcacatttgaaacagaggaggaaaatgagggggcaagaagtccagacctttttccactcgccgtgagaagtgactggaggatagtaaacagggtggtgataaaatatacaatctctgtggcttctttgtggcgagtggagcaagaaaaccatcaagaagatgttataagttgtgataatcatcccaatgagagaagatagtgacttggatatgggaatctgtaggtcaggggagagatctgaactaagccacctttaaatgatatgaaaggccaccatactgggaagattaccactggagaaattgagagtgaagtaggccatgagagaaccctgggacacccccagaatttaaaggcctttaagaggaagacgagacaaaaagagattaagaagctgtagtcagtgaggtagcagtgtgggagtcagscgggtgtgatatcacagaagcctggaggagaaggtgtttgaggacagagtggggagtggtcaacaaatgctacagtaaagccaagtaatgtgaaaacagggaattgacaatttgtttgggcaagatgtagatcacatgaccgtgaaaagcgctgtatctatagagtagcaggattacagccctcacttgggtggactgaggaaagaataaagagggagagaatggaaaaataattcaagataactcaaggagttttgctataaaggcaaatagaaatggggcagttattgggagtgaagaaaggtctagagaaagtgtgtgtgtgtgcacacgcatacatgtgcgtgtgtacacgtgtgcacgcctgttttcagatggctgcttttaaggcatgctagtatacaatatgaatgatccaagcagttgaaaggaagaaactgtataaaaggaaygaacacagggtggaagttcatgcggaccttaggagagacaggaccccatgtctcagytgaaggtttggccttccattatacaagataaaggcagaatctgtggttgcaaatgtaggtagtctcatggatttgttggaaagaagatggattattcttatctgattatgtattttttcactgtgaagtatgaagcaagattctccattaagtatgagtgaagggtatattagagatttgagggaagaaaatgtatgtagtagtaatcatctggtaaagtgagaaagcatatttactacagaattgtagtaaggatgtctggaaaggctgggtacccatttgatagttgtagttataaatctgaagtgagtgcagtcagcacagttgtatagttttggtcttgcatgatttggcaatctggatacagggtctgagtaagaaagtaatttgactggagttttaataaaactggtaatgacataggactatgatgttagtctgaatatgcagataatgtaaaacaggaagaaatatgaatatattttttgccagaatcaggattcagacatctgagcaaactagaaggatgggcccagactaacacaatgaaatataataatgctaaacaaaatttacttttatattttaaaaagactatatgcattcagtataggagaggcctggttttataggaggtcacgtgcrcaggacctaaaggcagtggaaataataaatgataaaagtgtttgaattttgtatatttttcttatatatttaccttatstttggcattgtgttaagcaagctcttcacatatataatccatttttcattataataagcctcaagttgatattataatccccattttataggtaggttaacagattcagaaaggttgcctcakgcartgtcacataagataataaatggcacaaaatggatttgagcaggtgttcatggtctttaatatatcctgaattttactcatcttacattagcaaatatttattgtccagaaaacaggcaaaagttccaccaatatcttttcttgcatctggagatttgtgatcagctgctggcatctcagtttctgaaaatccttttaaaatagaacaaatgcataggagagctaaaaggatgttgcattaattagaaacctattcatatgggaaacacttgaaaatattggctgaagggttggcttagagaatagaagacttcacacacacacacacacacacacrcacgcgcgtgcgtatattccttacacgcaactattaagttggtgcaaaagtattgcggtttttgcaaaaactgccattacttttgcattaacctaatatgtggtttgtgaaaatgtttatcaagtcatggtttcataaattatacccattttaaattcactagacaagtttactatttaaaaaaatgtggaatgcatctgttggaaacatacatttaagaycctcccaaaaartgactaattaacmtatkaaaaaaagttttcatttcactggcaaccagaaattgtaaaataaaacagccatccagatatcatgattgggctttcagaataggagacgtgagaaaggtcatgataggtggtaatgaggaagctgtcctcctcatgtaatacatgtggccgactgtgcgtgtagcctccctggaggccagtttgggaatctgcattaaatgccttaattaggtgcaaaccatgtggcccagaaattccactcctaaaagtttatttttatcaaatgattcaataattgtgcaaaggaatttgttcaaagatgattttgaaacattgtttataattgccaacattcactatttaggctcagatgtttgaacagctgacataggtaagggaattaaactttggatttttaacacccaaaggtattcttatgaaatgttaaygaaagttacacatacagtcaaaacatggtctcatcatgmggtcctgttctcttyagtgtaacgcttaaaagccttttacstaaggcataaaatttctcatacttcttttttagcattgaagtgacttatttctttaaactaaaacacatagttcagcttggttgtaatagtggaattattcagaagctcatatctgcatgattgcagctgaaatagactaaacaaaaaaatgcagtcagtacaaattgctgtgggttatctatacagctacagcatgtggtgagaacctggaagcttcatcgacagaatttatgagacttccagtaaatcagctcagttcagtgttttagacctgtatccaactctccttggatgtctagacacagcctaagatgaggcttcgaaaatgggtaaaaatgaagcagccaaagccaccagaagcctttgaccctcttctaatgtttcaaccagataattattttccctctcaagaatttggctatcctttaagaggaaaaaaaaattaagattttccagtgaagagcccctgaaagaaaatactctggagaaaggtcagtgagaatgggccaaagctgaattcttcagatctattcagagaatgtggaaagtctgygccctctgctttctgtgccttccagctggccacgcgctcccatgacatttgtccagttctaccttccccatacctttacatagtaaaggaattcatactgtgcagtgggaagacctccaaatggaaacctaattgatagctaaaagctatggtagaaaggtaattagataatcaaaaactgatgaattttgattctgtcaagataatccatcactctttctgctctaaagcaaagatacaacttttgaaaatttccaacaataaactttcatgcwtggagaatatatttcttttaaatgtgtccctcttttaattgaaatgactcattctgcttgttttggtttatccttttaaacttgaatatcttaggttttctataaaaagtttagcatctggtcaaaaatgaaaaaggtggtttaaaaaataagcactgtccaagtttattccattgtgttttcattcatttatttgtccattttyttattcattcaacaagtgtttgttttatggaggctataaaccaaggattggggtagacccagattatgccacttattagttatgtgatcttgggaacaccctttaatatctctgaatttcagtttcctcatctgtgaaacagctttactaccaastttacaggattgctataaagagtaaatgagattatttatcttttaaaatggtaaaaagttaggccaggtgcagtggctcaaacctgtaatcccagcactttggaaggccaacacaggaggatcgtttgagctcacaagttcgagaccagcctagacaatctggcgaaaccccatttctacaaaaaataccaaaattagccaggctgggactgcaaggctgtagtcccrgctacttgggaagctgaggtggaaggatggtttgagcctgaaaggtggaggtggcagtgagccaagatcgcgccactgcactacagcctgggcaacagagccagactttgtctcaaaaaaaaaaaaaaaaaaagtaaaaagttrtaagtttcactttcccccttctctatttattatttattactataccccaaaagtcatacacaacaaagatggaaatcctcaaagacacagaaaagtagagatgtcagtcaaygtttgcaagactcatagattgaactggattgaaaatctatcagtgaccagtraatgctttgccctgattaagaaaaatgaggccaaacaagaagacaacccaaagaagcctctatgtttcttcwctacatcaacttgagaaacgtgggcactgtgacaaccagaaatccagasaggcaactttgaactataaggccaactcaaaaaaygaatccaagtaagaatttacaacrgggaagtccaggtagaagatgcctgatggtaaatatttattcaagataaacatgtagagttccatctaataaatgcttaaatataacaaaactgaatacaattaaaagaaggaaaagatgtgaaaaaattcagaaataatatgtcagtatttctagatagattagcaaatgtcatgaagaaagcagcagaaagtaaaagcttctaaattcttcaagaagtcagagattatttttgtattcctgaattgtatgtgtatatataaaatataygtatatatatayaaaagtgaattcaagaatgattttaaaaactgaaagataactgctgaaaaatatagaagccaaaaagccagcttatttgttaacaaaacaaaagaaacagtcagcatttaaaaacagcaaattgtatctcaaaatgataaaactaaggctaagcacacagtcatggcaagatataaacatgattgaaactttcctaatcaaaaatgatgattttctgattgagattaaaaccaaaacccaattatactgttgacatttataataggacttttaaaaagtaaaacaaatggaaaaaaatgtaaaartaaaagaagaaacaaagataggtcaggcaaatgcaaagaataagtgaaaagactttgaaatactatacaaaaatattgtattatatttttgtaatgaaatcagaacaaagaacttcatttctataaacatactaaaatactcaaagtccttagyaagcaaccattgatggagaatcacttttaagttataaaattagcaaacatactttaaagatgacagtcaatatttatgcrtatgagattcattactcaataaatatctatggaatacctactagtgctggtcactttgtgagaccttggggtacagtgtaatcaaatcaagtcatccaaatatcccttttaatttattagaggggttggagcagagccacagggcaacattcagttcactgccaagatgatgccagcattcagacaagtctctccaccaaagcactagttgtgtgattccttctggaccccttggcagatgattttgattgcaggctcaaaggccaaatggtctgtagccaaggcccttgggggactgggtcatttccaggtttgaacctgggagcaagcttggtggatcagccacctcagtgtcattcgatactctcaaaacaaccctcctatgtctagggcttcatcagtgtttcacaaactcctacctgaatcctgaggctcccagaaagagacttctgactatacagggatgtggaattcttgttgctgtaggggaatattagcaggtgaccttcttttccaccatcctggtgatgtcacacctccctttccaattataagggtttgtttcgtgctattcaataagatattatcatttccttaatttaaaaaaattcatttctatgtattttaaaggctctgctcctaatgtgaatggagtcttttcccatttcctaagttatttgtagtactgagaaaagcaattgatttgtatattttcatcttgcagttaatgttagccttttaaacatagcatcttggccgggcacagtggctcacgcctgtaatcctagcactttgggaggccaaggcggrctgaycacctgaggtcaggagttcgagactagcctggccaacaatgtgaaatcccatctagactaaagatgcaaaactcagctgggccttgtggyrtgttcctgtaatcacagctacttgggaggctgaggcaggagaatcgcttgaacctgggaggcggaggctccagtgagccaagatcatgccactgcactccagccggggcaacagagcaaaactccatctcaaaaaaaaaaaaaaaaaatagcatcttattaattttggtagtgttttgttaaatactaacacttggatttttcaattcttcttgagttaattttggtaatttgtatttttaaaggtattgttaatttattctagattcttaattttttgccatagggttgcatataatattttaattttttcaacctcttctatatttgtggtcattatcctattgtttctcatttgcaatcttgtatacttttgttttctcccatttccccccttaattaggattgtaagtgtattatctactggtaaagggaaaatacttstggatgtccttaacctctgttatttttatatttcctatttccttaattttggccttaatctgtgttaattctctttgttggtttattttattttttaaaaatcattttataatttatctagatgaataccaaccttcttttctaaatgatgagcatatttaaggttatacattttcctacagcctttgctcctttggatatgaagygtttatatctttattgctttctaaataatttttacttttggtttcttctgtcatacaaggtttatctgggagtatgtttctcacatttttcttttatacttttttattagaacttcatatgcctcagttgtatcttttctcattaattccacctgattgtacttttgatgtacatatttktgtctttctaaatctcagggaaagcttctttttaaaaaaatatgtcttttataattgtttttctccttctatcttccttttctttttttctggaactcctcttgttcacaagttagacattctgggtctttcctccacaccctcatcatttctgtccttttatatttttccacttctattagatcttcaaagctgctaattctagtctcaacaatgatcagcctttcttgctatttatctacttaatttttttwatttaaaaatctgactttttagttctaggaagtcttttttaatgctgttcgtgtgcctcttcaagtccttattttcttctgtcttctgctttccccaaaggttctccttcattgatggactgctgtgattgctttcctcattctttccctctctgactgttagcttctttaggtatcctttcaytttcatttgttcttcatggcacaagtccaactgctggacgctttaagtgggctggtcccacaagtgtgggaaggcacagatgtctcagttgtcatgggccagtaataggcactgctatgggagactcaggggagycttctgcattagagtagaaaaacttagcccctccacaccttcttaggaccagagrgtcaggcccacttaaaggtcctgcagtcatcaaagacagctygaccaagaatctgatgtttgctggttcttgtcctaaagctagaaagtgccacaacagatgtcttgctcacaccctgtctacctgagtaccactcccaatatctgcttgacttgagaaaagaggacctgtttgaactgagtaagaagtggagaggaaatggaacactcctaagccatcatcttcccggaatccccaggggatataatgttgaacataaaaatgatacatttctctttccattggagtttatgggctagttgagaaggtagacattaatgaaaatacataactaaatataaaagcaagagagaaagaaaaaaaggaaggacagaaagaagaaagaaagaaagagagagagagagagaaagamagagaaagaaagaaaggaaaagaaagaaggataaaaagaaaaacasatgcataattctgaaatcacaactgtgatgagtgctacaaaggaaaggtaaatataatagaaaggggaaaaatgtatgacagaggagctggcctggtaggactgtcagggaagtgatgcctgaygaagtgatgactgagttgaaatcccaagatasagtaggaattaactgtgcaaagagagatggaaagacagctgcaggcagagagcagcatattcaaaagcattggaagtaagcgtggcacatctgacacacgaggaactaaagaagtccaaggtggctggcacagaaagagcaaagtgttcaaagaaactggagaggaacataatgactgcccagaccctgggggctttgtgggccatcatagggagtgtggcctttttcctaatagcacataaccatcggagtgtcttacttcagaagatcatgaagattcagtgcagataacaaatttacttatttatttaatatcaacttactttattttatatgtgcaggtttgttacatgggtatatcacatgacgctgaggtttggtgtacaaatgatcccattacccatgtggtgagcatagtacccagtaggtggtttttcaacccttcctccctttttccttccccatctagtaatccccagtgtctattgttcccaactttgtctatatgtgcccaatgtttagctcccacttataagtgagarcatgcagtatttggttttctgtttgtgcattaatattattaggataatggcttccagctccatccatgttgttgcaaaggacataactttgttctttttatgggctgcatagtattccatagtgtatatgtgccacattttctttatccagtccactattaacagacacctaggttgattcaatgtctttgctattatgaagaatgctgcaatgaacatacaggcacatgtgtgtttttggcagaacaatttattttcctttgggtatacatacccagtaatggaattgctgggtcaaatggtagttctgcttttagttctttgagaaatctacagactgctttccacagtggctaaactaatttacattcctaccaacatcacataagtgttcacctttctcctcagcctcaccaacatctgttattttttggctttttagtagtagccattctaactggtgtgagatggtgcctcatcatggttttgatttgcattactctgatgattagtaatgttgagcattttttcatgtttttttttgttgcttgtatgtcttcttttgataagtgtctgttcatgtcctttgcctactttttaatggggttatttgtttttcacttactgaattayttaagttccctataaattctggatattagacctttgtttgatgcataatttgtaaatattttctcccgttctgtaggttgtctgtttaccctattgatagtttcttttttgctgtctaggagatctttygtttaattaggtccctcttgtcaatttttatttttgttgtaattgcttttgagtatttagtcataaattcttgccaagaccaattccaggaaggtattttctagattttcttctraagttccccacctacaaccatctgatctttgacaaagttgacaaaaataagcaatggggaaaggactccctattcaatagatggtactgggataactggctagccatatgcaaaagaatgaaactggacatttacctatcaccttataaaaaaattaactcaagatggattaaagacttaaatgtaagatctaaaactataaaaatcagacagcaagttaaaagaggccatgggattctgggagaccaatgaggaggctattgtataataatagtccaaaagagaggtgattataataacaatttaaagaggayacttttatgtagtaaaatggaagacaggtgataaagagtgaaaggtgtccaaaatacccctaaagtatctgaattacaccactaaaatgggaacattggaagaagaccaagttgtaaatcacctgttcagtttttcacatcaagrttccttggcaatactcaagagcagaagtcaataggcagtatgactctggggaaggtctagacaggagatataaacacatgggccttctgagtttaggtggagatggaggctcttaggcataaatragcacaacttgggagagaataagggagaagaaagcttgttaatcttgtatactgctagtgtgtctaaattggactatcttttctggaaaggtaattaggagtttttattgttttaagaatgatcataactttaggctgggaatggtgggtcactcctgtaattccagcactttaggaggtcgaggcaggaggatagcttgagcccaggagttcatgaccagcttgggcaacacagtgagaccttgtctctactaaaaatagaaaaattacttgggtgtggtggcacatgcctgtagtcccagcaacatgggaggctgaggtggaaggatcacttgagcccaggagtttgaggctacagtgagctatgactgtgccactgcactccagctcaggcaacagagagacatcctgtctctaacaaaaaacaaaaacaaaaaacctttagatcctgtaactctatttataggaatccatcttcagaaaataatagtagtaaatgtgacaagtgctcatggatgaaaataattatttaagtattatttatgatagcaaaacaaaaaggaaaattatttaattatctaatattaggagaaggttaaatcatcatacatttatatgaatgaatattatgctactataatctgacatttataaatatttaatggtataagtaaatgaccatgatataacagtaagtgaaaaagcatgacacaagataatagagaactagagaggaatagagggtgggagggagagaaatagaacctcaactatctgaaaaataggtacaatgaaagggtataagaaaataaggttatggtcccgttccaagatgaccgaatagtaacagctctggtctgcagctcccagcgtgatctactcagaagatgggtgatttctgcttttccaactgaggtacctggtttatctcactgcgaccagttggacagtgagtgcagcccacagaggacgagccaaagcaggktagggcatcacctcacctggggttggggaatttccctttcctagccaagggaagccgtgacagactrtacctggaaaaatgggacattcccgactaaatactgtgcttttccaatggtcttagcaaatggcacaccaggagattatatcccacgcctggctcagcaggtcccacacccacggagccttgctcactgctagtacagcagtctgagattgacttgccaggcagcagcctagcagggggaggggtgtcccccattgctgaaacttgagtaggtaaacagagcagctgggaagcttgaagtgggcgcagcccactgcagctcagcaaggcctgctacctctatggactccacatctggggacagggcatagttcaacaaaaggcagcagaaacttctgcagacttaaatgtccctgtctgacagctctgaagagagcagtggttctcccagcatgatgtttgagctctgagaacggacagactgcctcctcaagtgggtccatgacccctgtgtagcctaactgggagacacctcccagtaggggctgactgacacctcatacaggcaggtgcccctctgggatgaagattccagaggacgggtcagacagcaatatttgctgttctgcagcctccgccgggtgataccaaggcaaacagggtctggagtggacctccagcaaactccaacagacctgcacctgagggacctgactgttagaaagaaaactgacaaacagaaaggaatagcatcaacatcaacaaaaaggacatccacaccaaaaccccatctgtaggtcaccaacatcaaagaccacaggtagataaaaccacaaagctggggagaaaccagagaagaaaagctgaaaattctaaaaaccagagcactttttctcctccaaaggatcacagctcatcaccagcaatggaataaagctggatggagaatgactttgatgagttgacagaagtaggcctcagaaggtcagtaataacaaacttctccaagcaaaagragcatgttctaacccattgcaaggaagctaaaaaccttgaaacaaggttagacaaatggataactagaataaagagtgtagagaagaccttaaatgacctgatggagctgaaaaccatggcatgagaactacatgatgcatgcacaagcttcagtagccaattcaatcaagtggaagaaagggtatcagtgatggaagatcaaattaatgaaataaagcgagaagagaactttagagaaaaaagagtaaaaagaaatgaacaaagcatcaaagaaatataggrctgtgtgaaaagaccaaatctacatttgattggtgtgcctgaaagtgatgggagaatggaaccaggttggaaaacactcttcaggctatcatccaggagaacttccaacctagcaagggaggccaactttcaaattcaggaaatacagagaacaccacaaagatactccttgagaagagcaaccccaagacayataactgtcagattcaccaaagttcaaataaaggaaaaaatgttaagggcagccagagagaaaggtcgggttacccacaaagggaagcacatcagactaacagcggatctctcagcagaaaccctacaagccagaagagagtgggagccaatattcaacattcttaaagaaaagaattttcaacccagaatttcatatccagccaaactaagcttcataagtgaaggagaaataaaatcctttacagacaagcaaatgctgaragattttgtcaccaccagacctgccttataagagcttctgaaggaagcactaaacttggaaaggaacaactggtaccagacattgcaaaaacatgccaaattgtaaagaccattgatgctaggaagaaactgcatcaactaaccagcaaaataaccagctaacatcataatgtcaggatcagagtcagacataacaatattaaccttaaatgtaaatgggctacatatcccaattaaaagacacagactggcaaattggataaagaatcaagacccatcagtgtgctgtattcaggagacccatctcacatgcagagacacacataggctcaaaataaagggatggaggaatatctaccatgcaaaaggaaagcaaaaaaaaaaaaaaaacaggagttgcaatcctagtctctgataaaacagactttaaaccaacaaagatcaaaagagacaaagaaggccattacataatggtaaagggatcaattcaacaagtagagctaactatcctaaatatatatgcacccaatacaggagcacccagattcataaagcaagtccttagagacctacaaagagacttagactcccatacaataakgggagattttaacacccactgtcaatattagacagatcaacgagacagaaggttaacaaggatatcaaggaattgaactcagctctgcaccaagaagacctaatagacatctacagaactctctatcccaaatcaagagaatacacattcttctcatcaccacatcccacttattccaaagttgaccacatagttggaagtaaagcactcctcagcaaatgtaaaagaacagaaatcacaacaaactgtctctcagaccacagtgcaatcaaattagaactcaggattaagaaactcactcaaaaccgctcaactacatgaaactgaacaacctgctcctgaaggactaagggtttaataatgaaatgaaggcagaaataaagaygttctttgaaaccaatgagaacaaagacacaacataccagaatctctgggacgcatttaaagcagtgtgtagagggaaatttatagcactaaatgcccacaagagaaagcaggaaagatccaaaattgacaccctaacatcacaattaaaagaactagagacgcaaaagcaaacaaattcaaaagctagcagaaggcaagaaataactaagatcagagcagaactgaaggcgatagagacacaaatacccttcaaaaaaatcagtgaatcgaggagctcattttttgaaaagatcaacaaaagtgatagaccactagcaagactaataaagaagaaaagagagaagaatcaaatagatgcaataaaaaatgataaaggggrtatcatcaccgatcccacagaaatacaaactaccaccagagaatactacaaacacatctacacaaataaactagaaaatctagaagaaatggataaattcctggacacatacaccatcctaagactaaacaaggaagaagttgaatctctgaatagaccaataacaggctctgaaattgaggcaataatcaatagcctaccaaccaaaaaagtccaaaaccagacggattcacagccgaattctaccagaggtacaagraggaactggtagcattccttctgaaactattccaatcaatagaaaaagagggaatcctccctaactcatttcatgagtccagcatcatcctgataccaaagcctggcagagacacaacaaaaaaaagagaattttagaacaatatccgtgatgaacatcgatgcaaaaatcctcaataaaatactggcaaaccgaatccagcagaacatcaaaaagcttattcaccacgatcaagttggcttcaccakgggatgcaaggctggttcaacatacacaaatcaataaacataattcatcacataaacagaaccgaagagaaaaaccacatgattatctcaatagatgcagaaaaggcctttgactaaattcaacagccttcacactaaaaactctcaattaactaggtactgatggaatgtatctcaaaataataagagctatttatgacaagcccacagccagtatcatagtgaatgggcaaaaactggaagcgttccctttgaaaactggcacaagacagggatgccctctctcaccactcgtattcaacatagtgttggaagttctggccagggcaatcaggcaagagaaagaaataaagggtattcagttaggaaaagaggaagtcaagttgtccctgtttgtagatgacatgattgtgtatttagaaaaccccatcatctcagcccaaaatctccttaagctgataagcaacttcagcaaagtctcaggatacaaaatcaatgtgcaaaaatcacaagcattcttatacaccagtaacagagaaacagccaaatcatgagtgawctcccattcaaaattgctgcaaagagaataaaatacctaggaatccagcttacaaggcatgtgaagcacctcttcaaggagaactacaaaccactgctcaacgaaataaaagaggacacaaacaaatggaagaacattccatgttcatggataggaagaatcaatattktgaaaatggccatactgcccaaggtaatttataggttcaatgccatccccatcaagctaacaatgactttcttcacagaattggaaaaaaaccactttaaagttcatatggaaccaaaaaagagcccgcattgccaagacaatcctaagcaaaaagaacaaagctggaggcatcacactacctgacttcaaactatactacaaggctacagtaascaaaacagcatggtactggtaccaaaacagagatatagaccaatgggacagaacagaggcctcagcaataacaccacacatctacaaccatctctttgacaaacctgaccaaaacaagcaatgaggaaaggattccctatttaataaatggtgctgggaaaactgggtagccatatgtagaaatctgaaactggatcccttccttacaccttatagaaaaattaattcaaaatggattaaatacttaaatgttagacctaaaaccataaaaaccctagaagaaaacctaggcaataccattcaggacataggcatgggcaaggacttcatgtctaaaacaccaaaagcaaccacaacaaaagccaaaattgacaaatgggatctaattaaactaaagagcttctgcacagcaaaagaaactaccatcagagtgaacaggcaacctacagagtgggagaaaaattttgcattctacccatmtgacaaagggctaatatccagaatctacaaagaacttaaacaaattttaccagaaaaaataaacaaacaaccccatcaaaaagtgggcaaagcatatgaacagatacttctcaaaagaaaacatttatgcagacacatgaaaaaatgctcatcatcactgatcatcagagaaatgcaaatcaaaaaccacgatgagataacatcttacaccagttagaatggcratcaataaagtcaggaaacaacagatgctggagaggatgtggagaaataggaatgcttttacackgttggtgggagtgtaaactagttcaaccattgtggaagacagtgtggtgattcctcaaggatctagaactagaaataccatttgacccagtgatcccattactgagtatatacccgaaggatcataaatcatgctactataaagacacacgcacacgtatgtttattgcagcactgttcacaatagcaaagacttggaactgacccaaatgtccatcaatgatagactggattaagaaaatgtggcacatgtacaccatggaatactatgcagccataaaaaggatgagttcwtgtcttttgcagggacatgcatgaagctggaaaccatcattctgagcaaattatcacaaggacagaaaaccaaacaccacgtgttctcactcataggtgggaactgaacaatggaatacttggacacagggtggggaacattacacaccagggcctgtcatagggtgggggctgggggagggatagcatgaggagaaatacctaatgtaaatgatgagttaatgggtgcagcaaaccaacatggcrtgtgtatacctatgtaacaaacctgcacgctgtgcacatgtaccctagaacttaaagtataataataataaaaatsttaaataaaaaaaagaaaagaaggttatctctaggctgtggaaactggatgattgttaccactttaattcttttctctactttccaaatatttaaaaatgggcatgtattgcattttatgtaatatcaggaaaagaaatataaaaggaaaatactgtccccatcataaatatgcacttcattggcatctcaccctattaaacactggttatcagtctttccttttcacaatttaatgagcatttctgttttgcatctggcattgtcttttaggtttgtaagattattgccgtgcatcttaaagttttatgagctatttagtcatttagactcataaaatatcttcagagaattgatctagcggctgagcaatagcaattccttccccacagcacaagttccaatcagttcacacccagtgtataataytgaatacatttgtatttactttttaattttgtagcagtacagataactctgagctttgtaatgtgattttttaaaaaattatattgtaaatacatgtagaaattcactaattattttaaagtatgagttgtttttgttttccttcagtgactgtcagaaactgtccatttggattgtcacttacatcatcatcgtctacagcaacataaaatgactttgaatttggttcaaactaaaagcatgattttttttttttttaactccaggaatgtatacaaagactatcgcttccttgagctggcatgtgattcccaggaggatgtygacagctggaaggcatctctactaagagctggggtctatcctgacaaatctgtagtaagttggatatatctcttatgtaaaaattattattagctatgcttaagaaaatattaatcctacataccataagctggagaaactagttttcttactgacttaattaattagttacacttttagctgatacttcgcttactctttttatattttttaacaatgctttttctctgttagatttctatttgaagaagttaaacaatatatttgttaaagaaaatgtcctactcagccataaaacacatatgcaatctcagctcaagacaaagtttgttttatttcaaaatttcatttttctctatatgctttttcatacttatcatggtattaatacaatcagtatatcatcaatcataacaccagcattttgacttgcttaaaatatactcattttaataaaaatctatcccctttcattatgtctatattccctgtatccataagtatatctgtgtgcaaactctgtttaatatcctcatgagtgtgaaagaacaaaaagaaatatattgctatttccacttgtctttattaatatgcttcacgtgtctttaagacacttctctcattcaagttaataaacagaccttttctttgtgttctttggaaaatgtaatattacacagactagtctaaatttaaacagaagtctcacccaacatatgtgcacccaccgttaaacagactctgccactgagtggacctctccacttgctgcttcctcctgtatatctagattatccaggtttctccccagaactaaagtactgagactaagccttggggatttagttcagcttaactcctgaggtgcctacttggctctcgatcagtttataggaatgatcatgcatgagttgggtcctttttaggttcaaaatagggagagagtcttttcaagagaaagtctgagatatgggtgaaacataggacaattaaagtatttctaggggggtttcagggctgaccacatctctggggttatactaaaatgtaacagagtttcaggaatacaggattgaggacttgcaccaaaatgtcrtcctctctgctgttattttaactcacacatagacctctttatgccattgcatgctrtacttgtcatcctatacctgtctgacacctaaaacaatgaacctcccacaatatgctttgtgccctccaaatggaagttaaactagatgctttcctgtcaatagccaggagtacagaagcacgcatatatgattttcataattgttgtcgagttgttctcctgttatatgcgtagatatttgcatagatatataccactctaaagactacatgtgagaagtcattaaacatcagagtaccacttttacttttgtttttaactctattacttattactcttccctatccattgatggtagtgtgtttaatttcacaaatgttctatattaaaaatrcacacatacctaattttttattaactcattccacacaaacctttggagcatatgctttttgccagctgccattctaggccctggtgatacagaggtgaacaatagcaataaagtcctgcccccactggagcagacattaaacaagggagtgaataacgataattgtgcaccattatttaagatagtgataagttctataaaatgttaagtaagttaaagggacagacagtgagagtaaggggcaggcaagctttatttttgtcaaggtgatgagggaaggcctctttgaagagttgacattagagcaggctcttcaaagaagggagggagtaaaggatctggaagtctgaagaagagtattcttggcagaagatagcaagtgcaaaaccaagctcagtgtcttagaggagcagcaaggccagtgtgtctggaacactgtgagggaagacaaaggtggtagttggttaacaaggaaagaggtcagggaccaggtgatrtaggccttgaaggatggggcgagccttttgaattttattctaagtgagatggaagccactactaggtttcaagtcacttagtgacgatttatatatttaaaagctcattatggttgagaatgatgagaggtagtaaagcatgtgagttcaagcagggctgttgtgtcacaccacttatatttacattccaggtgcttacttccaagctgtgaggtcttgggcaggttacctagccttttcacatttcaagattcttatttctgagatgaagataacagtagtcttttatagggcggttgataggattgaatgagataatgcagggaaagcattgaacagggcaggtacaagtaagcactatattttcacttataattataattattatgattcttattatgaacattttcatcaaaactactttctttaacagctaggggaaggttgaaatactgtgaatattatcatacagcccagtgagattataaatactttgttattttctatcttccaaatatgcttgtatgcttggttatttatcaatgtgtgtgtgtgtgtgtgtgtgtgtgtgtgtctgccttaacatgcaactataatgtttgtgaaaatgttttgttaagtcatgattttgtaaattaaacctatttcaaatgcactagacaagtttgccatttaaacamaaataatgcttagccaggcacggtggcacacacctgtgatcccagctacaagggatgccaggaggattgcttgagcctgggaggcccaggctacagtgttcgtcccaccgcactccagcctgtgtgaaagagtgataccctgtctcaraaacaaaaacaaaaactttcaatgaatctcttatgagggaaaaactgtcctagaaaatcaaagttatccatckcccagtaaactggctggatttttatgtatccatagctctacatcaaaaagacaaagaaatattttctatttttaattagaatactcaattttaagcaaatctcacaacacaatctgttttgattctttttatatcatttttatttgtttatcaatgcatatttggtacaattgcttagaagatcaagacaaacgaatttttagtacataccgaaggcaacacaggaaattaaatttagcagtgtgcgatgatattgccttttttcagttttcatcataaacaatatttgcatttcttatgcaccatgtagtcctacaggtcatattacataattgcttgactttcagatatttaaatggcagctaactgatgaaattaactagaatgcttatctaaagtttctattttgtgaacactcacttatatttsggggaaggaaattatttttaggtagttattcctaatttagaaagacttgatgaagtcagaataacctaataacagatgcctccgtctgtgtaaatttttagratgtctaagtagtgtgattttgctttcatgtcaataaaccattgagtctacaaatcagtcaattgctaccctaataatgaaacatttatgtgtcatgcwtggacatgagtctaaacttacaaagttctgctttctgcacaagatacctctattttgactggaaagaaatctctatatagatcatttttaaaaattgtgtaagtttgacatcattagataaacagccatagcccaaatttgaatgaaatgctgtgttagacagattttattttctagtaaggttacatatgctcactttttaaaatacattctcactatatatttttttccatcacgtccaagtgatggaatggttttatgtcactcatatcaaaatcttctgctcccctgtttcttttgtctcttaagttatttatcttggggttttctaaaattttatttctttccttcccttccatcctctttcctcccttctttctttcccttcatccatcactattaaagtggactctagagattcaaagattaaaaagatgaaattcctacttaataggaatgctaagcctagtgaaagagaaagacacaaataaatgctctacaatatgataagatctacagtggatatctgtataaaatacaacagccctactatttttccatatggattttctaattacttttattctctttcacctttctggatccaaagcaaaatgtagaatttttgtctgagcagtggcatctatggctctaaaatggaaaggaggagtcctggattcaggctactgacttactctgtgaatttacacataacttcctttgagccacagatttagcattctaccagtcacctgatatttctgagcagccacaatattttaaaactatatttaaatctgaatttggatttagcagaattttattttttccatttctattttctatggtcactaaattgaaattacaaccattgtaaaatttgatatcattaaatatgtaggactttatccagtttcaaagtaaagatgtctctaatgtaattaattgttattttcactgatgagactgaaatacaatcagtctgtattgtgtgtgcgtatgtatcagtggtaagaggctatgattagacaacttttaaaagattattttattgacacgtacgtaaatttttcctacatatgtgattataaataaatgtgaatttgatttaatatctaaagaacatgatataacaaacaactgacttttctggcacagttttgttggcttacaatatttaaattacataaaacatgaaagaattctgaatttaaattccttgaaacataatgtgtgccatggaatgaggtagacttcaagtcaaatccactcacagttggatcctgagcctgccatttactagccatgtggctcaggcaacttacttaaccttccaattgttgattcttctctaaactcagaataatgccttcctcagagtgactttataagattaaatgaaggttcttctgcatcacaactagttcagtaccttcaactgggtgaatgtgttcaatgtctcatagcatttatttatttatttatttatttatttacttacttatttttattatactttaagttctaggatacatgtgcagaatgtgcaggtttgttacataggtatacgtgtgccatggtggtttgctgcacccatcaaccagtcatctacattacatatttctcctaatgctatccctcccctagccccctaccccccgacaggccccagtgtgtgatgttcccctccctgtttacactgttggtgggagtgtaaattagttcaaccattgtggaatgtagtgtggcaactcctcaaggatctagaaccagaaatactgtttgactcagcaatcccattactggacatatacccaaaggattataaataattctacaataaagacacatgcacacgtatgtttattgcagcactgttcacaatagcaaagacttaggacccaaatgcccatcaacgatagactggataaagaaaatgtggcacaggggraggagccaagatggccgaataggaasagctccrgtctacagctcccagcgtgagcaacgcagaagacgggtgatttctgcatttccatctgaggtagcaggttcatctcactagggagtgccagacagtgggygcaggtcagtgggtgcagcacgcggtgcacgagccgaagcagggcgaggcattgcctcactcaggaagtgcaaggggtcaaggagttccctttcctggtcaaggaaaggggtgacagacggcacctggaaaatcaggtcactcccacccgcatactgtgcttttctgacgggcttaggaaacggtgcaccaggagaattatatcccgcacctggctcagagggtcctacgcccacggagtctcgctgattgctagcacagcagtctgagatcaaactgcaaggtggcagcgaggctgagggaggggcgcccgccattgcccaggctygcttaggtaaacaaagcagccgggaagctccaactggctggagcccaccacagctcaaggaggcctgcctgcctctgtaggctccacctctgggggcagggcacagacaaacaaaaagacagcagtaacctctgcagacttaaatgtccctgtctgacagctttgaagagagcagtggttctcccagcacgcagctggagatctgagaacaggcagactgcctcctcaagtgggtccctgacccctgactcccgagcagcctaactgggaggcaccccccagtaggggcagactgacacctcacacggccgggtactcctctgagacaaaacttccagaggaacaatcagacagcagcattcgcggttcatgaaaatccacggttctgcagacaccgctgctgatacccaggcaaacagggtctggagtggacctctagcaaagtccaacagacctgcagctgagggtcctgtctgttaaaaggaaaactaacaaacagaaaggacatccacaccaaaaacccatctgtacatcaccatcatcaaagaccaaaagtagataaaaccacaaagatggggaaaaaacagagcagaaaaactggaaactctaaaaagcagagtgcctctcctccaaaggaacgcagttcctcaccagcaacggaacaaagctggacakagaattactttgacgagttgagagaagaaggctgcagacgatcaaactactccgagctacaggaggaaattcaaaccaaaggcaaagaagttgaaaactttgaaaaaaatttagacaaatgtataactagaataaccaatacagagaagtgcttaaaggagctgatggagctgaaagccaacgctcgagaactacgtgaagaatgcagaagcctcaagaaccaatgcgatcaactggaagaaagggtatcactgatggaagatgaaatgaatgaaatgaagtgagaagggaagtttagagaaaaaagaataaaaagaaacgaacaaagcctccaagaaatatgggactatgtgaaaagaccaaatctgcgtctgattggtgtacctgacagtgacggggagaatggaaccaagttagaaaacattctgcaggatattatccaggagaacttccccaatctagcaaggcaggccaacgttcagattcaggaaatacagagaacgccacaaagatactcctcgagaagagcaactccgagacacataattgtcagattcacmaaagttgaaatgaaggaaaaagtgttaagggcagccagagagaaaggtcgggttacccacaaagggaagcccatcagactaacggcrgatctctcggcagaaactctacaagccagaagagagtgggagccaatattcaacattcttaaagaaaagaattttcaacccagaatttcatatccagycaaactaagcttcataagtgaaggagaaataaaatacttcacagacaagcaaatgctgagagattttgtcaccaccaggcctgccctraaagagctcctgaaggaagcactaaacatggaaaggaaaaaccggtaccagccactgcaaaatcatgccaaaatgtaaagaccatcgagactaggaaggaactgcatgaactamtgagcaaaataaccagctaacatcatattgacaggatcaaattcacacataacaatattaactttaaatgtaaaaggactaaatatcccaattaaaagacacagactggcaaatkggataaagartcaagacccatcagtgtgctgtattcaggaaacccatctcacgtgcagagacacacataggctcaaaataaaaggattgaggaagatctaccaagcaaatggaaaacaaaaaaaggcaggggttgcaaycctagtctctgataaaacagactttaaaccaacaaagatcaaaagagacaaagaaggctattacataatggtaaakggatcaattcaacaagaagagctaactatcctaaatatatatgcacccaatacaggagcamccagattcataaagcaagtcctgagtgacctacaaagagacttagactcccacacaataataatgggagactttaacaccccactgttaacattagacagatcaacgagacagaaaattaacaaggatacccaggaattgaactcagctctgcaccaagcggacctaatagacatctacagaactctccaccccaaatcaatagaatatacatttttttcagcaccgcaccacacctattccaaaattgaccacatactgggaagtaaagctctcctcagcaaattaaaagaacagaagttataacaaactgtctctcagaccacagtgcaatcaaactagaactcaggattaagaaactcactcaaaaccgctcaactacatggaaactgaacaacctgctcctgaatgactactgggtacataacgaaatgaaggcagaaataaagatgttctttgaaaccaacgagaacaaagacacaacataccagaatctctgggacacattcaaagcagtgtgtagagggaaatttatagcactaaatgcccataagagaaagcaggaaagatccaaaattgacaccctaacatcacaattaaaagaactagaaaagcaagagcaaacacattcaaaagctagcagaaggcaagaaataactaaaatcagagcagaactgaaggaaatagagacaaaaaaaatccttcaaaaaattaatgaatccagaacctggtttttagaaaggatcaacaaaattgatagaccactagcaagactaataaagaaaaaaagagagaagaatcaaatagacgcaataaaaaatgataaaggggatatcaccactgatcccacagaaatacaaaytaccatcagagaatactaccaacacctctatgcaaataaactagaaaatctagaagaaatggataaatttctcgacacatacactctcccaagactaaaccaggaagaagttraatctctgaatagaccagtaacaggctctgaaattgtggcaataatcaatagcttaccaaccaaaaagagtccaggaccagatggattcacagccgaattctaccagaggtacaaggaggaactggtagcattycttctgaaactattccaatcaatagaaaaagagggaatcctccctaactcattttgaggccagcatcatcctgatatcaaagcctggcagagacacaaccaaaaaagagaattttagaccaatatccttgatgaacattgatgcaaaaatcctcaataaaatactggcaaactgaatccagcagcacatcaaaaagcttatccaccatgatcaagtggtcttcatccctgggatgcaaggctggttcaatatatgtaaatcaataaatgtaatccagcatataaacagaaccaaagacaaaagcacatgattatttcaatagatgcagaaaaggccctkraaaaaattcarcagcccttcaggctataaactctcaataaattaggtattgatgggacgtatctcaaaataataagagctatctatgacaaacccacagccaatatcatactgaatgggcaaaaactggaagcattccctttgaaaactggcacaagacagggatgccctctctcaccactcctattcaacatagtgttggaagttctggccagggcaatcaggcaggagaaggaaataaagggtattcaattaggaaaagaggaagccaaattgtccctgtttgcagacgacgtgattgtatatctagaaaaccccattgtctcagcccaaaatctccttaagctgataagcaacttcagcaaagtctcaggatatacaatcaatgtacaaaaatcacaagcattcttatacaccaayaacagacaaacagagagccaaatcatgagtgaactmccattcacaattgcttcaaagagaataaaatacctaggaatccagcttacaagggacgtgaaggacctcttcaaggagaactacaaaccactgctcaatgaaataaaagaggacacaaacaaatggaagaacattccatgctcatgggtgggaagaatcaatatcatgaaaatggccatactgcccaaggtaatttatagattcagtgccatccccatcaagctaccaatgactttcttcacagacttggaaaaaactactttaaagttcatgtggaaccaaaaaagagcctgcatcgccaagtcaatcctaagccaaaagaacaaagctggaggcatcacgctacctgacttcaaactatactacaaggctacagtaaccaaaacagcatggyactggtaccaaaacagagatatagaccaatggaacagaacagagccctcagaaataacgccgcatatctacaactatctgatctttgacaaacctgagaaaaacaagcaatgaggaaaggtttccctatttaataaatggtgctgggaaaactggctagccatatgtagaaagctgaaactggatcccttccttacaccttatacaaaaattaattcaagatggattaaagacttaaatgttagacctaaaaccataaaaaccctagaagaaaacctaggcattaccattcaggacataggcatgggcaaggacttcatgwctaaaacaccaaaagcaatggcaacaaaagccaaaattgacaaatgagatctaattaaactaaagagtttctgcacagcaaaagaaactaccatcagagtgaacaggcaaaatgggagaaaatttttgcaaccttctcatctgacaaagggctaatatccagaatctacaatgaactcaaacaaatttacaagaaaaaaacaaacaacctcatcaaaaagtgggcaaaggatatgaacagacacttctgaaaagaagacatttatgcagccaaaagacacatgaaaaaatgctcatcatcactggccatcagagaaatgcaaatcaaaaccacaatgagataccatctcacaccagttagaatggcaatcattaaaaagtcaggaaacaacagatgctggagagcatgtggagaaataggaacacttttacactgttggtgggactgtaaactagttcaaccattgtggaagtcagtgtggtgattcctcagggatctagaactagaaataccatttgacccagccatcccattactgggtatatacccaaaggagtataaatcatgctgctataaagacacatgcacacatatgtttattgcagcactactcacaatagcaaagacttggaaccaagccaaatgtccaacaatgatagactggattaagaaaatgtggcacatatacaccatggaatactacgcagccataaaaaatgatgagttcatgtcctttgtagggacatggatgaaattggaaatcaycattctcagtaaactatcgcaaggacaaaaaccgaaacaccacatgttctcactcatagatgggaattgaacaatgagaacacatggacacaggaaggggaacatcacactctggggactgttgtggggtggggggatgggggagggatagcattaggagatatagctaatgctaaatgacgagttaatgggtgcagcacaccagcatggcacatgtatacatatgtaactaacctgaacattgtgcacaggtaccctaaatcttaaagtataataataataaaaaaaagaaaaaaaaaaaagaaaatgtggcacatatacaccatggaatactttgcagccataaaaaaggatgagttcatgtcgtttgcagggacatggatgaagctggaaaccttcattctcagcaaactaacacaacaacagaaaaccaaacactgtatgttcttactcataagagggagttgaacaataatatttttattatttaaaatcatwgtgtccatgaagctgtaattcccaattaagtattacttcccttctcttaggaaactatcagtgggatttgggtgtgtgaaggagaatttcccatctattggctaagcaagccgagttatttaaagggagatctgatgcactctggggggataggccagcctccatcggttagtcasgagtgagcagaaaggctgtcgggagctgagaattcacaagcctgctctcagatgcgcgcctactggtaggaagtctgaaacaatgtcctggaaagaaatttggtgcaaatccagttttgcatatttactaagtctgacacctcagagtttttaaagaggttttattagctgtatatataagtggtcttcccctatcgtgtatttttcttaagagattaaaaatgatggcaggaagtgaatcaccctggaacttcactattccttctgaattcaggactgtcccagtcataactgatgtttttaggtcggctttgcagattgaaaccactttacaatgaagtccttttgaaacttcagaaattcctcttggacaaactctgaaagtgaatttttctctgtgtcaaataacaggagaaaaagtctctgcgttattgtaggagaagaagaggaatagccacagacctgcatacatatttattaaagtgctgatgacccctcatatgcattttttyagcagtctaataatacaagacttaaaatgcttggtacttagcccccaacacataactttgttcttagcattttcagcaaaacttagaagagctacatggccaattctgaagagtcttagtttttcttcaatgaagtgctttcagggatctaaacataaattgctgccacacagagtagtgaagggaattataaagcatttacatttcaccattcatgactgttacgcctctctcagaatagacagttgggaaatgattgaatgaaacaagaaatggccaagccacaccacgtcctccgcttgtgtgtttcttgtatttaaggattaaggcctcctaccctgtgacatcattgttgccactacaaacagaaccatctgccatcgagtggggaagccagtcattccctaatgtgcaaaaatacttggttgaactcctgaaacttatttggtagatcaaaagctgcactgctgtggaatgcaataaactccatctgtttgargtattttcagcaatattgcactacttrggagaaccagggtcccattattctctaaaataagacttttattcccggtaaaattcccagtggggatctttattgccttattgaacagttggcatcatttttaaaaaggactctttttttcccttcattcrttcttatgccattatttatgtctcagataagccagggtgttaacggttatatcacggcaactcacaatgccaagaaacttctcttcactattttatcagtgtctttaaatttatgttttctttattaaatatgatggtccctggattaggcatttccctagagtcacgaattggcattgttttccagaaaacacactctcctgggatcattacctttccgctctccagaaaatatctgtatatattatttcccccttcacatcctcaacttaaaactaaatgccaaatctrcagccagacctgtgactccgccctgtkctaggtctccacagatgcacacactttactcacagctctcttccaccctgtgtctcagcgagaaattccttctgggccccttgtgagaagagttcagatctgttcccggcccatatcccatcacrtctcccccacaggatctgaccttgtgaggacttgggctgccccgggagtaatgaatcaccgtcttatttttttaggccatatgtgagttaaattgtttgatataaatcatactcttgcagctcagggttgaaacaggagagccatttgccctgccgcctgctgctggcggttctgtgtctttacccagagtgtcgcttttagaaatgactacatttttgtgactaacctttccagacccatttcttgagtgtggactcatgtttgttttggcagcatccccactatacagtccttgcttcccatgccaacctaaggcaaaactcataatttacaaaataaaggaatggtccagatggaggtcgtaacttggtctgcttaccctgtctccctagaaccacccactcctttcctctgctctcttttccttctttttttttttttccaccttctttgaaaccaaggatgcagtgtttgtttaaaaatgcactggctgatgaaattttccactgcttggcatgttggaggaggagctgtcaggaaagggcaagccggcacacaaaatgctctgcctttcacgctaacagttcacttattactgattcaaaccaattctttctggccacgttcccataccccaggtattccaaatagaaagaaagggggcaactgtyctaagtttctgctgttataaatgtatgatttcatgtaacctatgtggattctttgacttgtccatgagctctggatgctgtatgtgtatgtatgagatgtcagtgaatagttaaatcatttgttttgatttcactctagcaagaaaaacctcattttattttttttaatatccagagaaagtagaagaaaaaaccctcataattttaaaataaatttctgtttaacatatttctctttcttttccttgcggctacatgcataggggaacaacaaagtaagttatttgtcctcttgcagctcttctgtccccccagcccctgctccgctcctgcatgtcttgacaagagtgttcctgtgcatgctggaatgactgtcatctgttacagtgcacgaattatatggggtgtgcaaatttgggggaaaatgtgcatttgcactaccataatggctgttccgttttgacttttgggaagggaaacattctatccttcagggtctaatggctagttcagagaggttgacattataaggaaagagctcccacactaaaagaaaagattttgaagatttaataatgaggacycttctgcagaaggggtacagcaataggatggaattcagtgcagctgaagtttttgactaaaaatcaaacctcttatgttaatgtgcagttacaaaaaccccaaactggagtcttaaatagcagtatggctggctttgttgacgaaactgaactagatcagtgttctggctttgaaggtgccttaaaatggatggaggagggtggggtcaacatttcacttggcttctgtgcccttgatgtcttccagctggatggaagcagaagggtgtggggaatgcagggggtggccaaaatgtgtatgatagctttgtgaaaccaggcaacacacaggaatggtggaaattattttaatrttgttgttataatagatcaatgagcaatttaatagttcatggggttgctagtttgtttaaattttaattcaacttttccaaaagattagaactatttctcacttatattagaaatgtaatagtaatgtagtttgagaagatggtcttacgtttagttgggcgatttgttttcttattttttctatggagatacattagtgcttcaccctaccaggtggcccacttaaaacrggcctcattgaatacaataagaattgaaaagaatctgttatataagagttggccggcatattcaaaccagctggaattcgtcaaaatttctgttcataagccatacatatagaatgtaaaacaaatgtgggaaatcttttgcagtttaatctgatggaatgtgctattatggaataagttgacatacatggttggtattgaaaatgtgtcactttataaatttatatcttgatataactgcttataacccaagtaataatatataataaagtattaccagaaaagcacaagacaggcatttgtgaaggagtaaagaggtgaactcagtcgacttatagtatgatttttaaaaacagcaggtaacttttgaaattgattaaagatttcttccacaaagtaatggctaatatttataactaattcyaccactctttgaaaagacatttggaaaaaatataaaaaccaatatttttagttcttataccataaaatatacttcaattattgaatagtacgtatgtcgaatcctggtcacttgcattgcactgagtctctgtatgaaatttcttgtactgcatttcttatttgcaagcaaaacaaaacaaaacaaaactttaaaaagtaccctggactaattgtgagtgtgctaacagggagcctgtgcatgctgaagaccagggagccagctgctgacattttgggggaggtgctaactctcagaccactcaagaagcatttaggatttgtctctttcactagtggattcaccgatgagttaagaacatttgtaaaattcactcccyrcacacacaccaagaagaaacccacttctccttaccagaagccatccatttgttgtgtcatatttgattaagttcttctggatccaaaaaatattcagtttaatacattttactgattttcaagtcactaaatacaatgagaaaattcaaaaatttaaaattacggctcattaagggtttccctaggatgatgcagaaggctcttcagggtctccagctgccctcggtcaccaactgtatctgaacgcttgcgcatgtgctatgaggacagctttgggtgctccttagagggcgagtgttagttgaagagtatcaaagatgcaagtacttactgttttgatttcgaattaaggagtgagcactttggaggtgctagtatttattgccccatgccttatttttaattgtttgttatgaataagtgatagtttgtggaaaatataatgcttatactttttaaatatgatcattatactgaccatagactctggcataaaaaaaaagcctcctcaaatcacaaacagcacatctgcatgttattttcctgtagcttagaatttcagtataaatggaaaatactggaatacaagctgtgctgtctccggagtatagatctggattcttcaaaaggagaatatgagattccttttttcctcccatgctggaatgcttgttctgagttgtccccaaggcaacatacctgaattgttgcctgccatatacgtgagccagctgtaaagtgtgactcattttagacttgcaaaggcttattgtttatctagtgcatggcattttattatatatgctattaaccagactctagagcaaatgaagtctgcccaaattaatgtttccttagatgagcaggacagattcatctttccacatacattaagagtagtgcacacacatgtgcacatatacatataacctggggtatatggarcaatcctgctatttgttttctcaaagacagccaaattgatctgcttcatccatctttagactatatttaaagtttgggagctaatcctctaaactccaagaaaactaacttctacaatagatgtgcatttagattcacattatgaatgcatgacggaacaaaacatcaaggttcacattcttcctgcacaatcatatgtatgttgttatttctccttgaaaagcacattttccttttgtgaggagatcacagttgctcaggaaaawttttccttccaggcctgttacttatttttccctttgaaaatgttttcgtgttggcatagtgatttcctaaattgctcagggtagagtctatctcctcctaagatgggtttccctggaccacagattccaagtcaatgtcttcattagaaagaccagaatccaggacaccctgagtcagttctgggaatgtgaacaaatatgtacagaaacagggaggttattttgttttttaaacttgtttcttgagtacaaatgtaaatcagaatgttattttcagaatggaggccttaggtaaaaaattaacctccatgttgtgtcttagacacaagccatttgatttcctttttgaatgtgatggcttctcttggtggacaattttagaaatttcatagacttttaatttaattttttattaaatacttgrcgtttcagttaaatatttttgatattaaattaggcaagttaaaggtagagaaaatcttaacatgtaaggaatataaatatatcaaaagccctaaaagtttttaacgatgttggtatagatacacaaakgaaaactaaaatgaatcctagattcagaaatcaatgcttcaaaaagttttaggttacaaggaaaagccacatgtaagctcgtgccttgtgaatcctttgttgcttttaaaaaagaaatttataatcacttaacttcagtattgttaaactaaaggactcttatattttcccccacagaatttaaggctgactgtattgcttagagagaaggatcattttaaaggagaaatagaacagaaacatgctaaaacagaattttaaaattgctaattaaattctagttaggttaaaagcaaaaattttatacatattggagggccttgatatttaagaaaagaagaatgaaaggaaaattagatgaataactgtttttacaacatttaagaaacactttgtctagtgatttcctaacacgttcagcaaggccagtggacaaggtcagccttcattcgtgggaaaagtggttatcactgggagtgattattttggtgatccattggattctagcactcatttgcaaagataaaatttaccaagtcaaatggcaccaaagtatatatattgaagagcaaagatattaaatccatattaattagttatgcctctttacaccaagccctcaactcctaaattattgtccttggtcgtatgtgagagaaartagatagccactgaaaactcatcctcacaatgtgaaaatgtctttctgatgatgcgtgttataatcatggtgaatgaaaggagcagagagtacagtgtcataatgtacattttctttgtataatattaaatgcatgaccaaaagtcagaacactctaagcaatttaggtatggtcagctcaattattttatttcaataatgtgtgtgctttccctgattttcttagaaaacttaagccaatacatgccctggggtctaaggaacaccgycccccaccacctggttgactaaatttatgcataacccaataaggacatcattagagttaaaagaaaggatgaaaattccctagcctcaaagtgttattttagttccatgtgaatataaaaaaaaattgtctgtcaatcattgcatcaccagtaaacctttgcttctgtttttggcaaatcagccttaaaagagcattgttaaagccttatttttgaatcccctcactttaatagtaaactgttgggagaaggaacagtttaattgagggtagaaaacttctagaagcaaattggaatctatattatgttcccaaatttattgatcatgctaaatagactctatagagaagcaagaattgatctgctgctgcttagaaagcttatagtagattataatacagggatttcttaagggtcattagggcttgtttatatatttttattttctctgttgggtcgaaaatgaagtgacstctctagttaataggaaataatgtttaggacttcatagctgtttcaacatatttgctctcacatattgtaatgtacacatcccaatattgtagacatctcctttctgcatgcttcatgatatttttaatggaactggtttaacactgctccaaaacaagagtcgttcatgcctgttttgaaagcataatatctggataatgaaaatgtggcacatatacaccatggaatactatgcagccataaaaaagaatgagatcatgtccttcacagcaacatggatggagctggaggccgttattctaagtgaattaatgcagtaacagaaaaccaaataccaaataccaaataccacaggttctcacttgtaagtgggagctgaacattaagatcacatggacacaaagaagggagcaagagacaccggggcctacttgagagtggagtgtgagaggagggcgaggatcaaaaaatttcctatcaggtactatggttattacctgggtgatgaaataatctgcacaccaaaccctgtgtcatgcaattaacctayataacaaacctgcatatctaccccctgagcctaaaataaaagttaaacaaaaagaaaacattttatcatgaagtatgagtttattcatttatttatttatttacttttagagacagggtctcgctaagtttcccaggctggtcttggactcctgggctcaagcaatcctcctgcctcagcctcccaaagtcctgggattacaggtgtgacccatcatgcctggctgattttaaaagttaccttgtgataagcattgttttgaaatttaaacccttacagagtatttctattaaaaattaagaatttgtgtttttttttgtttttaatgttaatgtggttatggtactgtatggtaaaatcattcagaatcattgcagtagggagggttttaaagccttctgtctatctttggcagatcaactgagcaaaaaccaagataaaaaaggatgtgaatggtataaaaaataagtgagattcaaaagatatatatgtgcatatttaaaggatatatgaatattgaatgtctggtaaaatacagaaaacyagagctgtatagaaaaatttaaatgtaaaaacctatctatttacaagtgaaaaamtacattccaaaatagatccaatggaaattagtatttaacttacagactatttggaatataataatagtgaaaacactatacaggmtacaaccaatactatacaaagagaaaaattaatttgaaaatgaattatttgtttaatggaagtcaataaaattaggagattggaaagagagcaactgcaacctgatgaaagaaagaaattcattaagtaaaaattaatgarttagaaaatagcaaaagaaaaacaagaaagcttaaactacatacaaatttaaagctttcgtatgagacagtagagttaaaaggcaaaagacaaacaagtaaaatacctgaagcatatatgacaaaggattaaatattctcaaaatagaattatccctattcagtttattaaaaaagctaaaacaaaaaaagcaaaacaaagcaaagaacactacctactaggaaaaaaggaagggggccaaatcaatagagcatttagaagccctccyagcccctgcaaaaggactaattaatatatgacaaaaagtttcaatttcactaggaaccaagaagtgtaaattaaaacagccagccagacatcatgattgggctttcagattaggagatatgagaaagaaggtcgtgtgataggtggtaacgaggaagccgtcctccttgtgtaccacacatgttgccractctgcatgtagcctccctggaggccagcttgagactctgcattaaatgccttggttaggcgcaaaccttatggctcagcaattccactcttcaaagtttatttttatcaaatgattccataattgtgcaaagaaatttgttcaaagatgattttgaaacattgttcataattaccaatgttttaaaacagcatcaatatccatcatagaaaattggttgaatagagtatggtatattgattcaacaaaatgctatgaagcaaagcatttttatctttaaaaatataaagatatatatatagaaattttcatgataaattaacaaaacattgtgcatgccataggtagcataattccattttacttaaaaaattttacataggatgagatatatacatatatgtttgcacatagaaactacctattgtgtactatgctcactaccagggtacaaaatacccatgtaacaaacctgcatatgtaccccatgtatctaaaataaagttgaaattttaaaaataaagaaattctggtacagaatttacaccaaaattttaacagcatgagcaatattaatttgtggtcctgtgttgttttctcatttttatgtgataaccatcctttgtgtaactttcaaaaaaaggttttgaaatacacaaaaaaatgaagaggaagatacttaaatagaggatggtgagaaagaaagaaaagtataaaatggtgaaaacagaatatctaggaggagaaatatgtaccataaaagaaatagattaaactttacaagaaaatagattaacttttatatgaatgtcaaagatacatgtggaaattaactttaaagtggaaactaagcatctgagacyctacaagcttgacataattatgtaatcatgtttattatgattatttttgttgtgattatacagattttgttacctcttttccrtktactctgcctgtgcaaatatgttattttcctcactgaattgcatattgttgaaggactatattaggagtctccaaatgctcacattccctcattcattgcctattgctttcaatagtgtctttgtttcaaatgctcaaattccatgagatgaagcctccccatcttcctggaccaatcgttcttccttaaattccagtttcctacctgtcagcgctgttgmctactatgactgtgttgtgtgtaatatacaaataatgtatactgtctaaggattatcagtgagccatttcatgacctaatttctggctcttgatttttctgctgttttaaaaatctcattgaggtttaaagataacatataatattaggctagcagaataattatgtaaaatttaaatgtaaaagtcaactcatttgccttgaacccatttatttatataattaaatgtatactcttaatgttgaaaaagcatgatgacaattgaaataccaagatcagaattagagtcccactaagaaatgctccctttaggaaaaacaattatttcttttgatttcagccmtgagcagcacttaatataygtttgctaggcaccccaccagacacctccagtgaaacaagagcagaaaggcttagaggtataaagtgtctggttcctatgtagtatatttaagcacaaacagattaaggctgatggcagtaaaagccagtgacttaatctgactctaaagaataaacagagtttagaaagaaattaaaattgaagagaacattttgaatacatatgacagaaaaaagttactattttactactgtcaaagtttgatgagttcttacaaattaataaggaaagaaaaaacagggaagtggtgtttaggtggaaagtcagaaggctgctgtgtcagttcaggggagagatgatgatggcttgggttagggtcacagcagtagaaatagtgagaagcagttggattcagggtatattttgtagagccaatcttttgaattactgatggatttgatatgaaaaaatgagagaaagggcaaaatcaaaaaaaaagcttattgggtcttagacaatgggtacatgttagtgccatttaataatgtaaggaaaggagaaagtggaatggaacatttagttttaaccatgctaaagtttgagatgcctagtacacatgagtttctagtcaggatagagtaagttacaatgctgtaacaaacaactcctcaaatctcagtagcttcaarctacaagatttatttcttgctcaagctgcatattcatctgaacattcatcatcaagttggctggggctcctctttttttacttttttctggagatggagtctcactctgtcactgaggctggagtgcagaagtgtgatttcagctcactgcaacctctgccttctgaggtaaagcaattctcctgccccagcatcctgagtagctgggactacaggtgcatgctgccacatccggctaatgttttgtattttagtacagatggggtttcactctgttctccaggctggtctcgaactcctgagctcaggcaatcgcccaccttagcctcccaaagtgctaggattataggcatgagccaccatgcccggccagctggggcttttctctttgttattctcactgcaggacccaggccagtaggattattgcctatcactatggcagacaaaatgaatgagtagagaatcacacactggctattaatgcttcacactgaaagtaacatgttatttccacactcctttcattgtctaaggcaagccacatggttacacctaaattcaaatggacaggaagtacaatcctgctaagtgccttgaaggagaaccagatatttggatgactctcactatccaaatggcgacatcttctaggcagttacatatgtaaatctagagttcagggaagatgtttgcagacagagatttagaagttgttacgtatttaaaatcttggcacctaggaagaaagtgcagaaaccaaaaatagagagctgaggacaaaatatctatcctttaaaaatatattagaagaggagaaaccagcaaaatagactgaagaagaacaggagagtgtgtgtatgtgtggtgtgtacaagtgyttctgtatttatatgagcatataaacaagcataaaaatgggtttgaagaattagggattcttgtgaattttttagacattcatttgttaatgcgttcatgtattattaacttgaaatctaataagttragacaaaactgttacactaaaagtgtttgtgggaaggtggtggcggggagcagtaacatttaagtagactgaacaagtgagtataaggcacttgtaggaagctagaagaccaggtgagcatatgcctagacccagttagtaatgagtataattgcatmgaagccgtacacctgcatattaaaattaagcaatctgaatagatggagcaggcagacaaatatcccagaacaaaacccaaaataagtcacttatttaggaccctattttttaaagaaactataagcaaagagaactagcacattttaacttaaaactgtagttgtttctaaagcattttcattttgtttatcatgcctcaacttgatgcatattatcttaatccagaggtaaaaaggaatttttyaaattattggaatatgcagaatctagtaaacaaagttgtaaaaagaaaacaataatatttaaataagggttcagaaaatatattcagttgcatcccaactaactgagttatccctaaaatagaaaaggctaatattatttagggatatctaattgtgaaacaaaaggatattaaagaccagctttgcataatgacaacacacattcttcaacataaaatattattgactatgaattgaagaaaagttctgattgagacattttaattttcttctttgacgtaattagccattagtctcataaattttctcattttatatcacaagggctttaaagagagttggtgacacttctagggattaggtcaaaaataaaatcttaactaaagatcaaagagcaaaatagagccttaagaaaggatcagcttttcgaaatagttctgtcaccacaattaatcccccaattaagaaaccgaaaaaatacacagattcaccttgacttataatgcagttacttcccaacaaacccatcataaataggagagtgtactgaatggataccacttttatactatcttaaagtcaaaaaatttaagtggagccatcataaattggagactgtctatatattgtttccacatagaccagtgattctcaaccaggggtgatttttctctccagggaacttttggtaatgtctgaagacatttttgattgtcagmatgggaagttacaactggcatttagtgggttgaagccagaggtgccgctgaacatcctatgatgcacaggacatcctctacaacaaagaattatcccatcaaatgtgtcaatagtgtcaaaaatgataaaccctgatctcacttaaaataagtatacaagatactcctatacccaaacagcctatgaagatttggacctgtgtccttcattaatggagcccaattcacttaggattggatgaagaaggggaatctgttcagcctgcagactctggctacatgcagtccacactttccaccatgtttcagcagtaactgcttcatatgaaaaatatattccctgccctttgatttgctggtttgccttaggaagtatgataataaccaaacagattttcatacttgggcttgcctacttggtcaaggactgtgcatgttacaaagaattgccttaacccacacttttttgtgaacatatgtctttcactaaataaaaaaaaactaatttttataaatttgggtaacttttatgtgcttcctctaaaagcctgtttcaaaattggaattccacaaaaacagaaaaaagtaaaatatttctgtatttgagcaagagaacaagatacaaaaatagactcagtaaggaacagttaaaatctgagtctttatcaggaaaaacttttctaattttccaaccttaaaatcataattctttcctttccatgtggcccaataacttgactcatggattgtcaagcagaaacttttttgaccagggtatgcaatgaattgtctgccaatcaagatttttttaaagtcacttttatacagataagacagtcgaagctaaacccaaagattcagctatccacatcaatttgctcagcccatttagaggtagagtttttcggggataaaggcataaacttttacactttgattttcttcaaatatgacaaaattactgaaatcaatgatagaagccaagtcttatgaaagctattaaaaattttacatttccaattcatgtgaagtgctgagagggttataattatgatgaattatagaagtataaaaaagcataaaatgtataatattatttatagaatacaagacacatgctttcatatgttcattgcagcattattcacaaatagaaagaagatatggaatcaacctaggtgcctatcaatggcataccacattttctttgtccatatatgccatggaataccatgtggccataaaaaagagtgacatcatgtcctttgcagcaacatggatgcagctggaggctatcatcctaatcaaattaacacagaaacagaaaaccaaataccacatgttctcacttataagtgggagctaaacactgagtacacatggatatacagaagacaacagtagacactggggactactggataggggagggaaagaggggacgtggactgaaaaattactttttgggtactatgctcagyacctgggtgacaggatcatttggaccccaaacctcagcatcacataatatactcatgtaacaaacctgcacgtttaccccctgaatccaaaataaaagttgaagtcaaaaagtcaaaaaaagaagggaaagagaatacaaatatcacatctgagagtggtaaacatccacattttagcttgaatttagcaatgtctaaagacatatttgattgtcacagccgggttgggggtgctactatctagtgggtataggccagagatgctgctaaacaccctataaggcacaggacagccccccacacaaagaatgatccgtctaaaatgtcagtagtactgctgttgagaatctccattttagagagaaagagcatgaagcttagcaaagttagcaaactggccaaaggtcacacatctaataagtgaacgcatcaggatttgattaaacccagggttaagtctagcgttaatgcactttctawtgtttatactcaatttcaacctaatttattattgtatacaaatttagaataaacatctttatgcataatttctcatctacatttctgattatttccttagggtagatttatagaagagaaaagtgtcacaggaaatacacaattaaaggttttctataattataatttatatatataaattttataatttatatattacatttttawaaattattactacaaattataaagttttgattcatgtcatcagtttactttccttaaatctrgagctgrttcacattcctgatatcttacctaatcacagcctacaatgttttcttttaccttcttatttaatccttggcagtttgatcgtgtctttacctttaaaaaaaaaaaaaaaagtccctcctctcagatagtcttctttaactgcaactgcacacctattgactctaattagagggataagggaatgcagagttttaaagtgccagtcagagctcaaatcccagctctgctgctaactagttgggtgactttgtgcaagtgactctgatcctctctcctcattcattaaatggagcttgatgacaatctacctcacgaggactaaatgagttaatatttgtgaaatatgtagaatagtgcaaggaacaaacttaattctcaaaatgtattggctatcttccaatgtatcggctatcattattttttgtacttgcatgatgttttcatctttgtcaaagtgccttctgtgattctggaaccaatagtttttctgactcccaatgttatcctcattctccaaatatcaccccttttccaagcttaccatttaccaaggactttactatttaataaggccctgataggcatcattagggctacctattgctgagttatttatggcctggcttttacattcagaatttgtttgtggcctggcatcttattccagtcttccctaaacactgtattttcatataccctactactaaaccagttccacagagattacagattacacatctcagtcgttctctgctgttatattttcttagatgaacattctctatagcagtgcttcccaaagtatgctcagactatttaaaaagaagagaagaagattccattatccaaaacatttaagttacattgtgttctgcatctcccttctggtgatacacaaagtatattagcattttaaagtatttgagaaaaacagggataaagaaacatgtaaaagtttttaacaccgtaattcctgaatttatttgatcaaataacacactttttaagaaaatcacacctgtcaccatcttgtagaatagtatcaatgttcagttgggaacactgttgaagaatagggaagagaccatgagtgtccactagctcaagttttctcaaagtgggccatctgccttgcatcagacatagccaagttgctaattaaaaatgcaaactcctgggctaatcccaagtcttctgaattggaatatctgggaatatggcttgggagtattcattttattttattttattttattttattttwattttattttattttattttattttattttattttattttattttattttattttattattttgagacagagtctggcttttgtcccctaggctggagtgcaatggtgcaatcttggctcactgcaacctccacctcccaggttcaagcgattctcatgcctcagcctcccaagtagctgggacyacaggcgcccgccaccaagcccggctgatttttgtatttttagtagagacggggtttcatcatgttggccaggctggtctcgaactcctgacctggtgatccacctgcctcagcctcccaaagtgctgggattacaggcgtgagccactgcaccccgcctgggagtattcattttaaacaaactgccagagtaattttgataacctctaaagttttgaaattactgtgctaggtactaacagcagccagagtgtaaattacaaaagctatgactattttccttccgttaccattgaggagaatttttaaacccatagcctttgattttactgtgaagcacattgatgtaatagtgagaatcatgccctaagtctgrgtttaccagaaattcagctttygaatcacatccttcccaagtccctgtcagctgtgagcaatagcaaatcatttttccagtagcttaggagcctgtgaatggattctgttcacagctttaacactgatggtggggagtcattccatttcctcattgaaaacgactgttggcaatccccaggctggaaggatgatatagagaagcctagtgcatttctctgtggcacaggatcagagcagccacagcccaccaggtgcgccctgagagctcatattaactcactcttttctgtatatttgtttgttcaaagaagtcattaccatatctctttgtacttttctgctaagtagctctgaaaactttcagggagtttttcagatgaacctaagtgtataatcaatccttcattatggttttaaatccagaatgaaagtgcatctgaacttgacacacgtaaatagtagaaagtttgtttgtgcaggtgtatagttttagttttctttcttttaacattcttgctttttagaattattctactaaataatattaacttgttcaaaggtgtattcacagtttctcttgatcatgatgttcattgacatttggttttctaaataaaaaagaaagtttgattactattgaagaaaagttggggggaacatctcaytgtgaaatatttggtcgtattttgatatgttaagttgttgcttttcaatgtgtaaaaagcttttcctcttgggattattttacagtctacctctaactaaatttcattcctgacttctcagtgtattgaatgcttgcatctgccacacttgggggaaggaagcaccatgaaaatgctgttcttgaaaatttttacccaacttcaaactgtgttacctttttatttctgtttattttctcaccaatatgtttctagaacattcacattagctcatatcaccttagcaacctcatctctgtcaaacaccyttgcccttgccctggcctcattatcagcattagccagtcagtcacctgtttgggaaccaagggctcctcaaaatcgtgcagtttgaaatagattttgtcatgctatgcttacgggccaaagcacccagaggtgtaacaaacacttggtgtttagctatattttagggcaacagattccgaatcttccccsagcttggggattcagtgtgtctgcctagatcttcctgagtcacctcccagttgatatgtgaaagaagcctacaagcccaccgtctttcatatatcctccctgcttgtcctgcctgttggagtttgatgtcatttattgcttctctcacctcacatcagttctgttcaacaattttttattgagcacctgctaggtgctaagaataaaagattactaagtcagtcatgatttctgttcttaaggagctcactatagaacagaagtttacaatagagggtgatagaaaggtgtgctcagggttcactgggtcataatgcatgacacctgatttgtgaggtcaggtgtggtgggacatatgcctggacaataggcaaggagtccaatcactaaagatagtatacttcatccagtgccatcaagaagctatgaaaggtcagagtggtgttttagattgtgcaatctagcagctgtatgaagaatggatttagtgggagccagaagtagtactagttaaggagagccaaggagagtcatagtatttaaggagagaggtggcaaggacctgaaccaaggagagttttaaggaatagatgatgatgcaaatgaaaactgtgccccttcccaatcttttgggttagattccttctgggaatttaggatgtaatcagaatcagatgtaggtcaacatattcccttgtattataaatgtaggttgacagcctctactccatggaagcagcaccgctctgtccccattgctggtctcagtttctgtttccataggagaagcactacttggtccgcatagctggtcctaacttcagtttctgtctcccatactggtcccctgcctagctcccactggtctgctttacaagatcaccattgaggtttatgctgaccattcttaggagcttttcctgatgggtcactgacaaacatggtgcattcacyatgaactttacgatcttcatgacacaaagtgaagaataaattagaakaaattgtgttaagcacatttcattgattcatggagtagaatttcccttcactaaatcaatgcaatgagacatttcagttggggaagggggaagcagagactatggtgttttctagatagactatggggttttcagaattatgtcatctgcaaacagggacagtatgacttcctcttyctatttggatatcttttatttctttctcttgcctgatagctctggccaagacttccaatactgtgttgaataggagttgggagagagggcattcttgtcttctgctggttttcagggaagtgcttccagcttttgtccattcagtatgttgttgactgtgggttggtcagagatggctcttattattgaaatatgtgccatcaatgcctagtaaaccccatagtctctgcccaaaagctccttgagctgataagcaacttcagcaaagtttcaggatacaaaatcaacatacaaaaatcagtattcccacaccaacaacatccaagccaagagccaaatcaggaaatcaatcccattcacagctgccacaaaaagaataaaatacctaggaatacaactaaccagggaggtgaaagatctctacaatgagaattacaaaacactgctaaaaggaatcagagatgacacaagaaaatggaagcaaattccatacttatggataggaataatcaatatcattaaaatggccatactgcctaaagcaatttgtagactcaatgctattcctattaaactaccagtagtattcttcacagaattggaaaaatctagtataaaattcagataaaccaaaaatgatcctgaatagccaaggccatcctaagcaaaaagaataaagctggatgcatcatgttacccaacttcaagctatactgcagggctacagtcatcaaaacggcattgtactggtacaaaaacagacgtatagactaatggaacagaatagagagcccagaaataatgctgcacaccttcagccatctaattttcaacaaagctgataaaagcattggggaaaggactccctattccctaactggacctaggataactggctagctatatgcagaagattgaaattgggccccttctttcaccataaacgaaaattaactcaagatggattaaagacctaaatgtaaaatctataagtataaaaaccctggaagataacttaggcgataccattctggacataggaatttgcaaatatttcctgacgaagacgccaaaagcaattgcaataaaaccaaaccagtgtctataaggaacttcttaaacaaatttacaagcaaaaaccaaacaatcccattaaaaagtacacaaaggacacacacagacacttctcaaaagaagatacatccagccaataagcatatgaaaaaatgttcaacatcactaatcattagagaagagaaattcaaatcaaaaccaaaatgagatagcatctcataccagtcagtatggctactattaaaaaaataaaaaaatagcagatggtggcgaggttgcagagaaaagggaatgttcatacactgatggtgggaatgtaaattagttcaaccattgtggaaagcagtgtggcgtttcctcaaagaataaaaacagaattacaatttgacccagcaattccattattggttacaggcccaaaggaatataaattgttctaccataaggacacatgcatgcatatgttccttgcagcactattcatgatagcaaagatatggaattaacctaaatgctcatcagtggtagactagataaagaaaatgtagtatatatacaccataaaatactctgcggccattaaaaagaacaagattatgtcctttgcagcaacatggatgaagctagagaccattatcgttagcaaatgaacacaggaacagaaaaccaaatattacatgttttcatttayaagtgagagtcaaataatgagaacaagtgacccaaggagagaaacaacagacactggggcctatttgagggtggagagtgggaggagagaaaggatcagaaaaatacctattgttggtacaccaaacccccatgacatgagcttacctatgtaacaaacttgcatgtgtacccctgaacctaaaataaaagtwaaaggraaaaaaaagtaaacatgttgtagaagtcacaatctatgacagtcttgttctttgccttctccattgcttcttagtaatctgtaaagctattgtttctgatatgagtcagtttctttgtccttcccttttacatttcctctttttttcttaccttttttgagggatcctaagagagcgttttagaatggggaattcttaaagaaacctgcaaaatatattttctccattatgttaaactccatagcaataaacttggtttaatgcggtcagttttatcacagatcaggcctccctaaggcgaaggagctaagccagtaatttgggaaggctttgaagccacatgtgcatgtatacattaacctctaagactaaccataatttcaattaacataaaataatctaaagacatgctgattagacaccgtgtggctttaacaaagcattctgggcagggggttggggaatagagaagctttaactattcctagcaccagcaagcagggctttctttaatcatttataacatattttctcaacctttttttcttgcgatgttcttagagactaaaaacaacaaaattccaaaagcttttactaattaaaaagagaggaactgaaactgttatagattatgtcagtgaaatccactttaaaaaaaaaaagtaaaattccagctgtcctttaaagtatatgatttacaccatattccagtaaattgatgcaggccgataacttttcattcatttctcttgtgtgtcttgtggggcatacttagagcagtcagttctcctagggacaaagcaggaagactaactcgagcccatgttgctttttatgatatgtggttttgagtttcagaggagtcgagtgcagtgtgaatcatagaagcarccagctgaaaaatcctcaaccctataacaaaaagcagattttttcccatatttcttccaagtttttatttcacatgcaagtctgagatacaaaatattctgtaaaattttaaggaagccacagtagttcttactgtttggggatttcccrgagagaataatcgtgttcagaatggtccttttttttgccaaaaggtttattatgtgaactgaacggctcaaccaaacagataacaccatctccattttatttttacatgttatttactggggtttccctgaagaaagcttaagaattctttccccatgagtcactgaccaagtaattgtttttttaaaatataaactttccttcagctggtcaatttggaacgcagtcttctcatcttctgttcacttcagggctgctttgccttcatctgtaaatgatcacgtctacagccaaattgagcagctcgaatgtagccaatttctttccattgagcactcaagtttgaaaaatcaacagcccggccaggcaagattcagaggacttcatcctctgaaagtgacttacataattatattttcattgcgttggcaaaaaatgcctctcattggtttaatttctgctggaattaatgggatgaggaattgcaaccatattttgccaagaattgtgagtggttgctctgcccaggttatgttacccttttactgttgtgagtgggttagaaggtattgtcttctattctcgtcttcttattgaactagaggctgtaattatttcccttggtagtggctgaactttctctttaaatattgacaccttcacaaatgtgttaaaacaagcgttaaagttggctttttccccacgaaaatggccctataattgcaatcttctattctgaaggagaaatgttgttttacagaatatttctgaaccccttcccacccactttcccagtggctataagaagcctgctgttgccaactgagtggtctagagtccctgctaattacctccttccacagcttttgatttggagccgaactgatggcgccagcggctgaaccacagtcagatctacaggcctctgatttgccaaatggaatctatgcagtttgtttcctttctcacagtgttttatgatgagactcagctcaaactcgaaatagacgaggaatcacttcaaaatattaatggttgatttgaattttgaagaaaaatagccatcagaattctatattccattaccaacatacatgtatatgtgtacatgtgctcacaaaaaaaatcacaaaatgtgtttttctaaagaagcattctattaattgtattccattaagcatactartaccaaaagctttcagaatacttcatattttatagccttataaaagttttattctatctgttgatcattaatatgtagggtctcatgtccacatcagatgtgcctagagtttttctctaaactggcattcttttaaaatatagcttggaaaagaaaacataattataatcatagagggaataagaattgtctttctcgaaagttcagaggcattagcctgaaaccctaacagttagttgagagtttctgtttctcatttcatagaaaggaattaaacaaaaagctttagtttcatcacagttaaaaatatttagttctcaaaacatattttctcagctgtgtcttgctttcttatttgaggtttcttcagaaagggaaactgattatattagagacaataatgttggaagacaaaacagttctcagccaagtgagaatgaagggcttcctaagtgaactactcccttctctccttattaatttggctccaaagtcaagcacatcaaaatggaaagtagttctcattctttttattgatgtgaagtcaaaaattctgcataattttaaagagcagataatctaaatcacacatacatatacatacatacacatatgcacacacactgttatccattagaacaagtcttctttatcaaatacctgacttttaagtgtatttgtgccacttgatttacttattcattatatagacatttagttagcaccttccatgtgtccagcatcatgcttgattctgggcatgaaatagtccctgttcccagggttcccagtttagggggagactgataagaaaataatttcatatcaccttgtaacataactgctatcatcgttatgttaggaggtggagatgagaggtacctaaattacattttcctaacaagcaaagatgtagattagcagccgggcggatcacgaggtcaggaaatcgagaccgtcctggctaacgcagtgaaacccagtctctactaaaaatacaaaaaaattagccgggcgtgcttgtgggcgtggttgtagtcccagttactcaggaggctgaggcaggagaatggcgtgaacctgggaggcggagcttgcagtgagccgagatcgtgccactgcattccagcctgggcgacagagcgagactccgtctcaaaaaaaaaaaaaaaaaaaagaaagaaagaaaaagatgtagattagcaaatgctttgaagagaaagtgacttttgaatggtcacttcaaaagtaagaatcaggaagaaagctatggaaaagagaatgcatcccagacagagtaacagtataagtaaaaattcagagaaatgagagtttattggcgtaactgaaggtccatagctatggctgcatgaagtgcatgtgaaggtgtacagtgaagactgaggggccagggaggtagacagagagcaaatcgtgctgggccttgtatgccaagggctggaagactttatctgaagagcactgtggaatcagtgaagacatttaaacatgggatcatctttatattttagtaagagtgttatactaggagtgagtaagtatattaggatgtaggactgacgactaagatactgttgcaataggtaataaatgttgaaattgggatagacagacttctgttttaaacagaaggacaaatcagacaccctcatggacatatacacatatttatagtttaaatgatgaagaaaatagatcaaatttgtattaaatgcactaccaaaatgaattaaaaggaaagaatccatagaagccagaaaatgacacgaaagcaggaaactaaagcactggtttccatcctgaggatttcacccaaatttttgagatcttgtgcctccatcatggtggccaaataatgcctggcaaacaggtgtaaagcttagtacattccaagttccaaagactcctaacaggagcctgtcacacaggctgggactggaaaaaactgtatcctggtctaagaatatactaaaaataaaaccaatgtccagaagaatgcagccaggaaattatattgtattgaccttggcactaaataaaaggggagtgatgggtggtgatctgcctttaaactgcatagccacaagtttgcccccatttgaatgtaaggtctgaattcacactacatgtgtgtttgagcatctcaaacctcaagtacagaatttaattttcctgggttagtaccaccctcagaggaactagcagaagccccccccgccaaaaaaaattatttcctctctgtaaaaatgcaaattcgacccagsccttaactccccaagatagagttctaaggaaaatgaatagcttacaaagaacaaaggaaggaaggacataggaaataaaccactactgagaataggagaaacaacaggctgtgaaatcagaccttcagagatgagatatttacaattttggagttactaggtacagaaataaaaagttgtttaatatgtttagaaataaagargctttaagtatgagaagaaaagatcaagcagattgggggaatgacttctagaaataaaatataatcactgcaatgaaaaattcaattaaaagtgtcaaggaatcagattagatatagctgaacagagaattagtaaactggaaaatctgtagtgatatgaatacactgaccagaataaagtccaagccagaataaaatccgaaagaaaaggattgagatcacagattgtgttagatgagttctaacatrttctaatcaaagttctagaaggaaatagtagaatggggaaacacagtattcaaagacgactaacagaacgttcataacagcactgtttgtaatagtgaaaaacctggaaataatctaaatggccattagtggaagggcaaattagtaaattgtagtatatttacacattggagtattatatagcatcccaaacaagtgaactccagtacattcaatggtatgcatgaattggcaatataggtaaaagaaaattatatataatatattcttttttatgaaactaaaaataactgataaaaataactctttaagactaaatatagatgcaataaaaccataataaaaggaaagtaagggaatgataattattctcactgatagttactttgagtgggagaggcagggggctgagttggcagatggtattacatgatactgtatgaacagatgcagacgaaagtgtgccatgaaccaaggattatagttaatccaattccgtatactaaaagtacattgaggaggtaggaggagagagagaggttgagaattttctaaaattgtygaagtctaacaattcttagaatcaggaaataaaacaattctcaaataggatttttaagaaatgatacataataagtaacaacaagacacatcatagtgaaactacagaacaccaaagaaaaaaagatcctaaaagaagccagaaagctaggtcacctacaaaggagtggaattagacggactgctgattagtttaacctgtacaatatcgttcaacagatgagtggtagagccaggattcagatccatatcttctgattcctatgcctatgttccttctaatactccaccaaaatttttcacacatttatgtacagagtattttgtgtactgaaataaatgtaaaccaaaaaagtaatggaaagaagaaacccaataaaaagaaaagttagtgttacctaacatatgaaaaatttggtaaaatttacatgtatttaggtacaaaagagacaagggaattagcatttgttaaattcctaaatatgtgccaggaatagttctggtgctttaaaaaaaatctcattcagttatcataacaaatatttctgagctagagttcttatttccattttgtggtggaaaagactaaggcttggagagattacatgatttacccaatttcaaaagytagtaaatggtaaattcaaattctgaaaaggtgcagccagtcccacctgacccatcgtcttcccagtagcattgtcagtaaacgaataatgtaatttatattacctaaggtgtcctaaacagagcaccttctctggcaaccttctgagaccaccacccccagtgtcaggggttattgccctcagagacatgtccaggaatattagtttttcctttgcacttctctaggcttctttcccacttggatgctctacagattcctacaccacatttgctcatccatttaaagtgctatatactgactattttctaatggttttagggttttgaatccttgctattacacttactcgaaaaattactaaatccatttgcacctcaacttcctcatgtgtaaactgggataataacacaccttttgaggattctcgaaatgattagctgagaaaatgaaatccataaagctattagttcagtcgctggcacttgaaagttttcagtaagtgactactgctgccattattagatcctttgcaggtacagagacagcttttatagtcagagggaattcattttgtctcctagtttgcctaagaataagtgatccatctttatttattctactgattgtgatctgacatagtcttggacctagttattattaattttagcatatgttaataagaaaataattataaaatatcctgttctgaatttcatttcaagataatgtgaatatagcaatacatgatcaaatatctattttctaaattgagattttaaaaattcccaaacttcatcccctgagttgaattcactagaatgaaataaatgaagacaatgttcactaagcttctaaagaatccacatgttaattggatcagtttgcccaaagactatttttgcctttaggatttattattctgaattaagtcattatatggttgagtgattatgtaaaaaatcatattatttatacaatgatatgtgaagaggattactataatgcaagaggttaaaaacatagaagcaccaagccctcatgtatatagaaaactcatgctaaggccagaagaagcagaaggagagtcagaagaaatataccaaagtggtaaacatgtatgctgtgctatgtgtgcccacataatacataggaaatgctaaattggtatcgatttctgaaaataaaaatgcctgttcttttttcaaattatgcaawcctgataagcctactaggcatatacatatatatccttttaactaatcackttatcatttttttccaacaaagaatataataaatgaaagtcaccttctgggtgattagtggcagttgacttggagtttcagcccttcctcaggactttttggcatagtaataacattgcaaagttgctcacatttttcatacccttccatttkatctgtgtgtgtgtgtgtgtgtgtgtgtgtttgtgtgtcttgtatgtggaatattcttacagctagtgacttaatatgctgatgaacacagagagctggattttttttgcaaaccaatatttttgtgccatttgattatttaggtgatattcagccttttcaaagattacttaactgtcgtggtatcactacagaggaagaaaggaaattctgtagttagtttaggagaaaacgtaacgtaaaacaattcttcaaggaacctagcaatgcaataaagtatctagataatcttttagaatatcagagcctggggtatgctaatgaaatcatgggagaagaaaaaagctccagttctcactcacattaaaagtgctctcttttacacaagacacaattcataaaatctttttatatcagcagggaactcatctatctgtatatacatggaggcaggcagctgttaacagcatagcatgacactgctgaacagttcaggatgcaggataaggaatatcattctatcattcccaactgaaacaacatcagaaaatgtagacaggctaaatagaattatccaaaatggagcctgtctgaaattccaagtctcccagagacaaaagtactattcacctcttcttcctttctatggctgaaattcatttgcatccactgacatcctttaaattattaccctcctgggaaagtctgcaacccttgtagaacacttataaacattcagttgtttctgatcagacctgtgttgtttgtagttctcctgactcatattttagtatcttaggaaggaaaatttagtgccacaaatgtttaccatctatattctcttggtttctgagacttcccatggcaattaaaaaaatttagatattacaccttttgcttcaaaggtcataattccagaagtatgactcttatctgaccttttagaatgataaatctaagaaatttttgtgttccagagaatgaatacacaaaatgggaactagtgagttccaaagcttctgctatagaataattgatggttttctccaaatatttgttaaaattttaatataataaatactaggattttttaaagtaaacttttttagcaataagaatttagcacttccaaagcagccacatggtctgttgcccaggactcccttaaaaattgctttgctgaggctgttcaacatctgtcagcattttctgcataaaccattggctcaaaaaaattcttcaggctgaaacttgatatatcaggtctcagcttagcagtttttatgtgttttcaggaaaataagtttggatgttttcaagttagtgctagaggagaaacacattctaatacaccatttcaagacacccttttattttatacatgggtgaaaggaaaacagacttctacccaactaaaatggacagaaaatatctaaacaattgttgtgaagttttcttcacactgtattgctaaacaggatgtctttattggagctatgtgactacattcttcrtagaatggcatatggaactctgcccagctttaatgccagaggtcagaatgtgcccacctcctggcagctgaggatgaatggcttaagtgacaaattccgatccgtcagcttcccagatcattgaacagccaaaggagactaatacaataaacaacagtttgccaaaaggcatcatgatccactggtggattgtggttttacacagcttcaacatacattatcctgacgtctaaaattacatctcagagtacagctgtgtgtgtaatactggacttcattccactggatgatcccatgttgtccacttacaacaggaatgcacttttgaacctagagctgtcactacaaatctcactgtgagtgttaagaattcatgaagaaattccaatttattgatttgcaaggatttgcctatgaaggtagagagaytgtatcttaaaattgccattccattaaaggctaaaaaagtcatttcaatgactaaagttcttatatcttttagttgactatttgtaaagtgaactttttttttctttttatatgagtgttaactggaaataggcaaggaatgagcaggactttaacattctagtcctctgtgtcagctgtctgtgttacagaatttatttgaactatagagtccctaaatcactacagcataascctcagggaaaataaaaactcaaaaatgtataaacaaactatactaaaattgagctactgagcaccttagtatacttgcttccctttagttaacgtattttcaccaacaagggtgtgtctttcaaggctatctggagtatacctgtggttttagaaataccaagtgactcacctccagtagttacagtggtaaggaaaaagttgttacctctttcctttggtgattctggtgcacatttggaagatacagctcaaagcaatcaataccctgggcctctggcttctaatatattaatgtctgctctctggaagacccatatgcaccacctgccctctgaatcctgagtgatccagatcctttggaggacttaagtaaataaaaattaagagcaaaacaaatggtcttgaaaatcctttccaatagacacaagcaaacacaatagggatctgatcatttcactttcctaaattttctgtttccccattcagcacagtggaggaggacctctgagattactcttctttttcaaatccccacctcaaggtattctcctcacacttccgccacccacatacacccctgatgctccatccaccaagcagccatatccrcaggccacaggtgcaccatcctctgccctgtttctgcacctttgcatgtgtagttcctcctgcctgcaagatgctgtcatttattctataccggatgaacatcttcctacccatcaaaacccagatcactctctgatacattctttctgcattccatggaatatatagatttgactgttactggtttataatcaaatttgtcatctttcttcacaatagtcctaaggtttatgccagtcttgtccctgtctcactaataatgaaattaagatttgtagatataaaataatatgacacatattaaaagcactcagaaagctaagggtttttcttcagagcttttattcatttttgtatctaatgttgaaaacaagtaaaaatatatacagaagagcccctagctgaaatgtattcatatggccccctgacctaatcacagattcttctatttcaacagaactttcttcctcacagatataagaaaatgtcccacttttcctgattgatttgtgcttattgattactgaacttagagctcggaaacttgaatttycattttatgaacgctctcaatttattgtatggccttggaaaaattatgaaacctttttgactcttagcttttgaaaaagcaaataataagtctacttatatcatgaagctggtctaaagttcaaaacaaactatataagtraaacaacttgaaaactgtatgcctctacattcatacaaagtatatattcatatttatatgactagtgtacagtattattatcagtatcaamgaaaactaaaagtctacagtatatggagcccaaataaaatttggccaaaaagagtgcttaggatgtaaactgctttcagtttcaacctttgattccacttactcgtggttcacggagagctttgtaaggatcagtaacttctcygaaataggtaataatagtgctaactgggaggtatttaggacataaaggtgttggggtgtgtgtgtgtgtgtgtgtgtgtgwgagagwgagagagagagagagagagagagagagaaataagacatttttgctaaagaatatctgaagaaaaaaaaggccaaggacaaaatgttgtagaaaaaaccgggttcttgagttcttgtctcttgaccaggaagagttagtcacgcagacactctgaaggatgagagagaacagaatttattgggagaaaaggaaaaaattmtcagcaaagtgagaggggttcctgttaacaggcccccatttcacagattgartcctggtttatcacacagaaataggagaggccaggctcctccccactgcaaatagcaccaacttcccaaggctgcaccctgtcctctcagtgctcaggctggtgggagattctctggggactttcccccttatcttcctcctgcttctatcacaatgagaaatctcaaatctttattattctaacctgtaataagtccacaaagacatgtagagtttgatttctagtggttttttttagactggctatcttgacttcaaaatatctaggaatattaaggacaatgtgacaattgctcttttaaattcctgactgagcacacaggaggatgagaaattcctgggtaagaaaataaaaagggagctggaaagcagagggcytatggtgaagccacagctgtccttggggcatttgctatcactgcacacaagagctttggatgtacttagacatatggagataggagaaaatacttcagcccgaaaaaattggggaattggaaccaagacccctacagtaagccaggacacttaaaaagctacaccttcagtgaaaatggtgaatcaagaaaaatccgcttgccgttaaaaggagaaaatgaggaaagttatttgtctcggcttgcactgtgaatrgaaggagagaaaagtctttgagaatccatttgtataggttcctcattctgtaatttgagattcaaatatgtatcacttacatgcgcaagcagaaccaaagctgagaaattaaagtggaccaaagttggaagcagttctgggagcctgtagaaacataaatactctctggagcaacacaccctcaaatcagatctaatagaagcccagctaaacttgaatacacaatccaacatttaaaaggacacacacacacacacaaagccatcatgagtaagtcaagagaataacaaacagtaggaaagattttggactatatttaaaaaatttaaagaaataaaagagcaaatgacaaatttgagaaaggaacactttctaaagacaagtcatatttttaaratagccaaatagaacttgaaaaatgaagtgcagttattgaaattaaaattttatgaatagattaaacagctggagagagactacataaaataggttctacacagtggtgtgctgatagatgtttaataagtagctgtccaggatgggggaaagccctgttctgtagcatttgctaatttccatggtgtgaatgctcccaccattggtagtcaattttaagctaccaatgtgacgtagtgaactggaaagagacgtgtacagttggttctcatgagctggtataaaccagctcctatacacgattggatatataactgaataaattacctagaatgtaacacagaaagatggaaagataggaatgtatataggacacgaasgacaggctgtgaagrtctaatatatgtttaatcatcattctagaggagaataggagaatgactaaaatgtttccagaactgatgaaagtcatgaattctaagatctaggaagamcacagataacatccagacatacattataatgaaattgcagagcaccaaagccaaagagataaccataaaagcatccagagaaaaaatatatcaactactaaagaacaacagttcagacttcttaagagcaaaagtggaaaccagaaataatggaatcatcttcaaagtacagagggaaacactgccaagctacagctgaatacctagttaaaggattattttaaagtgaggcctaataaagacactttcaggcagcaaaaacagtttgccatcaaagataaaaggaacgaaacgaaaaaatgtactttaggaagaaggaaaatgatccagaaggaacatggacaaagaagtgggtaaacatttaggtaaatctaagccaatattaaaacaacaagaataatagtaatgtatggtgattaaaagccatctgaacagttttattttctcacaaatactaaacagcacttaatttaattacattgccatgtagaagttttaaccatattttgttcatttttgacttataaaacaatcaggaaaaaacagtaaacattgttatataagatttacttattttaatccaagttacactttgctaaacatactgaaaatttgacggggttttaaatttgtaatgaaagagccatagactcctcagaattttttttttaattgtgttgatcttgcacattctattatgattccaggtcattacctaagcaaggatttccaatttaggctgagctgggaaagacattattatattaaagtttatggttatgaaaactgtacccccacaacactggaagtacaggacctttgtttctctccacccacatgctggtgactttttaccactaggagagttatgtactcactgtgactcacagaaaaagataaggttactttatactatmtctcaataaatggagccaaggatccttggagaaattccaggactggggcagagaaagtacaagatgagcctggaatgtctcatgatgctagaaagtaaggaagtgctcaaaaccttatggggatatatgtgaaaaagatacaagaggcaaattacaggaggctcccaatgactaaatctgggacaatttcagaaataaaataatgacagtaatggattataatccatagaataaaataagaatccatacttacataaataaacagttgaatgagtaattatatgaaggagaagggaaagctgttcctcataattaattaatttagaagagaagatcaaaatttaaaaatcaccatttgcaaaacatcacagtaatagtttctcttaagaatcatcaatggatgttaaaatgagtaggtaaaagtatgatgagaaacaggatattcacatagcctcaaatatcacccgcaagatacttattaatttcaaaggagaaaaaatagaaactttacagtggagaaacctggaagacaccatcttaaccaaatgatcaaagttaacatcactagtaatgagacagatcgacatcacatgtctcctgatgtaatgcactgagaaagacacaccatttatgtggcgtgtttttgctaaaaatgcacaacctgaaattaataacgaggaaacatcaaattgaaggacactgtacaaaataactggtcaatactgtacaaaattattagggtcataaaagatgaaaaaagactgaggtattgctccaaattaaaggagactaaagaggcataactaaatgtaatacatgattgaggattagatcctgggtcatagtattacaatgtcaatttccttatcttgatcattgttgtgtagttttgtaagatactaacattcgaagaatctgggtgaaggatgtacaggaattytttgtattaattttcaaccttttaataagacaaattatttcaagatgaaaattattttacaaatcaaagatagtgttaatgatagcttccttagacctctccatcctcccatattctaagaaaggccatttatatgttacctccagttctgtccacagacatcaatgcatggcttcaggaaaagtgggccaagtgcaatgctgaacaggaaggaaacagtttgagtctgaagcacaaggttcctactgtgctgaatcagtgtggtagaggctattaaaatgccatcttttcctacctcccactcctctccttcttctgccttcataccctacatcccagaccgcttttaatcctattgggagggtatacagagagaaataaagaaaaaataataatgaatggctgtgttctttggcacatgaatagcagtttccctttcgggacttcaagaatamaaaatgagaggctttaaatcttgctaacttgtgcaagaatgtgcgcgtgtgtatatgtgtgtgtgcgtaggtaaaaatgtaaatgaccactatggaaagaacaatgctrgcttttaaaatctactaaagtaaaagaaataattattcctgaataaggtatgtcaaacaccagtgggaagaaagaagagcgggttattttgtttagagctggatgaattaggaaaatccctttttacagctaactcagagatgagctgttgttgccaagatgtggtttatcaaacatctaggctatctcacaggatgtgagttggtttagctttgtaaaatagctctatttttattttagccaaatctctacaagactctcagtcagctccctcccccacyagaatgaaacagcaacaacagcagtgaaacctgactgaaacagcagagtaaatgttggccagaagcctgctgtgatccagcctggcttttagaaggagtctctctcagtttgattcattgcttctcacaagccagctccagactgcttttcttgagataaaataagttgtagaagtataaagggaatgttgccactggtaattctttttacttaagataataaaaagcacataaaatttccatgctcatatttgactcctttccgggtctcccttcctgattctaacacactgtggaaatggtgcaaggaaaaaaaaagccacagacagagtagtcggtatgatttcagaccacatgactcattacttgtgcttctttctggagcagtctgttttctgtgagctggcttcactctggttaatcacttagcatggtgagatttcacctggttgcccctctggtggctcagacggggcctggggcatcactgaatttatactgaaaatcagatgggcatctgaacaactcccacaaaacacacacacacacacacacacacacacacacacacatttaatcagcatcaagtagtgcagtttcctttctaagtgatgggagctgctggctgttgtttttggcttgaggccgcatagaccagccagccgttgtgtaagcatggtctgtctgaattgctttggggctgtcttcttagaaatcttcttgctgttcattattttgccagcaagccataactattactttttttttagattcctcaatctatgttttctctactgtaagatagtaaaatgtagagaatcagggagccctataaatcttgaagattttttttgtcttaatttctttaatttgagattggcatttaaaaccattgtagaacttgtgaacttgctaagtttaaactacaatttggagtagggagtaataaccaaactgttcttctcatgttgttttaaaagcttctggtgtatatgcctttttattttttactcatcatacagtctattcagaaaaataaaawaaaaaaaaccttaagtagctcttggcagaaggtcaaaaccagcatttcagggaaggtatttaaaagtcttttaagtgtgggctatttgtataagcaatatctgcacgtttcttatgactgggaaggactattttcacagtctttcatggaaatatttctagacaattttctgcggctcttttccctgagctcatttatttgcttttgcttcagaacacagcattttaatgagcagttttatgagcctaacctgcgttctgcaagctccacatgactggattcctgttgcacataacctttgccctattttccattaaaacacaagactttcctataatcaactgtatactatgaccttggaggaaaaaaatgcaacagatagtttagtctactatttagtctactttagcacactaaaattgatttttttaaaaaaattagttgtttccttataatttttaaaagtgtacatattagtattttcatcacaaatttattttgtaagatgcctaattcaatattaccatatccctctgggtaaataactcatttagctatctttataatccactgagggatgtacaaaggtaagatgaaccccaaatcawtttggaattatgaacattcaaaacaaaataaaatgcaaagttttctatctccacttggtcttacatataataataggtgtcaggaagttccttcttatagcaaagctaaatcatcatctgatgcattttgactcctctttgtgctttaattcaaatgtaaaacaactatttttcactttatagatagtatcctactatttttatatagaataactttctcttgtataccctgagacatccaaatttgtttacttttwcytccaggttttacytccagtattttaatccgttttcttaatatctgctaaatattcaagctctccctttcatttgagcagtagagcctcaggcaaaatgcagagcccctgcaagggtctaacaagtgctaagaacaatggagctattgttgtgtaacacacccagctcccctctggatcatgcattccagccatgtttgccttttaaaactacactatggatttaaggtagtctgcggttgcttgtaacacctttgctctttttctgccctgcttactttagccaatctgtcctcatcttataattctgtttacattttcttcttaggacaaggaaggcactctttaaaacagagtgcagtaagtttagggcaaatgaaaggaaatctacttcacatagcaggttataaacttgtggaactcattagtcccaaaaggtgggactggcaggaaatgtaaatgaattcagaaatcttttagccagatttatgaatgagarccacaaatggctactaagaaaactggggctatacctgacttttacaacagaagtcagagaacagctttgagctcccgcacaggatgactcttgagacttattggggtggctgaccttgggtctggcccactatgggatttcctgagcatcctgtgtcccttctgcacttgttctcgtttcactgggtctcagaaagaaccagtaaggcttatgtgggaggggcaactttctttttaaagtagagactagaagaaagcttcgtaacttctcctttcccgttcaaccatttgcctaccttagtgccaattatgackgtcagggaatggtgatgtctgtctagtagaaactagctgagatcacatttgaatgttaaaacatagatactttcttttacgctaagtcagacacttctttttcctgggaattttcaggcctgagaccataaatagcatttttatttcatcctgtactctatcctcagtagaaccttcaatcacttaactcccctgcttttcccagacttatatctctttactgcagggttctcaaactggagtacttaaaaaatgcaaatgctcctggcttcaccccagaccaattaaatcataatatttgagggtggagcccaggtatcaatagtctttaaagccatcccaggtaattctcccagcagccaagttgagagtcttgacctgacaagtagtgttaggttctctccttaccctgagctccctgtttggcatctcagtgttgtctgtgacatcattctgcaatagccacctctctatgttaaatgtttattagtgattatggtgaagctttctacacaagtcatcagtgctaggtctttatgctttttctgtccttccaaccgtgaacgcttagtaaaagaaaacttgctgcaaaatctggaccattgcaaatacccaacacttrtaagaccctgccctcctttcactcacctctttgttgactagccaatcacctgctccaaaaatgatcttccatcacatctgtccctcacttttcctgtaggcaagaatgtcacctcttaagagaatacagaagccaaccagaagaagctgcccaatacctttatctttacctcagctgagcattcttccaccattctcttcttattcttcctttaaattgttaaaaagaaaaattccactttcacttattaaatatgattgagtaccaactgtgtgtaatacattaaaatacaggggagaagacctattagaaagcaattaacaataatacatgaaaagaatataaagccttaacgataagaaatgtttaataagctatgagtgtctaggaaagagggatcatttgggccaggtcttgaataatgaaaagattttagcaatcaaatatcaggcaaaagggcattcagattcaaaggggcaacatggctaaaggcaccaggtcgtgatgtgcatggtttgatttgggaatagcaaaaggtctggtataactggaatatggcatgaaaggtgaatcttttcgagtatttctcctgtacagcatactgaatctcatttgtttgttgttatttctagtgtctttagtcttttgccttctggcttctttttaaacttcatatatacacatgtcttccctggcctaaaagaaacatctttgacccaaccctggwatcttgataaacaccgtgccattcccttcatttttctgccaaactttcacagtatgacttatacttyctttcagccccctttccacattctgcacctcaccctcctaatccagcttctggcccccctttaatcctatccacaaacccccatccccacagaaaagctctgttaaagattcttccatcattcagacaaagccattgccagccctcattctatttarcctcttagcaatatctggcactgttaatgactgcctttttcttgaaagcttttttatctaaagtagcctgggatgatgcatgatctttgaaccctcctcaccttttttttaactccttatggtctcctttgctggcacttcttccacctccttaactgtgaatattcatccccaaatactttcctccctctctttcttgtttcattccattatttattcttycattctgaaagcatttactgagtactcacactaggccaggcactttgctaaacacaaagacaaatttgtttttttctgtacactcattgcttttaagaatgttttctattcttatggctccagcttccaattttgtatgaaagatttctaaatctacattttctgttgtggcttctgaatgctcattctgtgattccagttgccaccagrtatgtcctttgcatctacaaaatttactaaaaaataaactcattttttccataaaaaccgatttctctgcctcagtttatttgccccaatctatgaagtcaccatatcagtcttcaagactggacatctgagcatattattttactcttaatagattttgtatccaatctgtcacaattttccaataatttcttcttgagaatgcctttatgatctactggttacctctccatttttatagaaacccacttgattcagacttcacacatagtttcttactaaagacaataattgatctccctgcttccagtctcactctccttaaataaattcagcctgcagttgccatactaatcttcctaaaccactgcttgagcacatcctttctggtgacctttcmagcccaccacatgtcatctcatctccttagcctaacccaagttctccacaatctgaccactcattttgcaattcagccatatactcttcttctcaatatatttgttaccatgtcctccccagtattttccctaacacatcaaactaatttccacctccattccctttgtttccctcacctagatgccttctaaaggtctgcatgccccagtacaaccaggccaagtctcactcactttctttccatagccttgcctggctcctgaaacctctagaaaactcttctctcttgaaaggctaattacacttagaggctataccataccacttagttcatattacatgctatctttatgacacattgtttttggcctgttaatgggctcctccccaaatacagggtaaacktcttaggtgcagaaactgtgctgtgactttccctttaatctccaaagaaacctagtgcatgtctcatcatatattaaatgtttaatatatagcctgggttagttgtaataattatctgtgcttcaataaactggtttagaccaagatagactctacaagtacaacagaaacttatgtttacactgtgtataagggggtcrttttctgctgtacaacattagtatctagtctgcatgtcagttttgaagtagatgcctttttctaactcaaaaagaggcagttaaggagtaattattgagcctccagatctaaataccaaattataggaaatacaaggagtggaagarcacattaaatgatatgcaggggatgcaatcagccaaatccacactgggggattggacagaatctataggacaaaaaaaaatttttaataacaaattgcaagagcaagaaatagagagatggagaagtctgaagattaaaatagmcataasagaaatatctaccaatcacagtgacatggtttggatctgtatccccaccaaatctcatgtcaattgtaatccccaatgtaggaggtggggcctggtgggtagtgactggatcatggggatggatttctcatgaatgtttcagcatcatctccccttggtactgtcctagtgacagtgagtgagttcttataaaatctggtcatttaaaagtatgtggcacctccctgctccctctcttgctactgctctggccatgtgaagtgcttgttcccccttcaccttccaccatgattgtaagtttcttgaagcctccccagaagccaggcagatgctagtatcatgctttctgtacagcctgcagagtcctgagccaattaaacctcttttctttataaattactgagtctcaggtatttctttataacaacacaagaatgaactaatacacacagtatatggacttatttcgattcaaactcaaacacataaccttaaaaacattctttaaagacaactggggaagtgtaatatgaatactaaatgtataataatgttaaaaaattattaatgttttagataataaaaatagtattgtgtttatgttttctaagggttcttatcttttaggattatacactgaaatatttacagataaaattatgtgatatctgagtttgcctcaaaatagttgagaagtatagacggaacaaggttggccatgtggtgaattgttgaagttgagtaacgagagattaatttgtactattctttctattctatctacttttacatatatttaaaatttctcaaataaaaatatttttaaagtagtcagtcattgatgttaagaaattcttgttaaatatttttgatgtgataatggcactgtggttatgagttttgaaaaggaatttttatcttttagaaataccaactgaaatattcatgcatgaaatgaaaataatgtagacattgatgtcgttgcatttttaaagattataataaaatgaggcaaaaaatgtttaaattgtcatttaaaaatttcttatccccagaaagacatccataaaccncaaggtgagaaaacaatactttagacagttatgtaaagcctgttctgtgttttgcctgtttatacctaaagactacatagcaagcaaatctgtgagttgcacatcctgtagatgagcgcaaagagatgagtaaaaaataaccaaacactgtacgtgagaagtcataatctttaaagatacaggatttgtcttaagagtaatggctttaaaaactggattataatccaggtaacatcaaccttcaatagatatacattcagacatgctagtgccagataaagtggctaatgcctgtaatctcagctagttcagaggcttaagcaggaggattgcttgaggacaggagtttgagaccagcctgggcaacatcacaagaccttgtctcttaaaacatttttttaattaattagctgggcatggtggcattcacctgtaaccctgctacttgggaagttgaggtaggagcattagttgatcccagaagttcaagtgagctatgatcacactacatgactgcagcctgggcaacagagcgaggccctttttctaaaaaaagtaaaaaatgaataaataaacatgctaaagtattccttgcttttgaaaaacaaaacaaaaccaaccaaatacaaagaaaactccagaggctttccccaatatcaatttaattcataaatttagtattagccctccaaaaaacttcttttcagtgaaatgttgattattagcaaatttatctgatttcaggaagaagagtcttgtctctgtgattagaatattcatgagcaatcaaatggccagtaagttaatatcagaacctagctgaatgtctggaaaacctacaagttagaaaatcattcatgggtgctcactttagtagcacatatactaaaattggaaagatatagaaaagattaacacagcccctgcacaagaatgacatgcaaattcaggaagcattttgtatttttctgaatgagaaatttaataaagagatacatattataaaaaagaactaaacagaaatcttggagctgacaaattcaatgattgaaataaaaaatacaattgagagattcagcaatagaccagatcaaccaaaagaaagaatttttaaacttgaaggtgactattttgaaataacccagtcagaaaaaaagaaaaataaaaaagaattaagaacacctacaggacctattgggacaccactgagcaaatattcacagtatgagaatttcaggaaaggcatagaaaacctatttaatgaaataatagctgaaacctttgcgtgtcttgatagaaatatagatatctagatccaggaaactcaaaaccccaaatatattaagttcaaaaaggtcctctccaaatcacattatagtcaaagtaacaaaagtcaaagacaaagaattccaacaatagcaagagaaaagtgttaagtcacagataagggaatccccattaagctaacattagatttctcagtagacaccttataggctaggaaagaatgggatgataaattcaaagcactgaaagaaaaaaaaaagatgttagccaagaatactatacctacaaaatctatacttcagaaatgaaggggaaataatgtctttcccagacaaacaaaaactgaggaaattcatcaccactagrccagcattacaaaaattattaaagaagtcctacacatggaagcaaaaggatgataattctaccgtcctaaaaacatgcaaaagtgtgaaactcactyatagagcagatacacaaatgattaagggaaaggaatttaatcttatcatgtcagaacaccaccaaactgcaaagataaataatgagagaggaaaaacagaaacaaaggatatacaaaacaatgagaagacaaaaaagatgacaagattaagtcctctcctaacaataataaccttgaatatgagtagattaaattcccaaattaaaagatataaacaactggctgaatggttaaaaatcaagaccaaactatatgccgcctacaataaactcactttacctatgaagatactcatagactgaaagtgaaggaatgaaaatatatattccatacaaacagaaacccaaaatgagcaggagtactgctatggtttcactgtgtccccacccaaatctcatcttgaattatagttcttataattcccatatgtcttgggagggacctggtagaatgtaattgaatcatgggggtggtttcccccatgctattctcatgagaatgagtaaattcttrcaagatctgayggttttataaggggcatccccctttgcttggctctcattcttcttgctgctgccatgtgaggagggacatatttgcgtcctacaataccccactctcagcattgcatagatcacctaggcataaaatcaacaaagatacattggattcaaactgtactataaatcaaatgaccctaacagacatttacagaacattctatgcaatagctacagaatatgtgctcttctcattagcacatggaacatgcccccggatagatcatatgttaggctacaaaacaagtctcaacaaatttttaaaaatcaaaatcatatgaaatatattttcttatcacaatggaataaaactagaaatcaaaatcaagtggaactttggaaactgaacaattacatgtaaattaaacaacatgctccaaaacaaccaaagggtaaattaagaaattaagaagtacattaaaaaatttcttgaaacaaatgaaaatataaacataatatatcaaatcstacgcaatacagcaaaagcagtagtaagaagaaagtttatagcaataaacaccaacatcaaaaaagtagaaagatttcaaataaacaacttaatgatgcacttcagggaactagaaaagcaagaataagccaaacccaaaattagaaggaaagaaataataaagatcagcgcagaaacagagattaaaacaacaatacaaaagatcaagggaacaaaaagttggttttctgaaaagataaacagaattgacaaaccattagctaaactaagacaaaaagacccaaataaataaaatccataatgaaaaaatgaaacattacaactgataccacaaaaaagaaatattacaamtgatacttcagaaatacaaaggattattggagacttttatgaagaattatataccaaaaaatggaaaacctagaagaaatggatacattcctgggcacatacaagctaccaagattgaaccaggaagaaatggaaaacttgaacagaacaacaattcggtaacgaaactgagtcagtaattaaagtctcccaacaaagaaaagcccaggaccaaatggctttgctgctgaattctaccaaaccttaaaagaagaattaacaccaattcttctcaaactatttcagaaaatggaagggaattttttcaaactcattccatgaggccagcattacaaagccaaaccagagaaggatgcaagaaaaaaaagaaaactacaggccaatatccctgatgaacatagatgcaaaaactcttgacaagatactagcaaactgaatactacagcatatcaaaaagattatacaccataatcaagtgggatttatctcaaggatgcaaggatggttcaacatatacaaatcaataaatgtggtatatcacatcaacagaatgaaggacagaaacaatataatcatctcaatagatacagataaaaatttttacaaaattcaacatcacttcatgataaaaactctcaataaattagaaggaatttaactcaacacaataaagggcttatatgacaaaaccacagctaacatcatactaaacaaggaaaatctggaagctccttctctaagaactagaacaagacaatgatgtccactttctctaytcttatttaacatagtactggaagttctagccagtactatttggcaagagaaagaaatgtggctagttccagttgtgatgtgctgtaagtgtaacatatacattagatttccaatactttctacaataaaagaatgcaaaatatcttattaatacattttattttcattaattgattacatattstattagtttgctagagatgccataacaaattatcatagactaggtgggttaagcaagataaatgtatttttcacaattctagaaggtagaagtctgagatccaggtgttgtcaggttggtttcttctgaggcctctcttcttgactcatgtcatcacatgatcttccctctgtgtgtgcccatgtccatattgcctcttgttataagaacatcagttatattggattagggcccaccctaatgaaaccattttaacttaattacttcttttaaaaccccatctctcaatatagtcacattctgtggtactgctggttagggcttcaacatgaattttgtgggggacacaactcaactcataatgcctgtcaaaataataatattttggacctatttggttaaaaaaggcagtattaaggtaaatttcaacactttattgttactttttaaaatatggctactagaaatgtggcttgcattatacttcaattggacagtgctggattttatttctttgggacaccaaaacactgtatcatcacctgttgaaagaataagaaaaagttctcattttaaataatttgccattttctactatatttcccttttagtactaagttttattttggtattgctaataagcaaaagcagtgagatgctatataaagaagatgaaatgtgcacaaagaaaattagaccagagttctattttgatcttactatctttatgatctcaggcatagcccttaccttttctttaatttcttctttctacaaaagagaggataacagcctacatttgttgagtgattattttgtgccaggtactcttctgaatttctacactactaatttatttaatccatacaacaaccctttgaagattttaggtagtagtattactctatttgagagaaaactgaagcacacagagattaattaacctgcccaagactccagagttagtaagtggtagaagcaactggtctaactccataccatatcatttatttctccctgtacttctgtctcacaagatatttgtgaggatctactgagatggtatatgtgaaggcatttgaaaactgatgactgttaattattttctttgtctgccttcctaggaacatttcagagaaagctattatttttgtcttttgaccagcaaatctatatrtctttctttacagcctggtaatttcagaacgaatagaagtgtttgtatctgtgggtttgacacactactgaatcacaaagtctttggaataattctcaaaagccatcacttttagcccactttctcattcattratgctctattctttttctagcatgtctagcagaattctcttgaattcttgcagtgaattggtgctccttaaatacctgctattttggaatagttttgacttaaatacattttccttttctcccagttgcaaaatgtcagggctgacaactgaaagggcttctgaagattgtcagtgttctcatattcagataggtagcaaagaatctgacacatttggtataataaacccacaaatgttcattagtaagattgtagcctgatttatttctctgatttagaaaacacgcttaaagaaggagagtctgtctgcaaggaaccttctgaattctttttttaattcaagctcgtatatataaatattgtaaactgagatgtcgcttatgtcatttacatcatttatctcaaataataaaaatggttcactttttttgagcactacwatatgtctgacactgtggtaagtgccttttctgcattattctcacttggtgatatcacacctgccctgtcctataaaatgtataatgtgcatatattacctccacttataagcacagaaattaaggcttagagaggttgagtaacttcttaactaacctcactaaagtcacaaagcttattagtgacagagccaagatataatacaggtcatctaattccgtagttcatactgttaatcactattccacatttccstcaaaccaaagtggattgagcattcagggtattctgtctaagtcaggcagatatttttatttttatttttatttttatttatttttatttttattttttattttttttacttttttatttatttatttatttatttatttattttttattattatactttaagttttagggtacatgtgcacattgtgcaggttagttacatacgtatacatgtgccatgctggtgtgctgcacccactaactcgtcatctagcattaggtatatctcccaatgmwatccctcccccctccccccaccccacaacagtccccagagtgtgatgttccccttcctgtgtccatgtgatctcattgttcaattcccacctaggagtgagaatatgcggtgtttggttttttgttcttgcgatagtttactgagaatgatgatttccaatttcatccatgtccctacaaacttatatttgatgaattctgcaaataggtgtatgatccagtttttcttatagcttctgtgatttggtaatcctcctacagatggtagaatatggtattcacaataatatgaaaaatataattaaatttgacaagaattctattaaaacagcaagatttaccatccagaattatttcatttatttttaattcatcttttatcttaaacataccaccttgatgttatgtgaagctatcttatatgctaccttaagccatatgcattcatttatgaaccctctaaaactatgtgtcatgccctttctattttatgtttattgccaggtagtttataagtgattaaagaatattgctagaaattatatttaattagatagataatgttaccatatcacttttgattcatttggcccccaatgtagtatgaaatcttgtaattaattttttttttttttttttttttttggaaagagagtcttgctttgtcacccaggctgaagtgcagtggtgtgatctcggctcactcccacttctgcctcccaggctcaagtgatcctcctacctctgcctcctgagtatctggaactacgggcatgyacmagtatgcctggctaatttttaaattttttgtagagaccaggtttcatcatgttgcccaggctggtctcaaattcatgagctcaagtgatctacccaccttggcttcccaaagtgttaggattacaggcacaagccaccatggcctgtgatgagaatttttaagaaaagccattttatcaaatatttcatttaactaaaacacctttaattcagaaagcattatrtctattctaaaagtgtttatatggattaaatagacataaacaattggcagaggaaaaaacatagtactcactaacaatagtatttgtagaaattttgaagccatggttaaaaaaagagaaatttgagggamaatgtaaatacatgcagtaataatgctttcttagcaaaattcgcatctttagtctcctgtcaccttattgctttgtaaagaaacatcttgatcccagtcataaaagtcatttagacttataaactcattaatgtttactagcagttgcaatctgatttcttctcctaaactactttaaaaatagtctaaggaaaaaagcttttaaaaaccaacatcagctttatctcttacacctcacgtaatacttacaaatcttattaataaagcactcaggacaatctgatacactacaaaatttaaaataatacagaattgtttcaaataataattgcatccttctataaaatttgccttagaatagttttaatttttattataaatgcagccatarttgttgatctttaagcaatcttgactctctttgtttttgccactttataaaatgtagacaaatctgatagccaaggtaaataccagaattagggtaaagcaaagatagttttgtttttttgtactttacatcctccagattgtcaaacaggcaacatacacacattcaatttcagaagaatgagagagagaagtaacaaaagaaaaaaaactccagacccaatgattattactccaagaatatagatctttgtctaagcaatcttcttcagaatattagtagttatagaactctcagtatatttttatcatcttcacaaagttatttttctgtaaactaaaggtttgcctaaattgagataagctcctttaaattttaatttattttttasttgggtatgagcatttacagtgacagaagaagttctggttttggcaactttggaagtagctccccaactttgggacatgtacgtgttgtctgtatgatgactcagctgtggtctggtgctattatcacataatgttctatctttgaatattggaaacaagaaatttgcaacagctcaacctagcaaatttcttctgattttgttttcatctttcctttcaacaaaaattaacttaaatttcctaaaacagccttcaggtctttttttaatcttgatcatctactaaggctcttgggccctgggaatgtctgagaaggtgcactcagtaattcatgtgtaggaatagttgaaaaagttatcttcaggcctttcgggagttctgtagttggatgtaggtgacagctttatcaactacagtattcagtgaacatcagggaagcttaaaacccctgattatagctgcttttttaacggcttcgtttttcttctgtactccagaaagaaatgattctactcacagaattttacagttgtgtgtggtttttttggttgctttaatgctttgtattattttgtttttactaagaagtttttacatgtaaagcaagtgtaattgtatttacattgaactttgaaagattttcttcctcataatgtaaagaaaaggtaaataagatcaactgcatacctatgctattattttgctatgtagtttattatgayggcccatgctgctttcatattatttgaattttattgcccctgctttctctaggactttattaactttgatatagtgcatctatactcatccatgtaaatgattttgaagaacaaaacaattgacagattttgctttacaatatctgtgatttttgtttcatacctytgtccatctttcaatctttgtaaacagacctagttctttattgcrtagaccttataatcccttaataccctgattctaaactgaatgagctttaaaagtgcctgttaaacaaatagtataaaggatacaataatttaaaatttctttacagttacaagtttttaggtgatggaagtagaattcctaaaatatagattactcttgtgtcattttccccctaatctttaagtgttatcttcttataaatgaaaccacgggggtttttcttgtgattatagtatttcattatttgagtatgtaaacatgatgatgatggtgttacagaattaacagtagcagaggaatcgctctgagtcaaaaacagccttcatcatgatcaatagcacaattgttttatgtctgtaaggcatttctcataggactatatttggtcatcctggtagcttttggaaacacatgttttgtctcacagtatttgtagaccactgttggtggtggggtgagcatcatcaacactatcttaacccatacccttccagcctcatcaaattagaagtgaatgattggcagtggagagaggttttcagtgaaaccattcttgataatgtagggctggaaaaattcacaggtacgttaccatggtaacagtgttttcatcgtgatgacctgatttactaagaaaaagtcttcaaataagtctatgacatgattaaataagagatttaaggaaagggaaaagacaaaaacaaaacacctgaaagacattccagtcaagcccagtgcttctataatagacgccccaaggtatggtgagaattatttctgattcaacactttcattccctcacctgttaaagtagtaaacctttaaaagaaagcttttaaattaaaattttcagctacttgggaggctgaggcgggaccatcgcttaaagccaggaatttgagataagcctgggaaacataacaaaaccccatctctaaaaaaaaaaaaaaaggcaaaattagctgggcgtggcatgtagttacagctatatgggaggatcccttgagttcaggggttcgagactgcagtgagctatgatcacgccactgcacttcagcctggatgacagggcaagactctgtctctaaaaacaaaaataataatagtagttataaaaatatgttttaaataacttaaaactttatataacagcctgtttcttaaataccatgcaaataatttcggagaaagtaagttatggtaatttttataaatgacttcacatttacaatgctggtgtttttattggttaaattagatttctcaatagctatttttaaaaactgcaakaggaaggactgtctattgtattttttagaaacaagctggtttctacaatattattcacgttttttaaacagcatcattgaacctgcacataaaaggttaaatgtttgcagaccattcttttttgcctcaaagatcagagacaaattactatttttattttacatttccttgatgaggataatgataaacagctgtcatttcagtgcttcaactgcaaagaaccttattgcaatcctataatttaaacaaagaaaaaatatagtcatacacaatatacatacagaaaagagcacaatggagaatttggttagaactggggttagagaaaaggaagtgttgctctctgcaattactcacgtaaaagaaaaattccatttatatgcatttttcccgttcatcttagacattggtagaaggggcagtttactgcttctttttttctaaaatgaggaaataaatcaaatttgcatactgaactctgtgactccccatcatgtccactgtattatcagaatagttaagatttgcatgtcactacatgtctgcaagtatttccaaaagctaagaagaatttcaaattgttttactgattatttactaaagcctctcaattttttttaatgctaagaattaaaccagagttctctattcactctgacactttgttttctaattgcatctggtttcaaaaagtgaaagtcagtgtcttttgcttattttgatatgcaaaaaagtgaagcatggttacatgttaagaaagctgtaaaatggggaaatttagtgtttctatatgaaaatgtggatgctaatataattttcctggtgtttcatattcctmgaggtgaatgtaacaagttatttattctgcttttctcctttagctcaattatttattttttataactatcagtactttaaggaatttttctagaaactctctttatgttctggtttcttaatacctaaggaaaaaattgacttaaaataatatttatctaacatttattgaacaaatttcagttctcagagctttgaatatattcttatatgggttgacaatwacgatgatacccctgtcctaaggttgtgctacagatctatataaagtacatagcacagtacctggaatacaatatttgctcaataaatgttcctgggaagtggtagtaggtttatgctgaaatgccattacctggtactgctaaacacaacrgcaaaatctaaaatccaagaatgttttagatcagagagacaaatggaattgtgttgtattcctaatggaggcttatatttctttatatagaagatgttttcttcagaaagctgtaggtcatcatctgctctcattgatatatatcatatatatatatatatatatatatatttcataatcactttatcatcctcattatcatcaagttgtagtagctcctaactcctcaacttggaatttctctggtctgtgctttctcttacaagtaggctttcctggaggccctaaatgcactggagcctcagaaatgtcctcatactgtagtcccaaatcatgaggtcatgctctcaggactgggaaatgagttgagcatgcattattttaatgtgttttttagaacaatagacatttctgagtgacagaagcctatataaatgattagaaccaattctatcaatattgttgattttgtggcccatcaatatgcttttcacacaagcatattgattcaaaggaaaggcttatcatttaatatccagtaaagctatttagcacagtgctatgcctagaactgattggatgattgaaaatcaaagtatgtacatttccaaagaaaagcacttcgtgtctacatggaagcaataaattatttccccattttacattcataattaaatctttccaaatgctasaaagtagccagaccactaacaataatacctgtgtcatgttctggggcttagatggttcaagctgacttgaaatggagaccatttgttctaaattgatttcaatgccaagccaataggtcagcccttaatgatgaagaagccattccagctcagcctctggtggataagccaacattaattaactcaagtctcatagtataggaaacagatgcttttctcatgttgcacaaataaattctttgtgtatagatgtgttctgttttattcaaagaataacaagttggaagtaataattgtaagtttttcacaatggagccagtctttagtagtgatgacagaagcatgaatttacgtaacaaattccagcaagtgcatggaagaataaattatcttctatatctcttattttggcttcaggccagccctacaaaatttagctttgaatgtgggaggatccaaatgctgatccatcccagagcagacctagaagtgccagaacaataccaaggttatttctaatctatagcttccctggagactcctctcagaggtttacatttgcatcatatgtttggattcaattctttggccagcttgcaaatggcttaagattagattgttctctggaggtatgttgttaggtacactgtttatttggttattcatctcaaccttcattcagaattagaatacttacttgctttccctagaatgtggcaggctaaaaattgagtaataacggcaggttcccccatctcctttcagaaccagtggatgcataagataaaaatgttaccatctactgatataaactccaactatgctaatcagaagttgataatctgataacgactgacattttattttcttctgagtgaatatgagataatccatggtttgttttctcttcttttaggctgaaaatgatgagaatggacaagcagaaaacttttccatggacccacaattggagaggcaagtggagaccattcgcaacctcgtagactcctacatgtccattatcaacaaatgtatccgagatctaattccaaaaacaataatgcaccttatgatcaataacgtaagtgattataaactacctccatttaacttctaacccatccgagtgtggaagttgcacatattatcttcagcttctttgtgtattttctggatagttcaaataatattacccaggttcatcattttccattagacgtgatatgtgactgaccagtgaaagagaacttagggaagaaaacttaaaacttctagctataggactgaggtattccccattggctgtcttctagaagagtgtgagtttgctcacaataaagcaaaacaaaaacaccataatcctgggcatcatgtaaattaattgcaaaaccagcaaagaaaccagatgccctggctcctagactttgagactaaaggcaaaggatatatttgttcctatgcccatgcgtgtgcatgcatgtgcacacacatatataaaatatgttaatatgattattttcagcttctaaaatctatggaatgctattttaacctgggaaagggcttcttgctttattccctyggattaaaaactcagtgaattttatttttctaaggtaaggatgctataacctcaaatctgaaaatcctgcttgactagccatcaatgggtctaaataaccttttcaaggttatttatagtagtcagartatgatacttaaattatgtttgatttagttcttttggtagttaactttttrcagtacaaataataccacaagttatttgagaaatagtcttttagataagataggttataatgaggtgttttatagggggcttttctgaatcttgacaagtgagacaccaataattttattcctagttatcttctaaggacatctttttatttaatccaatgataaattatgagcattacttgtaagaaattaaaattagatggcaaagtactaaaaagagccccaaagtagaatttaggagaamtctgggttctaaatctggttctgctacagactctgttgacctaaggtgagtctctttcatgtgtctgtttcctycatatgtaaaatactaattgtagtaagtgtatctgacttagggatttgttccagaagatggtacaaatgaaagtactgtgaaaaatataattgtaagaaattaatatggctgcctatttaagaactgtaaatagcccttgttcatatttcatggttaatttcaaaattttatttctaaatacgacagtccgttcattgtccatgatctctgcattccttgactgtaagcaaccccaagcactcatgtgaacaatcttatttttaactaacactattttcatacacgtatgtattcaaacaaggttagctggatgctttgaagaatcagcaacaggtaagcaataaattagaaatgtgggaactatgaattgtattcttttgaccaatggctttctgtgtaacctaaagcaaatcatttcgcccmtttgagttgaagtcagtttcttctaaaactacagtgaggtacctcacagagccatcagagattataataaaagtggctataagccatttagaaaaatataaagtactaaacaaatagtctgtgtatttttaaaattaccttcttcatttacttaaatgaattcaggttgttttgctrtggtatatccaggcacttgcttatttaaacattttcctrattaaggatcrtttatcttttcactgtttcaccgagagtcattagtgctgccatcagttcaaacgctgctttgctctgcactatattaaatcatcagcacaggaaatagcacttcctgcctatagctgtgaggagtagcttgacacaaattagctaaaaggaaaaaaaaaaaaaacaaaaaacccctattgcaaatctatcctactttcacrttctcaagaaaaacatacacacatgcacacacatrtgcgcrcacacacacacacacactgaaagaaagaaagaaagaaatgcaggggtagtttccctcactcttcactggtgtgttttcttgttttaatgaaatggctaaacctccacctacaggatattatcctcggaggtaaagttctgatagttgtcttgagagagacctcacataagagtcgtgagaaaggagacttcaattaagatctgatcaccaaggtcaaatcttgaagtaaaaactaataggaatgtggagaaggcgaaagtatcatgtagtgctgaattcttatgaaattgtggctttgtttgaaatttaactttttgtatctaccagaagttagttttacatatctagaatgactgcttttcttgggtattattttatgtgctttttaaacatatataaaaaggtatagttttatatataatacatatattttaaaattatatatgtataattctatatatgaaaaatatatatctcttttattaatgtagtcatattgtcgtggcatcttattgtacagaatgcccaagcctattttgttcattccacacgtgacctgttgagtccaaggaaactgaaacagtgaacacccagcactgtgccatctagatgtattgattttttaacttgattcaaagtgaagagatcttcaaatgaaagaactaataataaaatcacaacgagaaaactagtcttttgactcctaattctaaattctattcacttaaccctgctgcatctttaaatgagtttggatcaaaaagctaattgttcctccagaatcaataaatgcctaaaacacggtcctctatttcttcctggtctatcaaaagcggygttctggcctttcctctttgaaatgggaatgaaaaagaatatgtttcggccttctgaaaaagaatatgtttcagccaacattcataaagttcagaatttggtgggcagtttcctttgaaagtttacattaagtgttctgccactcaaatctccatatggaattgtttaagaagtttaaagcctagcaataaatgccttgcctcagacatactgtaagcctttgtctattgaaatgcagcagctgtttcattacttaaacataccaggtaacagcagcacaaagaaatagcaagtttatgacagacggtctttctggacaggctacagtcaaagcagcagagttttgctcaggactttaaagctaacacacacataacaccccatggtaagcccatttggatggcctcttctctgtagctcaccccaccagaagttctccatcaaagaatgaagtggatccagctttattctaaaaatgtgttcggtgtggcaaagtggcacataattctgtttgaacctgtcagccaaccacatgttggatacccattattttccacagcttataaatgaagaaattgaggttctgagacattgacttgcccaagatcacacagctgggggtggcagagttaagactgaaatccargtcttctcactcatagtctgatgttctcaccatttgaacattggataatgcacgtgacagggttaggaaactctaagtcagccctctccaactagaggactcctacccccmcagggtattcatgagttattttcccagacagttaattttacttgaagatttaattaggatttgtttgaaggtgagaagcaatgtttgaaatctttctcatatttaagcaaacccagataatacaaaagagaatgtaaacgttcttaggaatttttaaaaaaaccaaatttgaaacatagagccatttcacactggagtgtgtgctgtagcctgcgcccctggacccctctggaggtccacatttactctccttggccattggcattttggtggaaaattagtaacatgtgccctagtttcaaaacttactgtaactttaatgcgtatgaagtaaagtgttattttaaatgttcattattttaggggaaagtacatcttaaataccagagctttatcctggcatttaaagcactgatttgtttccaccagccaggaattcagcacactgctcaagaaaaagatcacgactaggactccctaagtcccactctcttctcccctgcccccacctcccatcattgctccccgccaaggctaacactcttctgctttcttaaattgtagattagttttgcctgtttttgcacttgggaatcatatactatacgccttttgtgtctaacttcttttccttaacattacatttgtgagtcaaaggatgttactttttaaagcaggaaaacttccttggtctttagcagaattaaatccctgggaaaaggaaaggaggactaagcagatgtgagagaattgtgagatctcaaagatcacaaaattctaaccaagccccctccccaaaactaaacaaaattaaacttctcaattgaattttaatacatgtattgtgtgaatgagaggcatcaccgtgttccgtactgtgaccctccaattctagaaacaaagagattttaaggaaatggtctccttggtaactgaactgtaggaaactgtaggaaaaccctagaaatgtctcttctatttgtgaagggtttaaaatggtctcagtcatagaaaagaaggtttaagatccaaacatattacgggttgctagagaagggttaaagtaagagaggaaaacatgtggaacatttttaatgacctcacattcctttacactgagcagagcgacatggtgcagtaatgcctgtttatctagcctagagagtttgagctggaatgargtttcatgtgtgagaacttttacaaaccatacagagatgtataggttataaggtgttataattaaaaacataaatattatttcagatctcaaatttaagtataatcactttgttatgttaggtgaagtattttctaaatgctatcatctaaaagggattcacttgacccctgattgtcatgcagaattcttgatttaaatatttgtaccagatttaaatgtctgtataccactggcatacagacttcccagaaagtccctgaagtgtctggaaactcccggaagtccccctaccttcattccaaactccaattttagtgtyacaaagctaggttagcagaaggagagaagagtatctctaaaattttgcttaaatgcaaaataaaaaatgttaacctctatgccctatttaactatgtcgcttgatacctgtactgttgcaacagctgtctattgttctcctgtctcgatgtacctaatgycaatgtagcctatagacagtaaaaatcacagcattttttggaaggggcactaactgtgtgctgggcatcatgctagacaacttgtattcattccttcctttaatcctcacaatacttgaggtagctctaccctcatttcacagatgaggaacctgagactcaaacagtttacattatttgcccaagaacagtaagtgttagaactagaacttaaatccacagcctatgctctgaatccactgtattgcacagtaggcaagttccagtgtgtcataattgctgtggaagattcaaggcacatctttggtcagaatgctgaaacaggcccttattttgcttcatggtttgacagttgattcttaattcagctctgctttaaatctattcttggaagaatcttcttttaaattgtatttaatagattctaagtgatattccagtaatatgtaaagtttctaaagagcttaacccaaccaatggtcaatgccaggaaaattgtctggttttgagttttgaattgcaccatgcatccaactgcatatacayacccaacagtgggagatttgtgcaaatatccatgattccctgcatacctgcaagtacatttagaagtgaatgcgtctgtaaggaagggaatgaaatattcctaaagccaaatttgctgccttccctctaaatctgactttcttttctgatgtttgagtttctattctcctactcatccaaatgtcaatgcttgagatgtctttggttgttcctttcttccttgcccttcacatcccaacagcaccaagttcagttcattattcccttataatgtcattgtatgtatccattttttatactactgcgttattaaatgaaacatttaccatcttatgaacgatctacaatagccttctaacagatttctttattttcactaccacccttgcaaagtctttttcaatgttagccagattaattttcctaaaactctcttttattgtttcacttacttgcttaaacgctttcgctggcccctcattgccaagcaaataaagttcaaacacttttccttggcattcaaggccttcgcatctgcctcaggattyctggccaaacttaccttccacaactatcgtgcataaacctctactccacagagggtttcctaaatacatcttgtgtattagattactttcacctttgaatcactcttggtttacaaaatatgtacagaaaacactttatttcaccacaataaacctttgatttagctgaattttttgattagtagaattatttacatgttttgatgcctttaaaacataatgaagctatgtgttttaggttcttgtcatctctgaattacaaatttaaccatatcctagaaatttggagcatctgacagctgttctgttatctgcctgattttttaacaattaaatatatacttgcgtttggcctttcttaaagatattcatgagtctagataagagttagctttctcatgtaacagagaaactgaaaaattcaaayggcttatttttactaggcttaagttaattgctgcactactgtaaaataatgatacttaaacaaaaatttacttttttaagcactcaatcacagtgagataatggggtaagggaawgggcaccggacttcaagtcagaagrttatggattcaactgaatgctgtgtgacctagcacaagatacttaaattcttggaacttgtttctgtatctataaaactggaatactaatacatgtttcttcagtgtgtgataagaattgtcatataacttatgaagccacttrgtatataccatacttcatcgattctcacattcacttctttttatttaatatttctgaaatgaagatgcatcttatactcaatggcatcttgacatcctgtcaaagtttgattgatggtatttttttttgtctgaatagtcagcacatatgatagtagtgtttcttaaaatcactggtgtcttagagttgatgagatacagtagctggcgttcccactctcagtgttgtgcaccatattcatcctctccattttcatcctgcaacaaaatgcccctccccctgagactcccacatagtgttcatactttagtttgtttttatatattagctaactatgcaacctcatgtcagtccccatcactgttaactaacttctattgtaaacttctggaaaacagagtgcatctctttcacttgtttataaatcaacctgcatagttatataagattctgtatttaataaatattcacttactggtgctaatttcacttttgagacgacactgaaacttggcatctcaataattttccagtgattttggtaaaagctagggaaaggactgcgaatgccaaggaatggaaaacgtgtgattacataggtttcttcacatcactgttttctgttgaaaatactgcttcttacctcatagtaccttccctcttctataagccaaacagctccagacaatattgtgaaatgctcacaaagccagcaggccctgttctggtgatggctgggtttggccttcttctactcatctctatcatccttcagtgtggacagccaaaagacagagggaaactgttactgtcaccagtactggggatagagacaaaacaaaagtaaacagacgcttggtgcttcacttttcccagggtggactttggtggactttggtggactttgtccagactctgactgccacagccatgtttctacctccactcagtcactcatttattcccatttttatttctctgtggtgatctgacaggttaaagatttcataaattccgagctcctagcacagttgtattcttcagaggaccaaaataccctgatggaggaatctgctgagcaggctcagcgccgggatgagatgcttcgaatgtatcaagcactgaaagaagcccttgggataattggggacatcagcacrgccaccgtgtccactccggcaccccctccagtggatgactcctggatacagcactctcgcaggtaagaagatggccccggccgggtgcggtggctcgctcctgtaatcccagcactttgagaggccgaggcgggcggatcacgargtcaggagatcgagaccatcctggcgaacatagtgaaaccctgtctctactaaaaacataaaaaaaattagccgggcgtggtggcgggtgcctgtagtcccagctactcgggaggctgaggcaggagaatggtgtgaacccgggaggcagagcttgcagtgagccgagatcgtgcactgcactccagcctgggtgacagagcaagactccgtctcaaaaaaaaaaaagaagatggacccacccacaacccctgagccctgccacgcttgtccaatatcatttctgagagtgctttcctaaaccaagatggacctacagaaaaaggggaaaagatatttacattcaggagtaaggatcagattatactaactcccttaaaaatgcagcacagtgcatcctcacaatggaatgttatatagtcactaaaaagaacaagacagttctattaagtcctaaaatgaaaagataatccagttaacgggaagctttaaaaaaaagggaggttgtatgccaggcgcggtggctcacgcctgtattcccagcactttgggaggccgaggcaagcggatcacctaaggtcaggagtttgagaccaggctggccaacatagtgaaaccctgtccctactaaaaatacaaaaattagctgggggtggtggcgcacacctgtgatcccagctactcgggaggctgaggcaggagaatcgcttgaattcaggagtcagaggttgcagtgagccragatcacgccactgcactccagcctgggtgacagagcgagactccgcctcaaagaaaaaaaaaaggaggttgtagaagactgtgttctatggtatacagaaaagcaattyatatatakagagagaaaatatatacttatacaaatgtagaatacagttaaaaaggatgcacaagaaacttctatagttgtttcaacagagtgaaggggtagggagaggaaaacttacttttctccatttacccttttatccctttgactttcatgacatgaattggacttattcagtcaaaaaataatttttaaaaagcaggaagttacaaaacatttttagagattaattcagacagaaaggaggagtgagcaaactatgatttctctttttcctcaggtcacctcctccaagccccacaacccaaaggaggccaacactaagtgctcccctcgcaaggcccacatccggccgaggaccagctcctgccattccctctcctggcccccactctggggctcctccagtcccattccgtccaggcccattacctcctttccccagcagcagtgactccttcggagcccctccacaagttccatctaggcctacragggccccgcccagtgtcccaaggtaaggcatggagcagaaattgggggggtagtgcgccttggttctcttctcatagaatgacagacaaaatttatttgaaagagaaaattgcaaagatcttatcgtacgtgtttgcagttttcacaatgaacagagactataggaaaattgccaaccctgttatgccatttaaaaatcacttgtgatcattgaaatttctcatttatcaattggcacaractaaataggactaaagaacactccgtcccaatgaatgacattttggcagctattgggagaatttgagggctttgaaacaaaagagctatggaggattgtagcaagctgtgtgttctataggtcatgagagttccatggactaaagtcttgccttctccattatcaaaagaattcttgaaaaccactgacttagagaattttatccatctgccttctgaactgtgatccttatactcaattttaccaattttcatataggctgaataaatctggctgattgatctgcaattgtttttttaaaaactacacatagaaattttaatataggcatgattgttgtatacagtcactaatcatatataagatagatcattgtacatctgaataatacgtgttgacaattataagtggattttcagkcttaattgtgaaacaatatagctaataaataatggacctagaaacacacatagttggagctgtagtctcaccttcmtatacttacagtcaaaatatacacaatgaatakaatcagagatttttaaggtataaagtactaaggtttttttccccctcaaaatcagaaatataaagaggaaagaaaattagcccatatataaagttaatttttaaaaaattcaattcagrgaattaaaatatttatayactccatgaaggaatatctgactgtatatgaaccataaaaacagatgtgacttctacccatccctgaagcctgagccaccttgccaactgattatggcacttacgttttattttaatcttcaagttgttaagcgtaatgaagagaagagaagaagggggatcttaagctagtacacagagggtggtacagcaagaataggcaggagatttgcagtcagaagacctgggttactgaaggtcttgggcaactcatttaactctgagaygggagttctttatctrtgaaacagggagaactcaataaggttgttccccagatcatatgacatgaggtatttgaaagagtttgatacactgtaaagactacagttgttaccactgttatcattttggtcctaagcaaagaggatatatacacactctcaatccaattttttttctctaaattcaatagacttggcttataaattatttggaatggtgctaaatttctagtaatagcagtactagcaatagccaacatttattgtgccctcaatattactaggcattgccctaagaactttgtatatacatttttgtttaaagctcacaacaaataggttgttatccacattttacagatgaggcagtgaggttaaacagcttgcccaaggctgctcagccagtccctagtggagctggactttaatcccatgcagtctgcttccaaagccatttcctgaccatgaccccagggttwttcagcctcatcagtactgacgtttttgttgtggagggctgtcctgtgtattgtaagatgtttagcagcatccctcccctctaccctctagatttcagttgcagtccccagttgtgaccactaaaaatatctgtagacactcccaatgtcccttaggggagtaaaattcctctccacgtgagaaccactgcactgtagtattcraaagaattcccttccatgtaaaaccatgaatttcmgcattgagccttgctacaagcaagatccaatttattattttagaaaacctcaaattgactaggaaagtgtctgccattgtaccaggaaggtattgaggccattggaagaggaagagttgagagtgggaaggctggagtgccatgcaggagctacttttgtctgtctagctgtgagaaaaaaccagagcaaactggtggtgcctgtcctggggaatgaacatgcatgttctgcctgcttgcttgactgctttacctgtgggtttcagatgagctagcttgccagtacccttcagaaaaatcaacttttgaatgctaagctgacttgttaagcagggtggagttgccgttrgtattttccagctcgcacgaacaaggcagccggatgagaatgagtagcccgagctggatggccggcacatgggcagcagggcttaatgagactacattagggaatttataggatgacagttgccttatttgaaatttctagaatactctcaagttagaaccagactttacttgatctggccatgcaaagagtcccaaatttaaaacagaaatgaaagtacagggtaaaagaggaaagtttgttgttttgtgctgagccttcaagtttctgtgctggttcagcgctttgggagggaaatcccggggaagggggctgggggaggggtggtcacctgagagagggcaagaaagactctgtcaggatccccatgcctgttaaatccagctttagatggagagttctgaccacataaagtctgtttttaataaaagccagagcaggaatcctaccaaatacaagccagaaatggggtttaagatttcaaaaaaagaaaggaagagagaacgagagaaagaaagaaattgagagaagcgcttgttgaaacttcaccttattctgtttgtttaatatattctatttcccctctgtgctttgcctccattttctctatcaaaaacttagaaagttgaaatgccattatccatcatctctgggaaaacaaccctttgttttcagagaaggaagtttgattttttttttcaagttttttactttcttaagggtcctttctcctcttgtatctgaaaccagaaacctataacatgacaagacagcacaaaaggtgtcccgccagctccctgttgggctttaatattacaaaggcaataactgaacttttagagacaagagattctgccattcagcatgkgcttgtgcatagttttcttctggataattcacgacttcattagcaagttatgatcttgacttttaagagcatatatacttttatgttaacgccattcaaaggtaatcaaagcacacttgcaattgtacagaaaccatgagtgttctscttttaaaaaatatatattattgtatctttccattccaatataaaaggagaggaaggagagaggtggtggagtcatttttggcccagcttttctcagctgctcaagctgttctggtttatgtgcatggagcctttcagttagggagctggaaatattgcaaactacatgcctgttttaattaattccacttgaactagagaagcatctctatcccaaagagattcactagtatgtatgcttctgtcattggtaacttgagtatacacaaatcagtgatttgtggaacattttctattgccagaatatctggattgtcacctcccctctcacctccaytcaacttctctgaaggggctaaatgctgtttgaaaatccaatccagtgtgtatttacttaacaagatgatcttaaacagacatcaccacctctttagggttcctattctcttaattgaagatcctgatcttcatcagacattaactttagagctgatgtaactattttcagatatagcttcttaaaattagttaattgggaatcacagtctttgacattaacggaacaaattcactgaatccgagtgtgtttttcctggcaataatgaactctggcattatttcactcatttgtcttcttccctttccttggactaagctattttgcaatagtcaaaaggggataagggtgggaggaagggtctccaaccaagcaagaagaaacttttttttttaacctcatcactcaatattcaagtactttttttgaccacccttgttcaccaagtatgatggtktctctttaaaaagacaaaactgaatcattcgaaaggatttgggttttactccagctcatcaaaatgacataaacacaatatggaaaccaagaaatgctcccttgaaggagtctctggtgagccccttagtgaagctgatgtcccaccctgcaagggcagtcccagagtagcatcaagattattccagagtgtctcactcatgcccatcccatgacttaggtggcttccttgacttatgtggcacactttaagagtttcattgtaatcccacattttcagtaatttattacaaatcgaccatgccaaaagatttattaatccttctacataggcaatcaatgcatgcatattcttttctttacaaagacaaaagccatttaatcctccttataatttagtttaattctgtttcaaatgtttgaccttgatggcctgcagtgctctatctcttttatgtattttacatattgttataactgacaattaatataaagtccctttcacttagggatacgatctccttgtttcggttttgtagccagtcccccaaattttgcatgaggacaaattcacgattcttatgagtgtgtctttgaatcccttacgtcaaggtttggtgccatgaaggatgaagctgctgagccctgaagtcgtgggctaagggtacacggacaattaagcaacttaagtgactagcctgtgtctgattcccctgcagtcatgtactgaaaacctcctgacttactgtcttttcaacagccctctaaaagaagtctgacttcttttagcagctgaatgtcatttggacaaatgaggaactcatcttgtgacctctgatgtcagccaggagctttctatttttctcaccatcctccccctttaaaaaacaaatacataaatttatcattgggcattgtgatttttcatggaacagtttttatttttagcaactggctttcaaagcaaggaaagatkkttttttaagcataattactaagaatagaaacaactttgaggtgttctttttgattcttaatatttaaggtgtctcatgacatttgaagtctctaaatgtcattaatcatttgttgcaggtttaatatgagttgtcatgatgcttaatatactttaatgaaaatagaattttggccacatgctgttcattaaagaaaatatccaatttaatataagtccctcaattaaaaatcccatcaaaagccttgttccaatttcaccatgattctggctataacacaattatttcattggagtgaatcaatggttaatgtcaaagtttttaattcttcaagtcttggtttcaatctggtttaagtgaaagtaaaattagtttggtggtttccttcttgagtcttgcaaacttgagtctaccttacacaaacatctccatcctgccacggttcggatgactggcagtctgtttaggcgaggcccagaaacagaaagcaagtcttgtgaaagtcagaatctgggagctttgcagatgcgtcaaggtrgccttcagattgcctctctgttttcaatgtgtcccytrtctcactcttccaaacatcctatgctgtaagagggtaaaaggaaaaggaaaataagaaaggatctacataaggcaaagtacaagtaacataaatgcagacagcagcagtaaatataacaatatgctgctgttagcccagtggtaactggcattaagctaaccaaacacaactgcttccacatcccatgacaaataatagcaaatagctctgtcattgttctctttggggctctaaattgttgaagcttcagccattgcagggaaagccttcytgagtttcaggggaccmagccctgccctgagtttcacctgactgatagaggaaaacagccaagacaggagtctggcagagaagccactggccagtgaaaaatgcacagtagaggattattattcttcctgcaaccagtcagtagcaaattgtcaccagttggaatctgctgaatattcctatatacaagttaatgttagctcaaagaaaggggrgtttaaaaaaaaaagttttgcccagtgtaagcagatacagatttgtagatgacacacaagctagtacttctatttcatcactgcacttcgttgtttccctcacttgtaagaaaagaatgatttttacagggaaaccttcacattcagacagttcttgttatttcttgttttaacgacgtcaacgattcatggcatgacattgctcatagctctttcacctctaaattttatccaagcaacaaattagaagaaaggactgctggggaacttcttccttctttctgtgaaagatcagaagcaatttttttttttttttttgaggcggagtctctatcacccaggctggagtgcagtggcgtggtctcggctcactgcaacccctgcctcctggcttcaagcgattctcctgcctcagcctcctgagtagctgggattacaggcgtgcaccaccacatccagctaatttttgtattttgagtagagatagggtttcaccatgttgcccaggttggtctcaaactcctgacctcaggtgatccacccaccacagcctcccagagtgctgggattacagccatgagccaccacaccaggcctagaagcaaaatttaaataacgtttactagagttgctttagccaataagagccaggaaattaaaaatgaaaatgtaaatgcttcatctttcactcagaaacrtgccttaaatgcctacctccagcaatgtaagaaaaacattgaggatttagctgagagtttgatggcttttgcttgcctgtcataacttcattgctgctcaaagggagaattttaaaacactcgacattgaaatcctttagcttaccattgccaatgtattgtaagtgttgtcggggggaacccctgaatctaaacatatatttacacccttaagttgccaaattaaatccatctggcttaccaaatgctgtcgccaaaagactgttacactgttggtgtggccagtattttaaatgtgggggatgggagggcagtgttgaaaggcactagatttgatgatagaatttacatgtgcattgatgccacattaagtatttacatcaagtttagatcccatggcaactctgaccaagaaagaattcctacacaaggcaagaagtctaaagccgctaggtatttgcgccgtctcctcatggcactttttgccctgtgactgcttttcaggcatcacagccacgcaataggcaaaaccacaaatagcaaacactctaatttcttgaattattttttaactattcccataagcactaggaaatgcccactcctgttttctggtcraagttatcagctcatgtgaatcatagaaagaataaattctacccaaggacctgaaaatatgttaagtcaaaatggcaagtagcaaaattcgcagtcactcataatccatagcaaggtagggtcttcctaacttcagttgcttagagacatgtaaaattccaaatgttcataaaatcaactttttctcctattgggaattaatttaaacattagaaaacaggaaaaggtataagcactcttcttaaatgtgcaagttgatatgaaatttagaaataagccccattccttccctgcttctttggtagaagggctaatggactaactaagagagagaataagctaaaagtctggatagccacaactaaatacaccaccacaggagaatcyctcagcttctatggtaattttgaaactaagagaaaataagacagcatgagaaggcattatgctgctttaaatatgacttgggaatggtcttattttacaatcaaatataccacttgcttccatcatgtaaatattaccagtatttagtttcagattttcatgaggtaacattatctaaatttactgttcgtctgtatatttaaatatataacattcatttgcagtatttcatttatctcaaaagattagtatatatctcatctagaatgagacctcttatgagaataggagatgagaaagacttttaaaggcatttcgcagtccagagagtctgcaatgaaattattccactcaggaatgggtatttatgtaagatacattctgtaccatgtgtatttttttaagtttatattagcattattctcaaagccaattttaagagtgaatgaaattgttcccttaagtaaatctacccttaagtagtatcatgctcaagggcctacaccagaaagtctgccccactgctctcgctataataccattcactgaggaaaagctgtaagaactgaggaaaatgtctacttacttcttaaaacaacgagaattgctttttgcttctcagtagtgttggaaactattttaataactaaaataataaaacttcatgtgaggcaaattccaccttaattattgccctttggggtggaaaaattaaggaaacattagtaaatgtgttaaacagaaaaaccactgcagtaatttcccgccaaatacctgggtctaaagtcaaaataaaatctgtgctctgcgtatgatttgtatgaaagcagacttatagttttagctctaacaatagtaccacttaggactaagatgaatggaccagaaaaacccctgtgactcatcagtagactgtgattagcttacttaagtgttctacagttcagttcgggaatctttaatgaaggatattgatataattgcttgattcattttaatatttcaaacactctaaattactccatcactatcttaataattaatgcatgaaaactcatacttacattgaaaattcattttaaagcacartatctttgaataaacccattgaaatagtgtttctggtgtttgcttaaaactttggtgtataactgattacatcttatagatttcatttttttttcctggtattttcctcttctaacttaggacctttttgccatatgtggctatttgatgtatattgttcagtcacgatcttctaggtgactgaaaaacgcatggagttactcatgccaataattattgctactgaattgttccaaagtctcccttcctgcagaraaataagtttcagtaaaatattctagaggattacragttatctttgcagttcataaatactttcataggctccaytgatattcacagttttcagttagaatgttatttttattgcaaagtttgcatttatatttcttttctgtggattgcttaccacttattaaaattaaaatgcattttaaggtgaaacattatgtacctagaatactgaaggtagcactgaccattgtctttagctcakaaagcaatgttgaattggaaaagcaagatttgagaatattcctctttactgcattgtcattgcactctagtccttctgatttcccttgtttctcagatgatccctacgcccaattatacagaacagtcttcctctagttacttatatcaaacacttgcctgctagctgtgtttggcaggccagcaggatgaggtaataatcagaagaaaatgttctggtttattggcctcatccacrtacaacattattcaaaatagttctctgtgggtgagaacagagttgctttgagatcccctggtctaatgttctgtagtagtgaggaggaacaaaactgtaaacttttttgatctcttctagaataatggtaaggtaartgatatctgcttggcccatcctttcagtaatgtttacaggcagttagatgtatgtgaaaatgagagcctttcatttataaacattttggctttactctttccaagtccagccatcttcttacgtacagcctccatggtcagtacagcagtgttttcctaaaagcatattttgtgaacaatttctccaggatgatggtagtttttgtaagacagatgcctaaaagacatatggttttcatagattttccgtctagactagctttatttagtgacttttggtctgaattggtctagttaaagtttctgtaggagcttgtataaaaatttaaaatgtgggtgtaccattaaggtgtaaaacaaaagtttgacttcttgttggcaagagattaaaacggattggttgaaaatttccttcatgttaagtaattctgatcatcttatatgcctactcatccattccacccctacaacactgtccaaaatggaaaggcttaccctaaaaatcccataactgttaaattcatatactcctcactgttcctgagtaaattctttgtgttccagtttatgtgtgtatgttagaaagccctaattctttctgcagactctttacatggcccaggggacatattrttctttacccttttagcaccaatttttacaaacacagcatttctctcatttaaaaaaagcgtctgacaagccgctgagtagaagcgactgaacctttaggagtttcatagtgccttcaaccaacaatgaaaattctgtttttcaaggcgtttcaaattcttgagccagtgtcaaagactcatttagaaacaatatgacatgttcagaggaaaagaattacatctagtcttgcccagaaatcatccttttgctccctcttttgtaagagctaatactgcagaccagtcccatcttaactgcatcagaaagaggaggctcgtggaagggaggaaatgtgggccgttctgtctccacgagtgtcattgcttggcttccttggcttctcacgaagcatttaattggacttagtcacatatttgttcactgacatggcagcctgcaaagcacaatgcctctctgtttttctctgtttgctttaaaaaattttgtttttaaaatttgagctctaaagcatgttagagctcctcctgctggatttaaaaaaaaataactgggacgattaataaatggtaattctttttcttcatatttaccacctgggctaatagaagtgacagaagcctatcatgtggtgcacttaaaactgaccttttaatycatcaggtatgaaggtcaggcagaaagaaaatgttggtgctacacaactcatctctcagtcttcaaattcctcatgctcttttttttgctgttgttaaaaaaaaaaaaaggaaaaggaaaggttatttttctgtgagtatttctagttacatagttaccccaagtcacatccccatgcttgaaaggttcttgctccctctcagaaagggacaaaaagtcttttctatcttcccaaagcagaaatgaattgtgcagtcatacagagattcgaagtgttgcctttttcctccctatcctttcttctttttccttcttcctcctgatttcctcctccttctcagaagcggacacttgcctcgcccagtagctagttctcagyacctcctttctgcctcctccttcccctaaatggtggcagttggcctctccctctcctggtgcctgaagtgggagtgacgagaagggtcagaaaaaggtttaccccattcaccatcagtgggagtaggtttctacagcacataagtttctggaggtctctttaggaataagagagaaaggaggggggatagaagggagataggaagaaaggagggaaggagggaaggggcaggaaaggagggaaggagggaaggggcaggacaggagaaaaggaggaaaggaaggagcaaaggaaaaaaaatcacttgtaaatctctgtaaaaccacttcctttctctgcatgctttctcacactgtatccctcttgccttctgcttctctgcgtttcttttagctctttcctcccccaagtttataatctcaatgatatagtacaaaggccaaaatacttaaaagttaatctcggaaagtaatgctttttagaaatcatattttaatacaactaaaaatccttcatgttacctgtttcatgactttattaggacttgggacaaaacaagtcatttggtatttgtgataaagaataagacaacccttgatttctcaaacttcagtactttctggctttctttcctttgcacatacctttcctattcctggaatgctagtccccttaactttccgtactttctggaagtccttccaacctcctagcctccttccaactctaagctaggactccagatgtttctgaaactcctgaagcaaaaattttagcataatcctactgtggtcatagttaacttgtctctctccatctcaacaagaaacttcttcagggcagtgactctttatttctgtatctctacctcttaacacagtacctagtacataagtagggcttactgaggggatgaaggaatataaaatgaattgacttgcaagcctcaatcaaaatttattttgaaactagcccgatacttattttaaaaaccaacttaaacacactttcttgttctattctattgaaaagcttgcctgagtgaatgttgtaaaattctttttacagatcataaactgaggagagttaatgtgggtaaatcatcctttaagctgcttttttgccacaaccacagaagtgggtatattaggcaccatgcctatgggtgaaatccaagtcagatatgtaggacaatgtaaagaaagtgtgacaaagcagattatattaccatttatgtcacaggctaatttatacaggatattacctgtttgtatcatcaaaaaattgtgaactatttttctccctatgttctgatttcaaattccatgaattgattcatattttcccaatgacatacattataaaatcatgggttcattttcacaggggaaagaaatgctggctctaatacactgcaagaatcatattagagaattccttaaatcctttaagtgggctccaagttctgtgttctttccagcatctactgtaaactattcttggatagtattggctcattctgttgctacagccaaaaattccaaaaatatgctgaatagcaccctatagtatttcttacagtaaattataaaatattatcttccatgtggacaaaatcatgactgttatagcatttttctgactttaaataaatgcccaaaataagaagtagagtgcaaatacatcgctgaaatttaaaatacagtgtcccaaaatttgttctcttagagcagacattcacaagaagaagtaggggtcctgcatcacagctgccttccattttacctagaagtgtgctccaacmcgatttatctttgggcccattcacactcattgatctaccgcttgggacactgccctcagcaggtgctgtggaaagctgcaagaggcgtaggagtaatcttggttcatagaaggttttgaatgttgttcagatgataagatatgcatgcacgcctcaaacttcaaaaaaaatgatgcaagcattaaatgattcaagagggtcattgagaagtaaagcatttcaattcctgaaaacatagaaaatggtttttgtagataaaacccttcattttttatcataaataagtttaaaaagggtgggcaagttgatatcagattctagtggcccttggaaacctgggatgtataactctctcatgatcctagatgtatgtaaactaaattttgagacagttatattttaaactttcaattataatttacaagtaaatcttgcaatgtaaaagaagctactgcatatcctttttatgcaaatarctacccttttaagcagatatcttctctaaaaatgtcagtctttgtatatctttttgaaggctttcttttaatttgggtcyacctaactacttatgctggacttcaatcctaccctctccaaagattagaatttggaatgcacagagatgcttacctatttattttcataagcaaatacaagcttccctaagcaagtagtagttattcttctgataatgactaacaacaacgacaacaaacactgtagtccagtatcttggtctttataacataaggctaaaactgctttcacccrtgcttaagtctaattcctaaaggtatcaaagtgtttctacaagcatttcttcatccttcttaagatttccagcactttctctttttgtttttactttatctggcaagtaaattgaattgctaataaagcaaagtaaaaatcttttttttactgaacagtggtttcaaagcatagtcccaggaccagcagcatctgggaacttattagaaatatcccaccacattagaaatgttgggtggcacccagcaacctgtgttttaacaaggcttccagggaactctgatgcaaggtccaatttgagaaccattgccaagagcatatcaatctaactgcccaayagaaaaaattctgcactgaaagtcatgagaccttagtgcaagcacaggaaaggaagaagactgaactacataggcccattctggcttaaaaatttaccagtcagataattcctacttcccatcctatggagaaataagggcagggacagaaaggccaatccatttcacaaatcagtattatgctagctggaagcaagaagctagaggaaaggtggttttcacacccaccccacaaactgatacaccaaagcagtttgcccttattgaggtctcccttaactcctgttaaaatgggcctcatatcatgaacactcaggaccagctaatccaaagaagagcagatgaaattttagttcttctgttcttaaaagacaataaaataaggcaagaaaacaatgatgcattcttctctcttatcggtaaagccagtttctcccccacaatgccacccaccctgcatgagcatttgactttcttacaaaatttgtcattgtccacaatactgcaaacagtccatccctgcagctacaaatacaacttcaagtattacttcttcccctttgatttgaaagaagaaacatggctcttctatgtaaccataaaccgcccacatacaacacagtgtttcaataaacactaagtgatacaagatgctccatttcaatataatgccttacttaacgaagctcattactaaacaaagcaactgaggaaaatttggtacaaaacaataactttgctttccccaaaacaaactgtcttgtgaggtgaatgcctttggaaactctttgaatggttaggaactggaccaatgaaatgaactttaacagtaaactttaaatgttttctggtgttgaagttagcaaacatctttagcattgcatattaagaaaattcaccctaaattgctttctagtacagttgtatatacagatttttgttgttactgttttagaaaaaataaataaaatgtttatttcttctgcaaggtttagtgaggagctctttargatttttaatgactaagtacatatttgggttcctttaactgcaactaggcatatttccaagatatcatagttactttgagagaacatgaacattttatcttttattattttaattattaattcaccatctagctatgcagtgcctattaaatgcatgtccctagggacatccttaaagagctcataatgaataagttatcctgattgactgatttatttggaaaaaatacaatactatgaaccacaggccatgctaagttatgggatatggtagtgaataagactaacaatagacctggcacatagcagaaccatatgttctcctcatctcctgtcttgacttctttctgcaattgcctgctactattgtgctcttgtcccagccacatggtccaaggattaaagcagatattaatgagaatttactgtgccataagagtacttaagtctttctattctctatccacaccattgaatttttcccttcaatcgccatcatttaagttccaatttcactcattatagacctacattcctacttccaagttttatatgcagcagttacaatcatgtttgccatcactttgaccacattattgtattttcagacttcccagagtgtattctcagactccgaattacaaaattttgccccacttttccacttaaaatgaagtactataataaagctactttcatatttgttttattccactcatcttccattctgaatagatgctgagctctttaaagtcatgtagcatgaagcagtccacatattagatgctcaataaataatctatgcaatatataactggaagtcttgacatagatcatctagtctgattgtacaatttggcaactggagctagaatccacattttctaacttctgatccaggactctttctatgtaaacatagtatctcaaatataagcttctgataaatgccttaaaagtgtagcatccttggcctcgctagacctactcaccttgatctagcctaaactctagcctggctaaatatcttgtttaggcacttttcagtcatttcttcatttgtccattattcaacaaatacttaaccactgctttctaatcacattgtaccaaatgctgaatacacataataaatgcaaaatatgtggtttcttttctcaaggaattttgaatctatttgggggacactggtaataatctagtaaataaatacataatcacaagtagggttacgtgctacgagagacacaaacatgaagtcataggggaaggcagaggaagtcrggaaaactatgggatggtccagaaggactgaggaataacagttaagccaagaacaaaaggatcaagagaagtcagtttcattcctttctmtcttggctacaagccttgatccaagctatcacatattcatgaaacgatttccaatccatcatgccatgctgtatcctacttctcactgaatttgtagtctaaaatcaactttttatttaatgaaatcacctaattaattccattatcaaaacttctggtagaatttccctccttaaagctcaaattctggccagttctctcctcccaccagccaactggttaattgctaagaatacatttccataggttacatgattatttgacaaactccctgagggcagggggcttattatttggtatttattccaaatatctactaaagaactgagcagttagatactttagagtcaccaaggatctcaatcctacatgtcactttagctacttttttttttttgccatggccatgatttactcacaaatatccttgtatttataagaccaatgaatatcacaagcattcattagttatttcttgattctaggaggaactttcattcattcagttatcaaacattcagtgactgaatgacaagcagtgagctagataccacagttacatgaagatgattaagagacagctcatttctcatcagtgaagataacatataagcctaattagagttcagtgtgatgactaataatagagatttgttgagatgctatacaaacaactgtatcaggagaggggaaggcaggtcagggaaggcttcactgaagtaagtcttaaatgattagttartagtctcagaagatgaccaaaatgacattgagaatgtaattgcatgtaacaccatgctaaacactgtatgaaacaagttaagtgggtgtgacctgcgcccttcagaaacttcctatcaaagaagaaaattatgcagattcaagattcaggacataagttaaacatatatggccattttaaatgaaaataaggctgggtaccatggctcacacctgtaattccagtgctttgtacctccccaaagaaagatttcctttgaagcctcttacacatttttcaagtgcatgaggtaaaaggaattctactaatatctatgagtttgtgcctaaatagttaatattttcaccattaatcaacaatatctctcctgctttgatttttccttgatcgtgtaatttaattttatagttccatgatttttcaacaactatttttttcaaaactatttttcaaaactatttttcataatagttttcttaaatttttctaacttcacttcttcatacctgagaaaggacattcaatttgatcaatatagagtttctaatacagaagaaaaatttatgactataattccagaaggagtctttctgaaaaaatcagttgcagagttttatcaaaaagaaacatttcaatttgtagactttgtcaaatttgggggggtawaaaaatgactacccaagataccatatatgaagtcaagtacacaaatacactaaaaaaacttattaatatatttaggaaataaatgtagaagcttgaggaataaataagtaataaataatattacttggtaatgttgagactctcaaatacagtaatatttcattatctaaagtacrtttgcttagtaaactcagctaccagaaacatcattaccaactagaaagtgagtaatactactaataccaatactaaagtctttaagacccaaaataggaactagagctcctgcaatttaaacaggcactcacactgagcctatttacacttgctacagagaactctaaagacttgcttttctgatttttagtgctctgtaaattacaagcataatatagaacaaattggagaaagtcaaaaaggcaatgagaagtgatmataatatcctgaaagaaaaaggaaaattatatgtgagaaataaaaattcaaaagccatcattgtctgaaacagtataccttattagttcctgagttcattctatgtaattattatattctattggctaagatatgtgcagtaygtttcagatggctttcaaatagtttcatatttcttattagtattggaaggaatgacttcagttttgagaaagatttgcatatgaaaaaagacgtaattttcattaaaactactagataaatgaaaggtgacaatgttaaaatcattacagatcataaccacttctgctggcctgtaygtgcatgagcatgtgtgtaatggctctttctcagtgtccttggaacaatgttctgctagatattctacttgtttctttacctttctctttttctctttctagccggagaccacccccatcaccaactcgtcccactataatccgcccactagaatcctccctgttagactaaacgaagtgtctggcatggcaattaatcactaatgaattatgcraaagcaacatatttgataaccrttgcagtaaatcatgagtagtcgcatgtgtggacatcagtaggcaagtaaccagttttactaatgcattcatcgctcatcttcattgctcatggtatgtcaaacctttggggtttgactcagaaactgctaaccttttagaggctttatatgttgtactgaccaaggtaggtttgtatagcagccctatactttggggatcatttgcctaccatgrcatatatttgaaattgctttggacaagttttctaggctatctaccaggtagctcattaaacgtaattcttcagatatgagatagtgggcttagacctaagccatacatatttcttttcccacattctgtttaggatgacagtaattctgttgtctaccattaatgctactacctactccataattgcctatttagctcctcttttcttcctttttatttcataagactgctargaagtgattttttaaaattaggactccttaagaataaacttttccagaagcacgaggtagtttgcaaaggaaaagtctgcactgtttgctctaaagagcttctcctcattccaatgtgttttgcttcatgctagaagcatatgcaacagtgaataaaagcttctttttttgttaatcagtcaataaatttggctaattagtttcagagttcaaggaagaagcaaaatatcacatctctagaagtgttgggaaaaatataatttctttctttacttatattcacctcatggtaggttatattgaaggctgacatggagaatgtttacttttctatttggcatagctaactacactttgatactaactccagttttactattattattttggttggaaaaaaaattcactctttacgtgctaatttgtaatcttgttttgtaagaatttatcctacccttgaaacaggctcagtgtaactgtatatccattctaggctttcttaataaatcttgaggctatgggataatcacatttaaagaatggttcctgaaatgaagtcagtagaaatggcatgggataagagcagagctcacacttttacagttgcagtatttcaaagtccctatccaggtcactccagaaaagggtattgaaacgttgaaatctaaagcaaatttgcaatttcttaagatttctaaaatttaccagaacagtttagcctgggggttaatagttaagtcttgaggctaagttttggactaccaaggaccagatgattcacatgtaggaaacagccagaagccaactggaattttgtgtgctaactgttcccagacagcagagcaagtattcactgagtaggggtgtcccatgacactatttcatattctacagaagtaaatcaggtttcaccaactgaaatgtctccctttgaaagtagcaaacatgatttgtatgttaacttaactttaatttcctgtgtagtttacacccagagcagatactcataaagtataaagtaaaaacttttaaccattattaaacagagaacttgccatgttgagtgccattgtattgaacttattctaaaggcttatgctaacccatttataattggtaaaaatcagaaaatacaagatttacataaaggtcatttcaacttttaaggttaccagtgattgtataaaaacatcacaatcctaaatcctctcgtatctcaccccaaaccccaaactgggggaaaaaaagttaactctttgtgaatggaaccaatgtgcaagatacatactgcatttttaaaatagtgtctcagctaaatggaaaactgttaagcaaacatccatagtaaaacaaataatcttcagtgagatctttttataaaacttcttgtttttaggattccctttgcttcttcctttgaattctctaaaataggcagctaacggattatatacttcagggtttggctttgtgctaaatgtggttttgtgttttgctgtatttcaaaattttccttctgttaaaggaaaatattgtgaataaccactggtgtgttcttagatcagcacaaaccatgtcaaaaaaaattggagatttttttccaattttccttccactgatcttaggcagtaataaacaatggcatttgtcatctttggcacttgcttttagattatagtcccacagttgcactgccccaattgtctacctttgtgggtacatttttgttctttactcctaagttatttctcatagaacccagcctactctagaatttcagcagtgacattggagaatatttttaatttgctgcagtactatgtcatattattagtatgaatctcatttcccaaagggtttgtattctgctaaaaggagatgccaatgttgaatgaagtctgaaactctagtatgtgcatagtttgacgtgcagcatgcacaccaggccttaagatgggaatgtagcttaatgattttctgtttcccataccatttctaatcttttgtgtaattttctcttaactgattgctctgatattgtaaacacaatagatgtagctctatcatgtctagcataatttaaaaaatcagtgtttttaggatttgggaaaataaactgtaaatgtttatttgataggtaaatatagttttattgtcacatgctaaatattgcatgcatattgactaattggaataaccatttactcaattatggacagcttattgaaatagtattgatttagaaaaagtatattgcatttctaaaaaacatctaccaaggttactcgtctgaatattgcttttagccgtgttttataacatagacgagcagtagggtctgtttattagcaaatttcctatttgttccaatacaaactcactttattctaaagtatattaatgaaaccagttcctgtgatgtaactgtaagccttctcgacttagacttaaaaagtggtcacatagattaattttgtgactttttagtatagactgtagccataattctcaaatatgaaatgggacctaataccagtatgtgataaatgttgatgttttctgtgtacaaacacattttctatgcatgtgtctctgtgtatatggcatatacctagtaagtatgtttctgtaagtatgtgtattttatgtccatttgagtaggtaggtaggttttaaaaatactagttaaaatgccacaagcatgagtgtgattgtatgtgcactgtgtgtatatatataaatatatgtatatgtatggttgtaaatatctatgtatacatgtacttagtatgtgtggtatcaggatattttttaaactgtgataatacaacagatagctttgaatgatctgccataacatgtggtaacaatagttcatttctcataacatatatgaggtatacaaaattttctaactccagattgtagtcattttgagaggtacaaagctcataattaccatgacaacatggtaatgtccatagacatttgtatctgaatccacaagaagatctgaatctaagaaggaattacctttgacaatatttttcggtaagaagtaaaacctctggagacctatctttaagatctctaattggaattataaattatttttggattgctgagctgaatcttaaaaagccaagttgatatacatagtcatttttcctctatggtagaagtaaaaaaaaaaaaaaaggacatagcaacattaaagtagtggatttttctgagtaaatttgctgaaaatataagagagaagctatctaataccttggaggtaggtcatccactttttcaggtaaacatttttcatttggcaaatggcataattatttgaaagtgacaggaatctcctcagaatgaagaataaagcctamtaggtctctaactgttgaactcatgaaagaagatagtgtatgagacttaagccatgagttttgtatcatttcaattagaagactactagctgtgagctcagagtttaatgtaaatgaatctagatgattttgaagaaatgattattcgttcaccagatcactcattgtacattctaaaaagctcaaatgagtcttctagatactcttactcatcctgtctggttgctatgtttaaaattatgtggtgctgtgtaggtgaaactttaagaatatttttgaagsatatgtaatatatgcactgctatttktgtgtgtgtgtgtgtctttgtatatatgtaagaatgtgtgtatgtgtgagagcaagagagaggaaactcaaagaggagtgtttgtcttaagacctgttcatactggtatattggtgagacttctcacttctggttggaggtttcacatatggctcaactcaagtcattaatctctttttaatttttactcttgaattccytaaacttcgctcattatgaaatgttttaaaattatgacaaaaattactctgtctaaccacttgccttgtctgctaccagtttgttaaaaattattccccccaaccagtaattccaccagtactacttgatttgtgttatatttcctatgtacatgtacagcctttgttttgcttgcttgtctatttttactttcccttttttgggtcaaatttttcttttgctttgtttgaagaaggaatatacagaagtaaaatcttgtcttctctgctgattctttaattaatatgagccggatactttccactgtcttcttggcactttcaggatttcttaatgctgatatatggactcttagaatggaatttttgaagaaaaatctcaaagcctgtatcgttcttgaaggtcacatgtacctattgtgaaaatgtgaagctgtatttctgaagctgaaataaattataacatttgaaggaccccttttcctcattcttgtatatatttgagtcatgtctatgcctttcagtaatacctgagacttctaaatatttatagctcttttgattaaattgtcccagagttaccaaagtaaagaatgatagcattttccatttctgtcattaatttggagaaagatgggatttttaaagggaacaaattggataaatcaaaggcaggagagtgggagacattgtgtttctgatttgatgtcattattggaatcgattgacgaacacaaaccttagcaggaggktatgatgtgacagttaccaagaagcaccatgacagtttgctgttgaaaatgaagcatttattttagaaattctgggaagtggaaggaggaaagatggtgtgcccaaatgttaggtccacagaaggcatttcttatagcaaatattttagctcctgacccaacaattagcctctgttatttgttcactgggcatagacaggacaatttgcccctttcagtttccccagttttttgtttgtttgtttgtttttgagacggagtttcgctcttgcccaggctgaagtgcagtggcactatctcggctcactgcaagctccgcctcccgggttcacgccattctcctgcctcagcctcctgaggaactgggactacaggcgcccgccaccacgcccggctaattttttttgtaatttagtagagacggggtttcaccatgttagccaggatggtctcgatctcttgacctcgtgatctgcccgcctcggcttcccaaagtgctgggattacaggygtgagccaccgcacccggcccagtttccccagttttaagagaatgtattcagaaaatgaaagaatgacacaactttgtcctaattttgagtttccagagaatagaggaagactctctattacaagagttttgatgacaagtcccttatcaattgacatattcccagattgtgccatctaaatgcagaagacaagaaggtgataggaggagagagatgttgatttattttctttctgcgatcagggcatgctcattgtgaaaagatgaactggacagattgttgtgtgaatttactctttcctgtgggatttctttttcrtatctatacattttccatgagtggaacatctgtaccttcaaaggaagcttcttactggaagaaagattctggatgcgaatcatgctgtatacctgtgttctgtttgtttgttttgttttaactgcatgattttgaagtatgttaatcatatattcagaatagtttctaaaggtaatttccaaaaacaaagaaacttattgtaactatttggcaattttccattggtgttttaaatagctctggcattggtgtaaacatatgctcaatctgtttccaagatttttgtttttctgatgggamctttaaatttcatattgagaaacgtgtttagtatttggtttagagtgacctcaaactttgcttccaagcacttcaacacacacctggcatagccacttttcagacctgttactagtattattttatattatggcagcctaataattagaatacatacaagagatattggctaaaactacaaccttaattcaaaatttctcaaagtgcattccatgaaatcttaataagttttacatacacatacaccaatggttttttggccaaatatgcttgagaaataatgactaaaaatcaaatgtttctttattgaaagacttcacagaaaccttaaaatcagactgcattgtgaatctccaagagatgagtaatgtctacatatttctcagacttatttgaccatagaacatctcacagatctagwgtcctgaggcacatgccttargaaactgcttcagtggctttaagccaaaggaaaagacattgagtgtgatttcctcagtacagactctcactaacaaaaagttggatgataaaatcaaatgtactactcaggaggctgaggcaggaggatcagttcagcccaagagtttgagaccagattggcaacacagcaagacctcatctctaaaaaaaaaaaaaaaaaaaagttgtttgttttaattagctgggcatggtggctcatgcctgtagttccagctaccggagaggctgaggcaggaggatcagttcagcccaagagtttgagaccggattggcaacacagcaagacctcatctctaaaaaaaaaaaaaagttgtttgttttaattagctggacatggtggctcatgcctgtagttccagctaccggagaggctgaggcaggaggatcacttgagcccaggagtttgagactgcagtgaactgtgatcgtgccactgcattccagcctgaggagtggaatgggaccccmccatctcttaaaaaagaaaaagaccaaatgtaagagcaacaagagctctcaactaagggcaattcatctggagctctggtactttgtcaaaggagtatctgactcttaaggaggaaagtcacattggaacaggtagcacaaaagcagtttagagacatacatgcattgagtcttaatragacttatgaaggattcagataattttataccttaccttttctctctgactctccaaaaaagggattctttaaattacctccatgagattattgtgaaggaaggcatccaggttgatctaagattaatcatcagagaagaatgttgaagactattcctattgcctttctttcctccctttcccaagccttcaggctcactcactgctctgggttattaacttacctaaaggatgggcaaagaaagcaaacagagcattttttgtgagttttttttttttttttttttttttttgagacagagtctcactctgttgcccaggctgcaatgcagtggtgtgatcttggctcactgcaacttccacctcccaagttcaagtgattcttatgcctcagcctccccagtagctaggattacaggcgtgtgccaccatgcctggctaatttttgcatttttagtagagacggcatttcaccacattggccaggctggtctcgaactcctgacctcaagtgatcygcccacctcagcttcccaaagtgctgggattacaggcatgagccactgcacctggccttttttgtgagattttaacagaaaagaaaaaagctataaggaagacctcctcagagatctggccagaggaatgtcaccataagaccaaatttcagcrttgacatagagccaaaagaatgagggtaattcatcattcttgttaataattgagtcttttatatataaattacacccatgttccagatacagctttccaatctcctttacctgatttggccaaaacatgctgctttgaagttatttttcagaatgcttaagaaaatataacctgaaattatagtcttgattaggtaaatttgcttatatgttgaatactaggatggtgagcttaagaatttgttagcaactcagtattccaatttagtactgcaactttcatatgggagtggcaattgtatgaggtacctttgtagctctacatgtaaaaagcccaaatatttgcagcacttgcctttaagcatttcggcactgtgtaagtcatataaaaattatgcaaaagaaagagcaaaaaccccaactgcccatatccttaaaagaactaattttgacccagtaaatggtatcatcaacaacaatgctttttcagcaatgacaggaagggtagatacagtaaagtgaagatgaaaagaaaaagctgtctgaggatataaatgtcaccctgatgtttcaagcaaacattctagctgtcagtggaatatattccaagacataaagtttctgatcctgtttctggatcagaacaccaaactagctcaaacaggaaagtgttttggcatatgctaacagaatgtcgcttcagcactgtggacttgctgttcagtttaatggcccacctccccaccctgctgaggtcattaaagtgttctaaagccccttcagaactcgaaaatagtttctgttttctgggcaggtgataaatctcattgagctcgacagaaatttaattacactttcttcatgaaaacaccagggatacccattacctggatctctaaagctaaagccttgcagaccccctagcccctgccccggccctgaagttgaaaggttaggtaccaataacaagttctccatcatttaaatggatgggaggcctctttagtgtagtcagcttaaactggactgaaggaaaattgattttggactttggggaagctaagatcattttttaccactgcccagaaatacaccagtcagtttggctccactaacatctcatagaaaatgaaaaagaagtttttctgtttttgtttttkttttttttttatagacttcattgctccactcacaagcaagaataagatgtgtaacaagaataagatggaartgagcgttgttgaacacctggataagaagtcaaagagagtagggtcttgagataatctcaccattctacagcttcctataatgttgagttcattaatggtttggttagaaaggggaaattaaagtgtagacttctgccaaaaaccagagggaaagctttatttggcctgctgttttcctacttacaaagctgttcattgcaatgtagggtttactgtattttctctagctgcaaatcatctccctgctgaacacaagaaaggctgatgtcaaatgaagcacaacttggaccctcatttcattatccataggtctgatgaaatgcaagccagcctagggaaatggagaaagatccagcagaccagatttcatttaccttgggcccacttcagaayaaatcagaaatacagttatacctagctcttagacagagggaaatcctagaaaatcctggggttgccatggaccagaccttgcctcctagtttccctaggcctgaatccaggctattacacaccaggactactcacctggagcaaattcttatttacaaatcctttttttctgagatcaacctctggcattctctgcattgtgattacattgctcatttgatctcttgacaccttctaatttacctcacttaaaaaaaatttaacctgccattggctacatcaactccctctccccctatggagatttcacaacattcattgaaatctttggaaataactgagtttcacaaaatcagggttgaaaatcaaatatacaagttataaaggtatttggctcggggactagtcccagttctcctgaataagagtgcatggatttatcattccatggtgcaaaataagaagctttttgagtgagctcaaatggctcatacctagaacattgctagtagccaggaaaagtcctgggaactgctaacttarctatgtgatgtcccttcatttcctttgcatgtctgcatgtttttgtgtgtgatttgaatttgacttttgtgagctatttttgcatgctattatttgggtttattttataatttaaacattgttttcttcctctgcatctgtgtctttctttttgttattttgttttgttttgttttgtttttactaggcgaccccctcctgcagttccaggacgaccatcctaacccccatcattcatctccttttgtttccaacaacatgtctatccatggtatttaaaagcttttcatttgcactatatgtcgtatgtacataaaaacttttatttttcatccatgtgtataataaaaacaaagtttattctatataaaaatgaagtgtgttctgtttctttttttaaagaagacctaaatttaaaaaagaatttgtttcaactaaaacaaggtaaggtgaatatattatgtgttcctctaagaagcttaattcaaaagttcttaaagcattgtgatttaagacggtctttggtagagactaataatctaccttcaagtgaaatttctgtccaatagaagaataaaaagaaaaagaaaatttatggatgtctagaaaaaacacagaagac

SEQ ID NO: 10024 - DNA, 299902 bp, Homo sapiens
  misc_feature (157140)..(157140): n is a, c, g, or t
ggaaatccatattttccatgaaatattgaatgttgcttctgtggagggtgtttctgtactataaaagatcaagatcgagttgtttatgtggaacccttatactgtcagttcctgttctgtcctttgggaaatatgccatttctaggaaatattattataaatctattaatgtcagaagacagaggcagaggataatattttacatgtgaaacagtattaccagaagtcaacaagtcagcaaaacttatcaatgatttctggaattaaatgaatcatgaatgcagattctcattaaatgaaatggagggctgaatgttccctaaacaaggtaaattctagaagttacaggctgtttctgtctctcacatgcctggccttgcatcattgcagtcaggtggctacaggaatacctttcctgggctggcccctgagatatcacagcccttctctcaagaatgaagagcagtgaggtgagggctaagaggaaggataaatgaataggactgcacctcttcctcctcctcttcattaacagcttcccacaccactcatcctgtctctcattctccctgcaaacagaaacttcacttctcctttccatgaatggttctcgggatgaatttcctaggttggccaacctctggggagtaatctcacttcaatcaggcagtgccatctttcaggaaaataagatttatagcagtcactgccatcaccatgataatggtgttataatgtgtgyatgtgccaggttcttgctaaggtctttatgtgtgttactcatttatccttacaactgtcttatgaaataggcattrttatgtatgatccccattgtatagataaagacagattaagtagcttgcctagagtcataagctgagttgctaaacagattgacctgcacatctgaatctaaatcttggctttttgaacattagatggtcctgcctcctaaatgtcactcatgtggcttttgatatatttatttgtggtggagggtgagtaggaaagaggtggggagtggaagggggacaggagccctggaaggagcacctgatccagaattgaaagagtctaggagggtttggatgaggctttttgggaaaaagcatgccttgttggtagagcaaggaggagccagaaatatcagactcatttgtattctgagtattggaaaaactttcattgtggccctttttaagatgaagaagctgtagccataaggtggtttgactgtcttgttctatcaatcacgaaattggagctcagagacatgagattacttgcccaggggcatgctcctagtgagtaaagtgagttctgtgtacttgaacctactctttggttccatattaattttatttagttatactgttttacccttatttgttatttctgttgtatgttgccacttgttaccagtgggaaaagagtctaaaaaatatcagaagggagtgtgtgcttgcttcaggaggaatagcagggtaatggagaaactgggacagaaatctgttcctccattgcccaagtagccagagaaaagacgggctggcacagtgagtggtggcaaagaaaggaggctggtgggcgagcccttcgtccctctgcaataaagtggggacagaccattaaggggagaccctcagagtccctcttcccacactgtggcaacctgtgcccaagtcctttttctcacctgattgggtgtcctggtttccatagctctgtgtatgtggggagagggagaagtgtaatcccactgccagggttgtgtcaggagaaagtatgttcttggaattcttaaacaggaaccctgattctcctgggaaacacggctaaacatgctgcttaggacagtactcatggracaggatatgagttaaagtggctcatgtaagctggtctactgtagtgtgtatgcttgttttagagctgcaagtaatccacttataggcattggaatctggcccgttcatcacctgagagatgttttctttctttcytttttttttttttttttttttttttagacggagtctcattctgtcacccaggctggagtgcaatggcatggtctcagctcactgcaacttccgcctcttgggttcaagtgattctccctcttcagcctcctgagtagctgggactacaggcgcatgccaccacacccagctaatttttgtatttttagtaaagatgaggtttcactgtgttggccaggctggtcttgaacacctgatctcgtgatctgccagcctcggcctcacaaagtgctgggattacaggtgtgagccaccgcgcccagctgagagatgttttctaatgatggaaattacctgtatacataggcttcttcttccttcttcttaatttttttttttgacaatgtctcaccctatcacccaggctgttgcccaggctggagtacagtggtgcaatctcggctcactgcaacctttgcctcccgggttcaagcgatcctcccacctcagcctcctaagtagctgggaccacaggcatgtgccaccatgcccagctcgttttttgtatttttggtagagacagggttttgtcatgttgtcaggctggtcttgaactcctggcctcaagtgatccrcccacctcagcctcccaaagttataaataccttctgatgtatccaaagaaaaagcttttgtaaacgtgtcccaacaactagtgcttggaggaattaatagtagaaactctgagagaccaaagtactttcaaaagacaaatgctacaattagttcttagacatttaggaaaattagaatgggggcttgaactgggtaagatttcgtgagaactcagctctgacctgtttacatatgtggggttttaacagtcactgggtttggttgagcctaagaagaagggaatggaaaatgctcttggaggtgtggtccaggtcatgagctctggagtgagatagacttgggcttacttmccagctcsactgtgttttagctggtgacattggaccccagtctgttttctcattcataaagtgggaatagtaacattatttatggattgttgtgcagaatacttacactatgttgaagcaactccagattttccagatagcaataatggagggaaaatcattgcattagaagatcttgttttgaaaccaaacatgttgttttacttagattgattatttagggaaagctggtagagattgtggggaatgttaatatgtctcccaagctattcttgttgcttttactttgtgaagtgctaacatatagggcctggtgtgtagaaaacctgcagtcaatgacagcttgttgttatttcttgtgaacacaattgagatcatctagtgtatacactgaaaatcttttatttttcactttttacattactaatttttttatgttattaaatgccctttaaaaatgatcatattcagtgactatatatacaattatctgtttctgtattattctcattgtgggacttttaggctatttccaacatttttcttataactcgtgaagtatatctttgtctgaacttatggctcaattcttgcaaggggagaggcaattctgttttaactatggttgtcaatggcaagtctgagtcagaatctgatgccacaaccatcctaggcccagctaccatgctctgttgtttgtcattgacctgtttgtttctcaggcttcggagacctgtgaagttacctcattttggttccgttgggcctcaagtgcagagtaagtgcttgttaaaggtttgtggagataaattgaggataaaagttttggggttgcaaagaggtttgagaactgccagtccatgttctccttctctatgttgwaactatttttaagtgctagggaatggggtatataaaagacaatatgatctcttccctcacgaagcttattatctagttgagaaggtcacactagtggaaagtaaataattagagaagttagtcaagtcatataatggcaactaaaagtctgatgaggagtttagaactagcagaaaattcttactgctatagactcatcagagagggcttcatggaggaagtgaagtgaggcaggttttaggatttagctattcatagagagagagggtctgtgggattttgggcaggagcaccagcatgagcaaaggagcaggagtgggaatgagtgtgggacatgagagggcacggtatgcacatttgggggagcagaaggaaatagcattaggggctaggcagggtggggccacattcaggagggctggaagccaaacagttgagaagcataataagaaataaagagtctttgtaggtttatgagtgacatgaggaaagtggttgaactggaaattcaaaggtggtgtcagaaatattgctccgaaaaggtcatttataagtacacagatatttggcagtaataatatgttatacatctggaatcctttaaagcttccacagatctcacttaatccttgtatgtccaggagtggccaatgattattatccccaatttacagatggggaaactgagctttcaagtggttgagtgacctctcagtatcacacagttagaaaacgggcagatggaggaacccaaatctcctcattcctggaccattggtttttcagtgatgcctcagggtgcaagggacacatcttccattgttaagggaactacttcttggaaagaaagatgccgtcagtgtgtagttaatgtgtatcaggtactttacatacatttggcatcatcagcctaatggtcttgtagctgttggtcaatagctctattttacagataaggaaactgaggcttaaggaggttaaacarcttgcccagcgccacacatccagttagaggcagagtgaggggccctgctccaagtgtgcatgactgtttcttgccttggttcttcccacacctgacacttgggcacactgcagctacttctacttcttgctttgctcagcgatgtgaggggttgattttcaggttacatatacaaaattaaattattttggaatgagttcaaagcaagtgtcttggctgaatattacaccgtattttatggaggtgtctgtatatcgagtatattgagtgaatattagtaatttcaagaaactaattaggaaaagcagaagtttgatctctggtaggagtttgaggatatatgcttatgcttcttctaaggctctcttaacttcgggatggagattcctgtcctcagtgcagcatgcaaggtgcctagtgaggagacccttgcttatgtctctcgtctcagcttctgcctccttgtgtcttgcacatagctacatggaaggaatatcaactcctgcacagagtttcacatgttctctgtgctccatgcatgtgctggaaggtgctgaaatgtgcctcctctctatagcccctatctgtccttccctttagcctagctaactgtgttcatccatcaaaactaagcacaacatccagtctcctctgggcttcccctacagctcctttccagcccttggaccaggtttggcattcctgccctctgttcccccccgtcatggcacttctactctgtgttttccaggaagatagcacagaggtggaagtgtatatgtggtatgcagggatactcaatcggccaccctgggtagaatgagtttgcatagaaaaggtgtatgaaagaaaggggcctcagtcatagagtgcttcagccattttgggtgcaaacaacataaatagactttttggtgtctaaatatcaccctaacttctctycttaagttagggtgcttaagttattatctgcttaagagtggacccctgcttaagcatcctagtcatgtaccagcccctggctgcactggggcagggagagggacaatgaaatcccattggcttctgtaaggacaatgggatcctacttcctgtcagtgctattcacaatgggggatttccccagaagggagatccaggtgctagcagaaaaaagggaaggatgccagacaaccagaaccccataaatgtctgctctggagaaaccaggaaggaagcayggcctgaggcactcgaggggctctcaacaccagcctcaaatggcaggtacagggagaggcctttcctctctaggagccactgagagattggcagtaggggagtgggctaggcacccagagcagcatttttagaagctgaatctttagtcgtgggcctcatggcctggagagagctggggctgaaagtctgaaagtggggggaccagtcaggagattagtgtctgtgtgcagtaaacacggaaccagaaatctggaattcaccatgagtcattagcagatggggattagaactcattgaccttggggaagtcatcagacttttcttgcctcaggtgaacacagtggcataattatgctggcccacccagtgaaatgctgccrgaatgaactcagtcatctctttcatccagatacagattcatcatggtgtcaggtttagctcattgcttgtttctaccccttgtgtgtctgatcattttctagttaccactccttttttttctgaaatgaaaagtcaaggcatgtgaaaacctgacgttcacagtaatctaagcacatccttgctctgtcagggagagattctgcctccagatggtgcattcatctggtctttggcatgttctgagccaggatttagacaaaatgaaaggttgtttgaatactaatgtaaaatctcattgggcaaggaaaactgtctatttggattatgaatagaatctgtacagtggcctattcacttcaatgttaattgtcaccatttagtggagctggacagcatttagaaaatgaggaataacgccttcaacaaagctcttttcatggacagcttttacaatgtgctcaattctatggctcttgaacaaaagtccatattttctccttgggtttgtcatgctctgagcttgcacaacaactaggagtttggcctaactatggttcacaggtcaacatgtttaacctttatgtggagacttacaagagtgacagcttcttggtagtttttaatgatttttgacctgtttaatattgtgttttatcttgagaaattatttctacatatccttacattggaactgtacttcacagagacctttaacacattatctccttttatctgcataggcccatgcaagagaactcctggtatcttagtctaatttccagtggggtttgtaagaagagggttaaaattgctctgtccttaacactaagaatagaatttcattgtccctttatttgagtagctcatagtattttatacacactaattcattaaccctcaacaaagttctgtgtgtaggcagtggaaaatattcttttccctgtggcagtatttacacattgagaaaccaagtcacgaggcacagcagggttgggctggtccacagggagccaggggtaatttgggccgcccagttcttagtctagccctcttccttgaccattagaaaacctgaacatgtttttctttggaaaataatcatgatttccaaagaaaatagccctgaaggccaaattctacccggagaactgaactgtaaaagggaagagtttgggggcggttttctcacaaaatggttgatgtggtttcattttcttatgttgtcactaagtgttttgtctgctgtagccaggaaccagatggtcaacatggcagtatgtttttgtttctaagaaccagtttttgaatgtccccatcttgttttgctgctgatacctttccaagtgtcagatgagcaaggcagcacctgctgttccagctcaggctctgcaatrggtgccgaaaagcctcccttcttcccttctcagatttcaacatccttaagggcgagaatggtctctaatcttcctcctttttacctcttttcttgttcctayrtgtgctttggcaagagagtacctcagtaaaggatttggtgggcagaataaagcccagatctgtatatcttggtatccaggaggcagctcgccacatgtggacacctcaaacttactgagttactgatttccatccaaaacagaattcctggtttcctttcccaaatctgtaccatctgtgtcattccctatctctgctagtggcaatttcattattttctcagacgtcaaacttgggagatttttgtctctctttctttcatatcccactgccaaattgtcaggaaatcctattggctctcccttcagaatatagccagttacttctcaccagcactttgctaccctcaaatctcagacaccatcatctcttccctagattatggcaactgcatctaagcacatcctcctgcatctacccttgatccctcttagtctgcctgtgactattgtcagaatgatcctgtttgtgtgtctgtcagattatgtcactcagctcagaaccctcaaatggatcctctgcatactcagaagaaaagtcaacgtccttaggaggacctacaaggccttgcataatagatccttcattttcctctgtgtcttcatcttctattactctccacttcactctgctgcagacatactggccttcttgctgctcctataaaaagaatgttggaggctgggcgcggtggctcatgcctgtaatcttagcactttgggaggccgaggtgggtggatcacgaggtcaggagatggagaccatcctggctaacatggtgaaatcctgtctctactaaaaaatatataaaaaattagccaggcatggtggcgggcacgtgtagtcccagctacttgggagtctgaggcaggagaaaggggagaacctgggaggcagagtttgcagtgagccgagattgcgccactgctctctagcctgggtgacagagcaagactccgtcccaaaaaaaaaaaaaaaaaaaaaagaatgttggactcttcaattgcatgtttcatatttcttagcatctctttcccatttttcaccttctctagctctgtgctatattctgggtaatttccaagattcaaattccaatatattactgacattttcacttttcttctttgctttttaacttgtccagtgaaatttcatacacgatacttttatttttaggagttctgtctggttctttgtcaagttggcctgttcctttctgatgctttgagttattttttaacatctttatttaaacatagttattttacaaaatattcgatcagtctatcatttgaagttctaaagggcctgttgtttgtactgtctttttcatgatggatagttttgtcaagtgtttcataatattgaatggtgagcctatgtccaatgaaactttaactgggggagtcctgtaattgtgagttaaccccaaatgcattaccagtatggaaccattttatatgttaatttttcagttaaagggctccagggaacccttctttcctcactcatcaaagacttaggctgagaccagaaacatttcttgttttttcctttggctactggtcatatttttctattatcattatttgaataaagacatggccctttgggggtactgccttatttagttctaactccttaccacacatgggcaagatgtctccccttccctcagtagccattaaacccaatcttctgggctgctgagaccattaaaacacttcaggcmaagattcttcgtaggacatcactctgtttttcaatgagtctttattttatgactttgggagtgctcccttgctttcttgggagagcrcaactatgcatttaagtaattctgaaacagagtccatccaatgcttcaagcaataaggttctcatgttattcaatccattatttgggtagaaaggaagtcctttttttaaaaaaaaaaaaaactcaattaacaaatctttatcaagtcctyctgcaagctcaccctgcccactcctggcaggattagtccctctcctgtcaccccatttcttctctttactctaatgttcattacctggcattggctgtttcgccctgtgcttcttctgatagactaagaattcctgatggcagagacctgtcttactcaccttagaatttccagtgccaagcacagggtagaaggggagggtaacactgaaaagggaggatttgaacacaccagagaagaagggactattgtaggcacacagtccctcagctattaggaatgaatgggattcggccacaagaggaaggagaagagatggatggagggaatagatgcagagccagaaaggaagagtttcaaaggcctaacctgtgaccagttgatgaaaaatgttgatttcaaagtagagagtgatatcttctgttcagagtgaggtgggatcttaaggatggaggaaaactgaaagcaccactgtggttcttttaaaaaaaatattgcagttaggtgtaactgaattggcagaacataacctggtgtgagctcatgacagagaattgtacagtggatttagtctagcattggtattatagactatctagcaataaatcactgattataattgagttttgctaggcacattccacatctggggaattttgcatagtatctgtgttttactaggtgctctgtacattctcatctgaaatgagtttttcttcacaaatgtgtaatataaatgtatagaccacatacctagacaggtctgtgatgcatgcaggtacacacacacacacacacacacacacasacacacacacacacacaccacactcacaggcaggggactgtatatttcttgtaacttggctaataggcctgcttgccccaaactctgtatactgactgccttctgtgttcccatctttgagtcagtgttctgaatcaaggtataggctgctggtaggaaagatcaagattttaaactcattactactcactgtcatattaacttgggttatatcactgagttaattaactatcacrtagtacagaatatgaacttaaagcactagtgaacaagataggtaaaagtttgttatgtcactttgggaggccgaggcagacagatcacgaggtcaggagatcaagaccatcctggctaacacggtgaaaccccgtctctactaaaaatacaaaaaattagctgggcatggtggcgggcacctgtagccccagctacttgggaggctgaggcaggagaatggtgtgaacccaggaggtggaggttgcagtgagccgagatcggccactgcactccagcctgggtgacagagcaagactccgtctcaaaaaaaaaaaaaaagtttgttatgtgtttgtgagtgcatgtacatgtgtatgttggtagtggggttaagatgaactaaaagttagtcctattaatgtgatgaaaaagtactgattaagtaatgaccttatacaggcatatcttgaagatattacaatttcagttccacatcaccacaataaaggaaatattgcaataaaatgagtcacatgaggtttttggttttccagtgcatataaaatttatgtttaaattatactgtagtctattaggaatacaatagcactatgtctaaaaaatgtaaatacctaattaaaaatactttattgccaaaaaatgctaaggatcatctgagcctttagtaagtcaatttttttttttctggtagagagtcttgccttgatgttgatggctgctgactgatcagtttggtggttgctgaaggttggggtggctctttaaaataagacagtcatgaagtttgctgcattgattgactcttcctttcatgaaagatttctctgtagcatgtgatgctgtttgaaatagcattttattcatggtaatacttctttcaaatctggagtcaatcctcttaactttgcctatgccttataaactaagtttatgtaatattctaaattttttgttgtcttttcaacaacgttcacagcatcttcactaggagtagtttccatatcaagaaaccactttctttgctcatccataataagcaactcttcatccactcaagtttgatcatgagattgcagcagttcagtcccatcttatcgctccacttccaattctaattctcttgctgtttccatcatatcagtagttatttccttcactgaagccttggacccctcaaaccctcatccacgtcatccacgagggttggaatcaacttctttcaaattcctgttaatgttgctatcttgacctcccatgaatcacaaatgtccttaatgacatctagaatggtgaattctttccagaggattttcagtttactttgctcagatccatcagattaatcattatttatggcaactgtacttacaaaatgcatttcttaaataataagacttgaaagtcaaaattactcgttgatccttgggctgcagaattaatattatgttgacaggcataaaaacaacattaatctccttgtacatctccatcagagctcttgggttaccaggtacattgtcagtgagcagtaatattttgaaagaaatctgttttctgagcagtaggtctcaataatggccttaagatattcagtaaaccatgctgtaggaagatgtactgtcatccaggctttgttgttctgtttatagagcacaagcagagtagatttagcatacttcctaagggccctaggacttttggaatggtaaatgagcatcggcttcaacttcaagtcaccagctgtattagttcctaatgagagagtcagcctgtcctttgaagcttttaagctaggcattgacacctcctccttacctatgaaagtcctagattacatctttttccaaaaaaaggttgttttgtccacactgaaaatctgttgtttactgtagccaccttcatcaatgatcttagccagattggctggataacttgctgcagagtctacatcagaacttgcttcccttgcactttgatgttctggagatggcttcttaaacctcatgaaccaacctctgatagtttccaacttttcttttgcagcttctttacctctcttagccttcatacaatggaagagttagggctttgctctggattaggctttagcttaagggaatgttgtatctagtttgatcttctatccacaccactcaaactttctccgtatcagcaataaggctgtttcactttcttatcattcgtgtgttcctggagaagtacttttaatttctttcaataacttttccttcacattcacaccttgactgtttggcacaagaggcctgctttcagctatcttggcttttgaygtgcctttctcactaagctcaataatttcttgcttttgatttgaagtgagagacatgcaactcttcctttcacctgaacacttagaggccattgtagggttattaattggcctaatttcaatattgtgtctcagggaataggaaaggcccaaggagagaggcagagaagagggaatggccagatggtggagcagacagaacacacataacatttattcaattcaccatattttgtgggtacagtttatgacaccccaaaacaatgacaataacatcaaagattactggtcatagatcaccatgccagatataataatagtgaaaaagtttgaaacattgtgagaattttcaaaatgtgacacagagacacgaagcgagcacatgctattgcaaaaatagtggggatagacttgctcaatgcaggattgccacaaactttcagtttgtaagaaacacaatatctgcacagaacacaaaaaagcaaaatgcagtaacttgaagcacaacaagacatgcctgtatttggtatgcacaagcttgcgtatcctgttgctgctaatgttagtttcttggattacatttcttttccagaacaggtagagagtagttcagttcatgacatgtgaagatctgctttcatttggcgtttactgacttacattctgtaaaacttagcatttagtttctagtgtctttataatagtgcattggccaaaatattgagcttagtgttgctttaggaaacacattgatatgggagagccataggaaatatgatctgagaaggggacttttagttttctgaggatttgaggataagttaatactgtggagaaggaaaaagcccaagttctttctgcctcacagcaagcatggcattttttggagcacatccaatattaagagttacacacttgtccaagtgaagattgcctggaaagagaaaaccttattctttggtttctcttggtgtgaaatatcaataaggaacttatatatcacaaaataaaaccatgtgctgcaatggaatctatgcagattatacatttttaattttcttcacaaaatatttgaaatattagaatacaactaatatgtcttcataccttacttaacatggattttaatataaagtatgagttatcaattaaattataatgtaagctaaagtattcaggattttatctggtaggtatcttttaagacagaaatttatatactactttcctaggggattacactaaggattttattatgtagttaactggtatgactttcctagaatgtaggaacctgcctgtgaggaatactctttctggagaagttttggagggagctaaccttttctctttgctttaaggaaaaggtacagctaagtaactgaagcaaaattaaaatctggcyaaatttcttttttaaaaaattgttattattttgagacaagatctcactctgctgcccaggctggagtgcaatggcccaatctcggttaactgcaacctccgcctcccaggttcaagcgattaccctgcctcagcttcccaagtagctgggattacaggtgcacaccaccacacctggctaatttttgtaatttttgtacagacaaggttttgccgtgttggccaggctggtctcraactcctgatctcagatgatccgcccacctcggcctcccaaagtgctgggattacaagcatgagctaccttgcccagccaaaatctgaccaattttcaaagaaggatgtggaacacttcttcagtgtgcaggactgttcctgttacaggacatttaatatctgtgggcactaggcaccgagtgctggatctgctctctccaggactggtgtgccctcgtttctttcctctgtccttgcaagcaggcacaggtctccactaacttaaagaccaacataaagcaaaagctcccttcattttatatccattgcacttgaactggtaactagcagctttctggtttacaaagactatggcccttttcagtccttgtctttcttggcctcaccacagtcctctgtaagctccgagcattgtgcattactattaaactatttgtttagctctcaattgttrgcaaacagttcatgtgtttggacttggctgtctgtaaacttttcaagggcaggaccttgtatttcttcatgccctttgtaatattcaggacgatttttaaaaataaatatttgttagttgaagatttctttgtaactcattggagtgttgtaggaaagttcttttttgttttaactttggattttaaatgctgactttcacaagtctgttttgtatgtgagagaaatttgtagttcttgttctcagcatatgtagttacgtttgtgcaagttacaggagccctagggtagaggtggatttcaatcacaatagcaattttttgactcacctttcaccagtgaaaccatttgatcttcagttctcacattgtttctcctttcttaaaacaccactcatgagtccttttcccagtgcaggcttttctgatgacttcagccagaaagccctgtcttttcctgaactctcacagcacttaatgtttaactcggtcatccccacatttccctccttactgctccacctgcctaggtcatgctactttttctaccaacacagctgtggccaaggggccaacaacctgtcaaatcatggaaccagtgggttcttttcagttcttttgtttgtttgcttcatttaccctaagacatttgccttcttgtccatctatttattgaaactgtctcctttcttggattttgtcatatacaccccttctacatttctaacatagcaatggagttgggtgattgggagtgagggatctggattcgaatcttgtctaggtttgaatcctggttctgtcactttcttgttgtgtgaccttgggcaaggtgctcaacctccctgtgcctcactttccttatatgtaaaatggggataataatagtaggtataatatatggttgtaaagattaaataaactaagaagcactcagaacattgcctagtataatagagtgctcaaaaatgtcagctctgattgttgtttcttggactattctttcttgatgtcttttatgagctcctcttcctctagttttctcttggagttctccaagtttctgttcgaaaataagtaattttggccttgcaagtagcaactcccttgattaactcattgattcccaatggccttaactactatgtcagatcaaaaatctttctttccagcccagacttctctttctgaagctccagaactgtgttttcaacccttcctagacacaagtcatcacatttcatttttttcttcttctcatatgcttctccttggtcaatggcaccatccacctagtttcccatgctaggaaccaaggagtcacattaattctgcctagttcttatttcccactacttctagttcagcaccaaggcctgtccattttgtctcctaatatctcttgaatttatctttcccctctgtatgacattgctttcactcagcctctcagtgtcctttgcctgaaggatagcagtggtctcttacttggtttccctgactttgatctttctcctcttctagtccatccttcaccttctgccagaagatcttaaaaaaacaatttgcctcacatcccttccccacttaaaaatccacttactggcttgaagttcacaatacttaktaaaacatatcattgaggtacagaaaaggttcccatccttctctcctactaccattcccttagtctatttatttatttttttagagacagggtcttgctcttgcttccaggctggagtgcagtggtgcaatcacagcttactgcagcttcaaactcctgggctcaagagatcctcccacctcagcctcccaagtakttgggactgcaggcacctattatcacatctggctaacttgtttttgtcttagtctgttttgtgctgctctaatggagtaacacagatggggtaatttataaagaaaataaatttatttggttcatggttctggaggctgagaagttctagctggtggggctgcatcatctcatggcagaagggcaagagagcatgagagaggaagagggggccaaacgtccttttataacaaaccctctcatgataataaacccacacccatgataatgacattaatccattcatgagggcagagtcctcatgacctaatsacctcttaaaggcccacctctcaatactgttgcattggggattaagtttccaacaggtgcttttctggaggacacattcaaaccatagcattctgcctctggaccccccaaattcctgttcttctcacaatgtaaaatacatccattttatcccaatagtcttgaaagtcttaactcattccagcatcaactcaaaagttcaaagtacaaactgtcatataaatcagaaatggggaagattcaaggcatgattcaccctgaggcaagttccttccagttgtgagcatgtgaaatcaaaagaatatgtacttccaaaatataatgatgggacaggtataggatagacattccctttccaagagggaaaagaaggcaagaaaaaaaggggtacctgctcctgagtaagtctaaaacccaacaggaaaaataacatttagtcttaaagccagaggataatctcctttgattccatgtcccacacctttggcacactggggtgggggttggacctccaaggtctcaggaagccctgccctatatctttgttgggctcactcaacccagtagctctgacaggttggaggcttgtgcctgcagcttgagttgcaagctggtggccctacagttctggggtctcaggcgttgcctcactgtcatgactctactcggaattaccctagtggaggctctctttggtggctccattcctgtgacaagtctctgtgttggtccccaggctgtcccacgtgtcctttgaaatgtaggtggatgctgctgtggccccacagcttctgcattctgcacacctgcagaattaacaccatgtggatgctgccaagatttgctgcctgcacctgtcaactgtagaatgatgaggttcataaatttgaaatgaagaactttatttctcataaagggttgcagccagcagagtggccattctgacagactggaaagggaagccacctgccagaagcccaaaacagatactttgagagagggacaaaaagaacaaaagtgtatgctaagtgaggtggctgaatatatatattcaataagctacaggagaagttatgaatatttatgaaaggagaaacatgagcatgcacagttgagcttcatgtcccttcaagggtcccatgttcaaaaactggcagccttagcataatccaagggtggagtttttggccctctgacctcaaaagccgtagcagagggcacagaaacccttactgtgcattctctgtagactggtcagaaccactccgtggttggtggtctcttaggcaaaaaaggaggggcagcatcaggtagttggttgatatcagtggtggagtcttttgaaagagctgtaaagccttgaggaaagaaaacctcattgtggttagcgagggagtgggtgttacaagaggtgtgtctgagcctccctcctatcgtggccaataattcagttttcaaggttactttggggtcccctttgccaagagatggtctgttccatcagttggggggcttagaattttatttttagtttacatacctcctgaagttttggcctgagccacacttgagtcccttgagccatacctggtataactaaggagtgctgccatagaatatggagagcaaagacttgaggacaacactgggaaactagccccaagttcccaaggatgccctggtcctttcttttgacatatttccttctcccaggacttggcactctggacctgtgatgaaagaaggtgacaacagtaatctccaaagtgccatcagggtcattctcccatcatcttgatgaatagactctggcttccttctatccgtattaatctcttagcaaacagttgattggccacacctttagtattctttcctggacagcttttctcttctttacatggctgggctgagagtttcccaaacctttatgttgtatgttccttttaattataaatttcatttaaaaattgccttctctcattttattataagtggccaaaggaatattatgctgcttgaatattatgcagcactttgaatattatgctgcttagatatttcttttgacagatatcctagttcattgctattaaattctgccttccacaaagtcttaagacatggacataaattgaaaagttctttgcaactttataacaaggatgacatttactccagtttttaataccttgttcctcatttctgtttgaaacctcatcagaatggcctttaccattcatatttctaccacattctggtcatggcacttaaggaatccctgagaagatttatgctctccatacggcacttgtctttttctgagccctcaccagcattgctttgaatgctccacttayggcaatctaggctttttctagcttgcccctccaaattctttcagcctccacccattacctagtttcaaagctgcttcattttcgggtgtttgttatggtcagtccccattctcagtaccaatttcctgtcttagtctgtttcgtgctgctgtagcagaataacacagattgggtaatttataaagaaaataaatgtatttggcttatggttctgtaggctgggaagtccaagattgggagaccacatctgctgagggcctttgtgccacactatcccrtggtggaagttggaatggcaagagagcatgacagagcaagagggggccaaacccacttttataacaaacccactctcatgataacaaaatcactcatccaataaccacattaatccattcacaagggcagagacctcttaaaggttccacttgtcaatactgttgcacggggtttaagtttccaacccatgctttttggggaacacatttgaaccacagtaaccacccatatacatttttctcaatagccctggaagtggttatagccctatgaataggctgcctgaaaatgcagacaaaagagagaggtggtgttgtctctagtagttagatttattaacttctgagtactcttacttggaaacccttctattggaagcccttctaagtagcaggaagatttttcaagtgcctgtgtgtccacaactactctttctacctccacttttttgtctgttcagtctattcagcagtctttggtttagtctcatgaaaatataactttaggtgagttattgccccacttcaaacgcttcagtaaattcttgctgcctttggaaggagatttttaaccagaagaatgtttttttttctctcgattctcacaaccttaaactaaacccatgatctcccaaaagaaaaccaatctcatgatttagcaatttctttgtatttgcccataagtggcatatcctaccttgttcattagctatattctgtagggtgggtgtgaattttttaatatattttaaaaattccaattcattcttaaaggataaagcttttctgccacacaaaataatccaaacaacatgtcacaagctgtgaaataagttctaaaaatgttttcagtagtagcaaactcattggaaaatgtaaataataatactaaaaaagaaaacaccacctatagtagccaccacaaaggagagaaaactaataggaggcatacattctagcataatttttaattgaaattttaattgatgtaattgtagacccacatgcagttgtaagaaacagtagagatactttgtatactctgcccaattcccccaatggaaacattttataaaactatattcagacttcttgtagtcttaatataacaaccaatctagacattgacacatgttatcaattgtaagaaacaatagagatactttgtatactctgcctagttcccacaatggaaacattttataaagctatattcagacgtgttgtagtcttaatataacaacgaatatagacattgacacaattttatccatctcattcaactttactaagttttactttatttatttatttatttatttagagacagagtctcactctgtcatccaggctggagtgcagtggcacagctagctgcaacctctgcctcccagattcaagcaattctggtgactcagcctcccgagtagctgggattacaagcatgcaccaccacacccagctaatttttgtatttttagtagagacagggttttgccatgttggccaggctggtcttgaactcctgacttcaagtgrtccacccgctttggcctcccacagtgctgggattacaggtgtgagccacggtgctaggccagttttacttatattttagtatgtgtgttttaaaatttcaataacattttgtcatttgtgtaagttcatgtatctacaaccacagccaagatactgaacagttccaaaaccacaaggatccctcctgttacccttttatagtcagagccatctcccttcccccagtgtggtgtctaacctttggcaaccactaatctgccactgtcttccgtatctataaatttttcgtttaaaaatattatatatatggaattatacagactgtaacctttaggattggcttttatcgctcagcataatttcctgaagtttcatccatgttctcgtatgtatcaatagtttgctcccttttattgatatgtagtatacattgctctggtttctgtattatctataatactgaagtttaaccattaacctgttgaaagacatttgggctgattctaatttttggctattacaaataagactgctatgaacaatcatgtacaggtttttgtgtgaacacattttatttctccaaggagaaaatgcccttttgcacagttgctggtggcagttgcatgttcggttttaagaaactgctaaactgctttccagagtggctttattgttttgcatctctaccagcaaaaaaamcagtttttccatatctgctatagcatttggtgatggcactttttttgtgtgttagccattttgaatggtatgcattgatatctcattgtgattttaatttccatttccccaatggctaatgatgttgaaaatattcatttgccatctgtatatcctttttagtgaaatgtctgttcatgtcttttgtcaattttctaattgcattgcttgagagttctttatatattttgcatactagccctttgatggatatgtggtttgcaaatattttctcccactctggagcatgtcttttcatcctccttacatgggctttcacagagcgaaattttgatgtctggcatggtttaaaagaagcattcttagcctttttttttcaggtctaacgggcccttgagaatccgatgaaaactgtagaatcttgacagaaaaatatacatgcacagaataatttgcatctaatttcatggaattcatggcctctataaagtttgttgatggaccatatgttatgaactcatggcttaattaatgttgcattaatttccagcaatcccacataagactctagggagagttaccctccctcatcaaagtaaaaagtgggaaaccctgtagcttacaaaartaagagcaagtttctcagccaggctttatctaggacctgacccaagtgttcctttcacagtaatacattcctttacttctctgggagacattgccagattgctaccttaaacgttgatagattgaagagctactccacaagaagcaatcttttcatactgaactcagacttttaggtatcagcaaatgaatgaacttttgggcttttgtacccgccagttcagttttagcagcatgactcttgtctatgtgatttattacttttcttgctctacctttataaaaatgaggggaaaataaatagaaatgagatattgatgaagaagcaaggatctgataaatttgatatgatcacatgcagttgtgagaaacaatacagcgatacttaggtgtgcccaagcagagaattgtcagtatcagctgggttttcattgaacttgattatatatatatatatatatatatatatatatatatatatatatwtttttttttttttttttttttttttttttttttttgagacggaatctcgctctgtcacccaggctggagtgcagtggcgcgatctcagctcactgcaacctccgcctcccggtttcaagcgattctcctgcctcagcctccagagtagctgggattacaggcgtctgccaccacacctggctaattttttgtatttttagtagagatggggtttcactatgttggtcaggctggtcttgaactcctgacctcaggtgatccaccygccttggcctcccaaagaacttgataatatatttcattgtgaggggagggcaaaagtaaagcacatgtrggaaaagctagaatatatgttgttgaaaattctggctaaaaggaaatgtgtaattaagagtgttattgctgggtctctggcaaaaggactcctggcccctataagtctattcatttttgtcacaaatgtagtatgtgtgttttaaggatggattatgtataaacataggaggctgatgacgtttgctctytctggttcataaacctattgcttcaacccctcaaactcctttgtgtttcctaaagatagcatgtccttatctgtcttcatactgaactccgactttccatttacagaacttctttatctgtttatgcttgcctgacattaccatgttctgccagtccagtggtcttcctccttgcatcctctagcttctcatggatgtagatcatattatcccaactagattctgagctcatcaatgatacagtcagcattctatatattttaatatccttccctagatggcctgcatagtgctttgcacatagtaagtgacagtacattgggttttggacatgaaagacatactttagaaatttattgctaatgaggaaattgataccttggtaggtcgtatcttgcccatgatgcttgagtgatgattgagctttgcgttgacatgaacaatacattaaacagactcatagcataagtaagattgtaaaggtgatgtctgatagattgagaacaagcttttaaagggcttaatcactttgtgtgcaaatatatcctgcgaaatacaagtgagtgtgacaggtttggcggaacattttgttagcagctagcttgtgctcctctttgtactttataaacgttaggctgcacaatttcagactgactggctctccttcctccctatccccacaaccaccattagtttgaattaatgagatcttagtgaacagttactttgttgtttcctttctaatcttcagacatctccccactgagtttaccaaataattcaaccctttcacttaaagcagcttagacctgcataactcaggtagataactgtagtctgaaacaggtctatagacactgttgtgtgttcaataataggtttatttcaaatactgtctccctacccatttccattgtgctggcattgaaggtttttacttagacttggccttatctcccagctgtttactgttcttttccagttagtataacagttgtgaaatgcaattataagcctacattcctaggttagtataaggaactgtgagtcagcatttccttccaaatgcagaaagtttcaaactaacatggcaaatagaattacctcaatagttgttgctctgtcctttgaattttcaaactgtagggggaccattcagctctataaaatcaaataaaattctgtggagctttatgtcttacatttatttggtacaatgtatttggaattcctgatccctggaggtttctctgggccatcaggtttaggctgagctgggtaggcctatttcagaccctcctggccccaattaccagttactgctgagtcattttggtcagtttaatatttagagattctgagtgatttcatttgaaataaatattcaaagtcttaaaaaatccttttatatacttaacatgtaataataataataatagttaatagttgcaactagcatttagtgtttctggtagacactaagttttttctctttttaccctatcaaatctcttaatcgtcacaacagtctttgggataggtactatgattaattctacttgacagacgaggaactggccaaggaaagtaaaatagtgaacctaaagtcatgcaattaagacatactgtaggccggggcagtggttcacacctgtaatcccaacactgggaggctgaggtgggaggattgcttgagctcaggagttcaagaccagcctgggcaacagagtgacactccatctctttaaaaaaaaaaaaaaaaggtgggtgtggtggtatgctcctgcagttccagctactcagagggctgaggtgggaggatcacttgaactggggaggtcaaggctacagtgagccttgattgtgccactgctctccagcctgggtgacagagtgagactctgtttcaaaacaaaaacaaaaccaaaaacaaaacataccatagctgagattcaatgcagcttgttcccaagcctgtattcctaactgtgaagcttttgctgtcttttagccaagcaaatcactgtctttcagaccagttgtatgttacaaaaggactttgtgctgaggctacagagaacatgggatgggatcagacaggctggatttacatctgctaagccacttctagctgctggacctcagtcaagtgccacaactttgctgagcttttctttcctcatatgtaaagtgaggacaggaacatgcgaggtccccttatctgaggatagcaggtatgatattgtgaaacatacacggtattttgacttcattctttctcctgtttcctggcatacaatgcctaaactccttagaatctcccaaatgatgtattttttatgctaatgaggtgactggtggctggcagcccctaggtagtttcaggataggcactggtcacaggaaagactaagggaagattagaggattgggattttcagctccacccsccaacctctggggagaagagaggggctgaagactaaactgatcacaaatggccaatgatgcaatgagtcatgcttatgtaatgaagcttccttaaaaaccyaaaaggactgggttcttggaactactggatggcagaacacgtggaggttcctggagggtggcacacccaggggagggtagggaagctccttgcccttttccacatgcttcaccctatgcatttcttcatctgtacccttcgtaatatcctttataataaaccagtacatgtaagtgtttccctgagttctgtgagccacactaggaaattagtcaaacccaaggagagggttgtgggatccctgatttatagtcagttggtcagagcacaggtgaaacaacctgagacttgcattggcatcagaaatgtgggacagtcttgtgggactgagtcctcaacctgtgggatctgatgctatctccaggtagtatgggaattggaggacacccagcttgtgtctgctgcagaattgcttgcttgcttcaacaagcaaggaaattccccatccccctgctgaagcatgttgtgagattatagtagaagaaactgttttttttctactgagtgggtcacagggatgtcccttaatgtgaatctccttaaaatggagaccaacatttcataggaagcagtggtggaaaaaagacttgcctgaggttccattgtgtgaaaatgaaaataaagtatgaaaataagcagccgggtgtggtggctcacgcctgtaatcccagcactttgggaggcccaggcaggcggatcacaaggtcaggagattgagaccaacctggcgaacactgtgaaactctgtctctactaaaaatacaaaaaaattagctgggcgtggtgrcgggtgcctgtggtcccagctacttgggaggctgaggcaggagaatggcatgaacccaggaggtggagcttgcagtgagccaagatcgcaccactgcactccagcctgggtgacagagcaagactctgtctcaaaaaaaaaaaaaaaaaaaaaagaaaataagcatatttataaagtttatatttcaattccttggctaaaaaggaacataggatcatggttagtggtacaggctgcatttgaacaccattttctaactatgtagtcttatgcaattttctaactatgtagtcttatgcaaattatatttttcaattttgtggtaattctaggaatggatagaacgtgaaccgtgtgtgtgtctgtgtgtgtagtatatgattaattaaggaggggggtgtgaaattttctgatcaaattgattgactccgcaccatacaatctaccagtcacatttgattttcttttcttttttttttttttttttgagacagagttttgctcttgtcacccaggccagagtgcaatggtgcgatctcggttcactgcaatctccttctcctgggttcaagtgattctcctgcctcagcctcctgagtagctgggattacaggcccccaccaccacacccagctaatgttttttttttttttaggcagagttttgctcttgttgcccaggttggagtgcaatggtgtgatcttggctcactgcaacctctgcctcctgggttcaagcaattctcctgcctcagcctcccaagtagctgggattacaggcacctgccaccacacccagctaattttttgtattattttagtagagatggggcttcgccatgttggccagactggtctcgaactcctgacctcaggtgatccacccgcctcagactcccaaagtactgggattacaggcatgaaccaacatgccaggcctcacatttgattttcaaagcatgattgtgagggtcatttttattagaaatacccaaaaacttcttccattttctcaaggagggggaaggtgctcttatttctttaatatggacactgttatctttgagacctttgtcttatcatgattttctttttaagttgttaatgggtctctgccacattctcatttaacttgacaagggttcatttaacttgataagggtacattttgaagatctgcctctaaaaagtgagwctttttccctagttggcaagctctaagtatttttcccagtagttttccttcaggctttgtagaattaggcatggcctatggtgtgtggcaagcttatcaagtaaaattctcatcgaacgatagcttcatatataatttcagcagttctcatgatactattctttattaaaaatgccatgctttaaaaaatgttctaaatgtattgtaagttgatttgtcttttatttacaccattcagtaacaacaccaagaccaatgcaaacaaacagtatacacaaaatctgttctctctaaatatggaatgattagagaatagatgccagcattgagtggagtggaggggaatagagaatgatcggggaggcagttgcttgcgtaagctttattttctaatataagcgttcagttcattttttgagtatttttatctgtagatagcattggcttcttcatataaccttgtaatggcagggacttggaaaggaatcgttaagtaacaaggacttcccatatattcctttcaaggctgctatgaggatcatctgagatgataattgcggaatattgagcaaggtgcctgagtattacctgttaattagttttgtaaaaggcacacaaaccaatgtttatcgacatattcaaagacaaaattaargtgataggttttatagtcattctgccttagaatattttatttagatgaaaaatgtgaaaaattcagaatttcataaagtcaagaattgatatttttccatgtaaatgttatatttactttcctcttttattaaaaacatttttagcctgtttaaaatagtctaatacttttttttagagttaacaaacaataaaagatatttggatattatgtattccccgtaagtctataatactgtatcttgatgttctttttataagagcttcccccatttggggaacaaacttaaaaattctggctgtgtactaaggccccaagtcatcccctggtgtctgccagcaaatgtttggaaatactttggtttttttatgtcccaagaaacatttctggaaaatgtggtacaatttttttaagtacttgactatgaaaaacttggtaattgcagatgaagaactcaaactttcayagatagaatgaaatatagagggtggcatttatatagtgaaaagtgacagcacatcaaggacttaagcagttgtaacttgcctagcaaatacaaatttgttttattatcaaacttggtgtgaaaggaggcacagcatggtttagccatgtggctctgcaagtgagcatggaactcagtgctctactgtgaaagaggaattaacttggggaaaatccaaatgagaatataaaawtttaaaatatatttcagtttgaagtttcctggttttattgagtatatatttgctccagcatatttttttctacaattagtctatgaaattctatagggcttttagaaggattaggactgagggtgagtactgtggtgactttattttttttcaaggagtgaaaagtggttgctctgaaaaacaaaattaattgctgttcaaatggtttttaaatttctgtactgaaaaatggcaaatggtagagtaatgaataatgaaatacaagttattggctataaagtgaaatgtaaataacattgtctagcccttgacatttcaccttttgctgagatcatagtataatccaaatttgagggaggcctttgatacagctggtttcttcttgactgaaaagtgcaaagcgttggcatctgggtccttcgtgaagctgtgtgattctggactttggactgtagtccactgtagcctgccttctcactgtgtaaatacataactacatgggctcccgtgagcttgccacacgccacaggctatgcctaattctacaaagcctgaaggaaaaatactgtgaaaaatacttatagcttgacaactagggaaaaaggctcactttttaggtgcagatcttcaaaatgtacccttatcaagttaaaaaaaaaagggggggagttagcatgtaccctatttaatgtatttatttatagtcatttataaatcatattactgtaacaatgtatatatattttgactagggacagggtstggctctgttgctcagactgaagggcagtggtgcagtggcacgatcatacctcactgtagcctacaactcctgggtttgggagatcctcctgcctcagcctcctgagtagctaggactacaggcatgcaccaccgtgcccggttaatttcaaaattatttttgtagagatagggtcttgctatgttgcccaggctgatctcaaactccatgacatgttctctttggaagattaaataaaaaaagttagaaatctctttctccaaaaatttacagaatgcyatgtgagagcttttgtaggtagcaaactttaaatgatttttttgcaacaaaagcaatggaaacatggacagatactctttcaaaatgttgttactggctgggcatggtggctcatgcctgtaatcccggcactttgggaggccaaggcaggcagatcacctgaggtcaggagttcgagaccagcctggccaacatggcaaaatcctgactctactaaaaatacaaaaattagctgggtgtggtgacacacacctgtaatcccagccatttgggaggctgaggcaggagaatcatttgaatccaggaggcaaagtttgcagtgagctgagatcacgccactgcactccagcctgggccacagagcgagactctgtctcaaaaaaaaaaaaaaaaaaaagttcttactatggcatgtactatctatatctgtaatctgtttcttttgaaatacattttctctttcacttattaaaatatcacttttttttctgaaatggcaggtcaaaaaaagaaaaagaaagtattacttttttcttgaaggaacaggctaattgaaaaaccagtaggtttatagcacttctatttttgtaagagaaaattatgtagtacatgtttaagtttgacaactttttaaagtactttgccacaatataaccagcacgtctcaatgtagtatagatttttatggttacttcgcatctcattacataaattgcaaagatttgaccacattggagttcttatttccacaaaattaaccatgttgattgattaatgtcccatagaatattttgtgcttttggcttcaagttctttgttgcagaaccttgctcatgaatgacaaagtgaatgagtcttgtgtgtggtgtttttaaaacttcttataagagcagctgccttaccagtggttgtacttgaacagttttcgatagaacactattttttattaaaaaaataattcacagctgggcaccatggctcacacctgtaatcccagccctttgggaggctgaagtgtgtggatcacctgaggtcaggagttcaagaccagcctggtcaacatggtgaaaccccatctgtactaataatacaaaaattagctgggcgtggtggtgggcatctgtagtcccagctactcaggaggctgaggtaggagaattkcttgaacctgggaggcagagcttgcagtgagctgagattgagccactgtattccagcctgggcaagagagtaagactccatctcaaaaaaaaaaaaaaaaaaaaaaaaaaaagggattcactcttcagaatatgtctccatattctcacttaaaatgatgggttttggatgggaggggagtgagggataaaagacgacacattgggtacagtgtacactgctcgggtgataggtgtacccaaatctcagaaatcaccactaaagaacttatctatgtaacgagacaccacctgtttctccaaaaacctattgaagtaaaaaataaaaattaaaaaaaaattttgagtatattttatcagataaaatctagcaaataccacaagttgagttgtgaaaaacatctgtacttttttctaagtgtacagcaaacttcttgcacaattaaatttgctctaatagacttgtttcttaaaatattcaacagtcttcaatagttttactcataaagaaattccttttatctttttttttctttagagatggagttttgccatgttgcccaggctggtctcaaactcctgggctcaagcgatccacctgcctcgacctctcaaagtgctgggattacagacatgaaccaccaagcctggccaaggaatgcattttagtttgctgctttatttctctgtattctttcagctatttttttttagcttccacatttcctatagtaatgcattttttttttttttttggctattaagtggaaatcccaaagtactgggattatgtacaaaaatacataaggatcttctaattttatcatcaagttaagcaaattttgtgaaagactggaattgtataaggcatgactataaacatagatgacaaattgctaatatcttgaagtgcagcagacatttaaggtgaggatcatagtatatgctagtggatataaattaattttttaaatgccttcttgataatttagaattttggaaggatcaacttgttaatgttcttgggttggccattatttttattttatgggtggctggtgaacaatttatactcggaataggagtctcagttctttcatattcttgttagtattatctttaatttgaagtttctgagactctggtttgtaaagttagtttcattaaaaattgatgattataggctgggcatggtggctcacacctgtaaccctagaactttgggaggctgaggcaggcggatcacttgaggtcaggagttggagacaatcctggccaacatagtgaaccttgtctctcctaaaaaatacaaaaattagctgggcatggtggtgcatgcctgtaataccagctattcgctaggctaaggcacaagaattggttgaacctgggaggcagagtttgcagtgagccaaaatcatgccactgcgctctagcctgggcaacagagcgaaactctgtctcaaaaaaaaaaattgatgattattttctgtaatcccagcactgtgggaggccaaggcaggaggatcacttgaggccaggggtttgagaccagcctaaacaacatagcaagaccctatctgtacagaaaaatacaacttagcacgcctatcatcttaaccatgtgggaggctgaagcaagaggattgcttgagcccaggatatcaaggttacagtgaactatgattgtgctgctgcattccagcctggatgacagagtgatactgtttcaaataataacaataataaatggattattataatctataaacccatttaagtgggtccacataaactgccataggggcatgatattttaaataaaattgagggctgagaagggccctgttgtcaaaccctctgccttgtaggaccctcactcatctctcaagatgtcttaggaaacatgacttgggacctaggaggatgctatcaccagtgtgtataggaagtattagtagaacttaaatggttttataaaaagtacctcaaaatagaacttttcatattcactttcttgccaagtgtatcctctggggattactgtactaaatatcacaattcattcttttttttttttttttgagattgagtttcactcttattgcccaggctggagtacaatggcacaatctgagctcattgcaacccctgcctcctgggttcaagcgattctcctgcctcagcctccagctgagattacaggtgcctgccaccctgcccagctaatttttgcattttagtagatatggggtttcaccatattggtcaggctggtcttgaactcctgacctgaggkgatccacctgcctcarcctcccaaagtgctggcattacaggtgtgagccaccatgcccagccccacaattcattcttaagagaagcctctaaagtactgcagcagagctctggctgggcatggtggcgcatgcctgtaaggccagccactcgggaggctaaggcacaagaatcgcctgaacctgggaggcggagkttgcagagccaggcttggcctaaggagcagaacccaggcctcaaatgtgcagtgggagggaggcaagggtgcagggacaagtgagtcttcctgtctgccccatttagarttctcttgcagcctgctcctccatttctcctaatctttcattctctttcattcagcttggaactccttgagggctggaccactttctggtggacccagaaggcatgtctttattatctttgtgtaatacctggcccgcagttggtgttcastgagtgatgctgggttttttttgttttttttctaagtaggaaacaagtttctaagtgctatttgtttacttttaaatttttaactgtggcaaaatagacaacataaaatttaccatcttaaccatttttaacataggccagtagtgttaagtatattcacattgctgtgagaccattaccgttgtccatctccagaacactttcatctatgcaaaactgaaagtccatatccaataaagaataaagtcctctgtgtcccacccctggcaactaccaatcatttttttttctgtttctcatgtcaractcatgtttgattactckaggtacctcatataactggcatcatatagtatttttcctttctgtctgagttctttcacttagggtaatgttgtcaaggcttgtccaattgtagcatgtgttggaattgtattcctttttaaggctgaataacattcccctgtaggtgtatatcacattttgtttatccatccatctgtgctrtttttaaaggggcaggcacaccgagaggcagatccaggtgcacacacctggcagagaggttggttagcttgacagkgggctgcatcctacccatgtgttcatgcagctgaactctctggccctctgtgtaagggaggcaatagaactatcttgtcactatgctattctgcctcacctggccaaaagtggactctgactttggaatcacctggagccaagcgatgaacacaggtgaagctttcaacatgcttatattgacctttcttggctttctgaaatatttttattttaggagcagtctatgggatagtgtctggggtcatagggtttccatatgtgtggaaactaatataaaataataaaggtggtgggatatatattttttcaaattcaaattgtttttattttgcctcatgtagacactacatgtactataattactatgatttttaattttgataatatatagaaggtttaccatttgaaccattttttcaggtacaactcagtggaactaagtacattcacattgttgtgcaaccatcacccccaccagccatctccagaacttccttatcttcccaaactgaaactctatggccattaaataataactctccattctccccaacgtccagcttctggtaatctctattctacttttttctatgagttggactatctaggtacctcatataagtagaatcatacagtatttgtccttttgtgattggcttgttttacttagcatagtgtctttaaggctcattcgtgttataacatgtactagccttttgtttcttttcaaggctgaataatattccattgcatgtgtataccacattttgattatccatccatccgtcaatggacatttgggtttttctatcttttggctattgtgaatcatgctgctatgaacataggtataaaaatttctgtttgagtccctgctttcaattctttgggtatatacctggaagtagaattgctaagtcatatggtaattctacgtgtaatattttgaggggccatcatattgtgttctaggggaggatattttatttagatagcatcttagtcctttattctttcatattttgtctctgcagttttcctatctaatgagtttgcttctccctccacaatattgataactggagagctctgctggtcggttccatggggcctcctgcaataacttctcttgtttattattttcattgcagatgcgaaagccatggagttgagctgcagcgaagcacctctttacgtaagttgctaagcacggggcttcaggtccaaggggccctttcttaactccaaaccatgtgactgaagtggggagaaatgtttttcttgctattgagttaaggctttttaaaaacaacacactgagcrttactgtctagttcaagtatttgcatggagcsttttaaaactggttggctcctgttttaaactctggattttatatttccctcagtatttttttaagtgtgtaatttctggattcaaacactcagttcactcatatgagtggtgtgtgaatatattattttatgataatatcctgataatagtcaagaacttttctatgtgtgtctttttgaggggaaggtttcatgataattgtgtcagctaaaagtatgaaataagaattcaaacaaaaagtgttgggacataaacagaagtgggagttggcgctgggggggacaggaatgcccaaggagatttgtacttagatgtgccatctagrcccaggaggatgccattctgagaacaactcctgggggtaacagggaagtgaacagattgtttcctcacacagaaaatggcagatggcctcatctttcctccttccttstgatttcagacaaaacttcctttcttgggaaggaactgtgttggtgtgaggtggggcctgggcaggtgggcctgggtgtgtgaggagactggagtttagagcaaaatttcaaggaattgaaacaaattttattttttttattttttatttatttatttattttgagatggagtcttactctgtcaccaggctggagggcagtggcatgatctaagctcactgcaaactccgcctcccaggttcaagcgattcccctgcctcagcctcccaagtagctgggattacaggcacatgccaccacgcctggctaattttttgtattttagtagagatggggtttcaccatgttggccaagatggtcttgatctcctgacctcgtgatccgaatgcctcggcctcccaaagtgctgggattacaggcatgagccaccacacccggctggaattggaacaaatttaatcagaatcctcaattgatgagaatagattcatccacttcccacacttcactacccagccaagtgcctactcactcaccctcactcccttctacacatgacacatacttctctggaggaagacagagtcataaaccaaattgattccagaatagtagaaaagctgccccttgagttgcccagtgatctctagtactctctctaggttgtgattttcaggccataaaatgtgcctgtagacagttgggtttggcccagacatgattaaagattaaaaaaaaggctggactgaggctaaattgtaaagtactcccaaatcttactgctgttttttctgtgtgtgccttcctattcctcactcattccaccctcctcccctacctcaaaacagacaaatccacaagcctaatcgtgatagaagccttgtagctgaccgacctcctcatgtagctattttgaccatagacttactagattgtgaccagatttggggaaaaaccaatacacattgcccaaggagagaagagatttaaatgaaccaaataaaaacaaaaacaagtttttcttttttctttttcttttctttttttttttttttcgagacggagtctggctctgtcacccaggctggagtgcagtggtgcggtctcggctcactgcaagctccgtctcccgggttcacgctattcttctgcctcagcctcctgagtagctgggattacagacaccgccaccacgcccggcaaatttttttttgtatgtttttagtacagacagggtttcaccgtgttagccaggatggtctcgatctcctgacctcgtgatctgcctgcctcggcctcccacagtgctgggattacaggcgtgagccaccrtgcccagccaaaaccaagtgtttctagttattaaaaaaatgctgataagagtaaaatgaaaagtacaggaaagtgttaagaaaataagtcataatctcacccccatggataatgttattatattaaaatactaatatattttatcatttttaaggtgwaatttttcttctcattttaacatctctaaaattgagatgctcttacattcactgtgcttcctggcagatgtcattacctacacgtgtgtgaccttggttacaggggttcatattgttgtcatttcagtttatttatataccttgctggtgctacataaattaattgctttcaaaatgacttcaccrtgatctagcattataaggcaaagttactatgtaactagaaagacttggaaataacagcatgttacatgataaaatctatgtatagattaatttagaaaaggtcttttaataaatataaaattctaggtaattaaaaattacatcctagttggcattttttctagtagaatattaaatgtatattataaataatgatatcttagataaaatatatgaaatatatttaacataactgacactacatatgatagagtatataacattttttaatttaatttaacatttctggtcaatattattgcaaaatgaattaagccaatctagccacttggcctcatccagcaagaggtcattagagatatgtcataatgaaaatgagtcttaaaccaaaatctaccaaatgggtaatgtcgtgcagacagagcagactcaaaactgtcctacaatttgtttctgtattttggggaagaacctgctctctgcccttctatcttcagaggtttggtaaatattcacttctagtttctcttagtttactaaatttttgttcataagcccttaatattttttcttatttatatatatttattgtaaaatattagaaagagacccagcaaaaagaaaaaattaaaacctcatgtttaatcccatggtgaatgataagctctgttgacattttgatacagatttttccagagttttatctatatctctgttgaattttatcaagggtccttttgacatttatttagatgatacagtgttttctcatttgatagtgatttattcaatctcttaattttggtgactttatgtatgtacttcaagtaatcctacttagttattttgactatttcttttggaaaaacaaaataactctggcaagtgtgtaataaagatatcctctccattggaatttgtgaagaatccattacatattgggaggctatattaaaattataaaataacactatgcataattgtatgttaatgcactagaaaatctaattacaacagacttttaaaaatatataaattaataagatttacctcaaggacaattagattacgtaagtggaacaataatcaggaaggaaaaaaattgattgaaattattccccaatttctacccacctctcaaaaaagggcacctcattcagataggtcttataggtgattttttattcctttgcttataacctgttttgatggaattcttataacatttttatggctaaaattcttctttgtctctatttgtcgggtcactttagagaatctttcctgaagatgatagacatctttatacctatagaaaaatctatggatgtaaatattttcttaaattccccatgcattttgcttggattgataaagaacattttttatttttctttttaaagattgtttcttccactattgttttccccttctagacagaacaactaatatccaaagattggattgtttttttctttwtggggagagaggagggttgcattctggaaggcttttttttgagatggagtctcactctgtctccaggctggagcacagtggcacaatcttggctcactgcaacctcagcctctgggtaagtgattctcctgcctcagcctcctgagtagctgggactacaggtgcatgccaccacgttcagctaatttttttgtatttttagtagagacggcatttcaccatgttggccaggatggcctcgatatcttgaccttgtgatccacccacctcggcctcccaaagtgctgggattacaggtgtgagccatcacaccaggccaataatgtttatctttgttttccacttaagttttcagtagcatcaagttgttttgttccttgcttgccagcacaattttagattctatcacttttagtttttatgtagctttgtcaaatcttggcctttttatgcccacgtagttttatagagataatcttttacattttattatgagcacaaagcaagaattaaatttttgtttttctgtacctttcaggaatctgtttcagaaggaggtgcagtctttggctctgtctcttgtgctgtagaatttttttggctcatttctgtttgctcatttttaggaaggagactctattttcttcttggagatatagtaatattcctgaactcagccacagattcagttaaatttttatttgatttatttttttaaatttattttgagatggggcctcactgttgcccaggctggagtgcactggcatgatcttagctcactgcaccctcgaccacctgggccctagcaagcctcctgccttagcctccccagtagctgggactacaggcacatgccaccatggtcagctttagtctaatttttaaaagaatccatggcagttccctgagttgcagttgcagaaaaagagaaacactactaagatcagagaagaagcaggaattggcaagactggcagccaagagctttataatatcactttgtggaacctagggatatatatgagcattgcaaatccaatttttagtctctaagcagcttcctgcattcgtgcttgaaaagaaactgaaggagcagcactggaaggctagtctgtttattccaaggagaaaaagaaaaaacaaaaaaaaaaaacaccagaggcctgcagtctggtttgaagtctaggcttagtttttagactgaatggtacaatagtattaggaggtgtattttaagctggaaagaattgtggtggtgaagctaatgagaagtgcaaaagcctggaaaagggtaagttagaatcagtggaacctaaggtgtttatttttctggctgaaaattcttcagttaacaccacttgggagcttaaaagttctgtactggaaattataaagatatttttattttggttttatttttaaattaattattttaaratttcacgttgccgtgagaaagtagataattttatttttagattattgctcttagtcttctttttcctagtttgtgtgtaaaaagagataggaaacgatgcaaggacagcttaagaggagagattttgcttactgggcatttaattaaactttgagagaggaagagattttgcatttacaagccaatttgtgtttttgctaatgaatgctttttgattacattttatattgagttttctctacattttgtaaatcaaggagaattataaaacaaatacctattctacttatttatccaagagctcctttttttacattaattatattttatttttgtataaagtataattggctgtgtgtggtggcatatacctgtaatgtcagcactttgagaggctgcttagtcctccctagatcagcctggtcaacattgtaagactctgtctttacaaaaaaaaaaaaaaaaaaaaaaaaaagccacgtgtggtggctcaagcctatagtcccagctacttgggaggctgaggtgggaggatcacttgagccaaggagttcaaggctgcagtgagctgtaatcacaccactgcactccagcctgggtgagagagcaataccctatctcaacaaaaacaaaagctgtttgtaaagtataattaatgctagtctttctgaaatatcagtttagtgctgtgaataaaacagaaaagtcttgcttgagaaattgttggttccgaagatttttccatttttcctcaattaaaatggctttatttaaaatgattaaataacacttgcttattataaagaatataatagtaagtaaaattattaaaaagaaagtgaagatcagttgaagttccaccttttttttttgagacaaattctcgccgtgtcatccaggctggggagtgtagtgcgatcttggctcactgcagcctccacctcctgggttcaagcaatcctcctgcctcagctcccagagtagctgggactagaggcatgagccaccacacctggctaatttttgtattttttgtagagatggggtcttgccatgttgcccaggctggtctcaaacttctgggctcaagagatccacccaccttggactcctaaagtgatgagattattggcatgagccactgtgcccagtgaaattctcctttttagagaactttattagtattttggtaaacactaaaatttgtttggcaaatgtgtacmcacacacacacacacacacactcatgatatttcataaggaattatacgggaatgctgtttttattataatggacaggaccccatttcccctcacccccattttataattcccgttcctgtactctgagctaacccttagagtcatctcctgcaggggttcttagcagcatcagcatccctaggaacttgccagaaatgcaaattctcagacctcatgctggacctactgaatcagacactctgtggatggggcccagcaatctgtgttttaataaaactttcaagygattctgctgtgtgctaaagattgagaaccatggacttagtgcaaacattttcatgttcttctgtattcatatatacatatacaagctttagtagaaggatcatattatgtggacttctgtatcttttccaactcagtgatactttgtataaactcctataagccatcagacatagctcaaactcactctaattaatgaataggtatgggtcaagctcattccctattgatggccattcactttgtttcagttcttggcaatcatgaacaattattcaccagacatcctgtccatatgtccttatatgttgatactttcatctctatgggatagattcctaggagtagaattgctggatgaagggcatacatattttaaattttagtggattgctttgcaaatgagatctaatagttgacattttattcagcaactttcagaaatatttaatgtctatttctttagctttaataactgataattatgtagctggggattatgttctcattttcattgtgcaaagaaaggagggatgttaaattttgtatgttgattaagttggtgaagggttagaagtgtcctttatttctcccatttctcaaattctgactaatatgagcatctattagtcagaatttgactaatccgtggagattttttttaacatctgcagagggtgcatgtgtgagactgtgtgtgtgggctcttgctcccttccacccttctgaggtgctgtgcagacatgttaatcatagccactgactgagaagagtgtaatcacttttttctctggaggctgcaaattgtataaccatttgggcagtgggagttttttgcttcagtagcttgtttccagctggatctaagatacttcgctattcccttagcattttatgtttatattattcttttattctgagtcactgtctcctgctgtgtttggtcccaagaatgttggttgctgctgggctcattgtgggtgttgaaggtataatctgatgtctagaggtagtgggggaaactctmtcctattcagccttttctaatttctggatgttggtatagcttccatgaatacttggtggagcatgctccccttggtcccagccttctgcagggagggccggaggacagggcccaagttgtctggatggactcttccccagctcagggaagcagcttcttattgaggtagtaagtgacttggtggctttgttctggggtcacccagcaggggccttcttccggatccctgcagattccctgtggcttttgggtcctgtggaaggaaatcctgtcctccagacactgcccttctctcttggtggccctccatcccccagtgggctacctatgactggcctcatgcccatcaactcgaaatattagtctatgagggcatcttggggacctttgcctgggcaccctcactttgctgatgaggagattagtctccaagagggagattgactggcttgactaagttaactcagctggtttgacactctggattttaaaatgctctattagaagtcataagaataattttttttgactcagaaaatttgttagtggcagatcccacaataagcctggggttttccgaccttcactggtaacgaccttccccactgctctgccacatctccatttcctcattgaccaagtactcaaaggcaccattttatcctttcctgtcctgcaactgcctttgagctttctgacatgaatggggctccttcatggaccttaaattaaagggtctctcttttcttttatctcactagaggatgctgctggtaactatgtctaggcaagccctgaccttctgaagctcatttgctcacaagaagccagacctattaattgatggtcatttgctccattcagttcttcccagctcaaaataatagaaattttcattagctcaggtgtcagagggtggtaggtaagggtgtctttcaaaacaggttagtacagctaagtcyagcttagccaatggaatcgggcagggcttttgcctgaatgcaacttctagatcacgtgtttactttgtgcaartttgtttttagcgaattatattaactttacttgtgtctttatttaaaacacagcagcatgtgcatctcagaggattgccacctgctggggtgtttctgccattgtcagttaatctgtgctccctgaagttggttttctttgctggcttttgttttctactaacttaacttgaccttttcctatcctctctgaatggccttgcttttatctctttgccttgtctcctgttttccttctgagggggcaaacaaattccaaagcagcatgttctagccatagagcaaagagaggaccatggtaactgttttacccagcctggccagcagccacgagatgtcagttcctgggaagtctgaagctccttagctgctgcaggagattgcttggtagttctggcaggagcagagaggaaaagcttctcagactttagcaaaacctttgacttacaaacattttacaaatcctccattagcttcatcccatttcacattttgaaagaaacagttccctcttctctcaatacaatgccactttatggtgccccctcctactgtcacaactgagatgataagcttctggggaaaggcccaaaggtgaatatacaactacagaagaccacaggaagagtcagcctagcacccagctttgaagaaatttcttagtgggtgtgagtttcaggtccgtgggtaagtaagtgccaagtgtgcttaaagtctgatgctgcctcacttcctgtatttcagtgacagctcccacaatttgggtggtgtgcagcctgtatttttaataaagaacttgaagtagccgatatttttgttctgtttgagtttttaaaatgttttaccatctaagtaaggattttaggcatgatggaaatgggttagagttttctctgggagaagcctcagtaaaagaaataacgtgatccaggtaaaatgttttatttccatattccagaaaggcagcccttatagaagatgtgatttagctatactaccttctcagcagttcctcctgcttacacctgaggagggtgtgcatgttttaaataagtgtctctagctcttgccttcttttcctctccatatcttgatgctgttacttttatcaaaacggatcttatgaaggtcactaagtttgctcttgcttaatctaaggtgtttattttctcaagtccccatttagtgccatgcactgtaagagcagagagtgagaaacaaggtctcacgtccctgctctcgcagaatgcacttgggagtaggagacagaaagtaagtaggtaaacgaataaacaaataagaatttcagatggtagtatgggttaggacaatacaaggctatgacatggcagagaattgtgtgtgtgtgtcattagtctctctgggatctcctggagagcagtctagtagagggatcagaaagcacgaaggccctggagtggaaatgaactttttgtatttgagggacaacaaaaggccagcatggcccttgcattgtgagggaggggagaggagaggagacaggtcagagaggtgggaggggccaggtcatgcccataggttggtgggggagttgcatgatttgatttatgtttaaaaagtgtactttcaatgttcgtgaactctgctggttctttttcaagttatctctttgtctattgtgctttcctctcctctgttgtgtgggtgttccccagggccctctgctttcccctctttttctcgcgagctcatctvttcttgttatttagaccaccactcctcctgaaagactcccacatgtgggccctctcgtcttgacctctgcccaggcctcgtcttccatttccagctggcctgtttgctattatcactcarttagccaggatttgactttaagttcagactgttatattttttaaaasttttccaagttttcctctaagcaactcctctttccaacttcctgatttctgttaccatcccaccactctcccaggtgtcctgctttaagttgagtttttgtaattcctccaacctttgtcctctgtcttgatcagtcatcaagacctgctgatggccatggctgtcctctctctctcctcagccattgttctaattcacctttggattattgcccctggcctcttcagagttgccattttctcagaactggtgaagactttatcatgtctttcaagtattatttccctacattcatctcgcaactcgcagccatatcatttatctgttctaatcagacaagtcctctctaccctagtggactttcctcattctcttatttctaggacatcacccaagctgttttcgttccatatccaggaatgccactaaggtaggaatgggatgcaatatggtatgttggttatgaccttggatagctatgcatttggccgtgcatcctctcckgaacgcagattgttacccttcattacattgcaatacctagtgcagtgcccaacgcactgtaggctttcactaaacgtttgtggattgagtttctggagaatcattgaggggaggcaagcttgctctctgaccctttataggagcattccaggcaatggctgtggtcattagggggagggtcccattgacaaaagtgttgataattaaagatgatttggggtcacatatgtaggactgcagaaaccctttacgccataagctccagccatacccttctgctctcagttcttcgtgaatgccatgcttcttcctggccaggacctttgtatgtgcggttgtcttcacctagcatactcttgcttccttcccctttgtataattgaattcttactcattttccagatttcagctcaaatgtcacatccttaatatagtcctctagacattttctattttgagagagtattgttgttattgttttgtttagtgtcccttctattgtaagcaccaatacaacagagactcaaacattcaattaaaatttgtaatttgtctttataaaygaatattcattttcaatctaattttgtttttataattttattccttttctgaaaggaaatccttccaatggcataatcttctagtggacaattgtttttgtccactgattttccaacactagtttagtgcttggcatgtattacataataaatatttgttgaattagtacacagttctaatttagtgccattcaataaacagcggttgaggctcctcctggagcactctttaattttgttgtttgcttatttctgtactgtgagttttcccagcaggtatgtgaccatcactattttgggactgggactgtcatttgagtttttgtattccagctgcacgaagagatagagagatggtccagcaggaaggtgctgtcatcataatcttcagtaaatttggaggtttggggaacatgtctcagagtttgaaacttaacatttttaaggtactatatggaatatgtaaacattatgcaataaaaaattaaggaagtcttttcgaggtagacaattcctggctgagaactagaacttaacaggaagttttgttaaaactgtagggaatgaaaagcttactttatcagacaggaagttcctgaagaatctcctaactcagaaaagattatctgtgaacgatgtcacatgaactctttttacccccttctttagcattctttacttagtatctcccagcacttatagttactgtaatttgcatctttgaaaaaatcattatgttartctgttttccattacttataatagaatacctgaaactgggtaatttataagaaacaaaatgtatatcttatagaactagaagctgggaagtccaaagttgagggggcacgtgtagtgagagctgccttgctagtagggactctctgaagagtcctgagatggcagaggccatctcacctgaggggctgagtgtgctcacacgatagctcaggtctctctccctcttcttacagagccaccagtccccctcccacaataacccattaatcatgaatagattgacctattcatgaggtctctgccctcatgatccaatcacctcttaaaggccctacctctcaatacaaccacatgyggattaaatttcaacatgagtttctggaggggacattcaaaccatagcaaccatgaagttactaccttagttgattagagcatctcatggtgccctacaacatgttttcacacattagccatttcatcagaaccacacatcgtttggcagtggagatgaacatggtgatgttaagtgacttgccccatgtgcatttgtatgtgcattaattcacatgacagattttaagtttcaaatactaagtgaaatacaggcaggggcagatgcaggttttgtgaggcctgaagattatgccattggaaggattccctttcagaaaaggaatacaattataaaaataaaattagattgaaagtgagtattcatttataacgataaataacaaatcttaaaaagctggcaaattccataaacgtaacatttccaattcagattcctcttatccaggtcctgaaaatgccctcagacattccagtgccacccaacaggaaggagagtgtgtccgaggggaaattgaatggaaagagaaagccagcttaacaaattgtagttaaaataccccaccccttaccctgcatagaatacttttaatttctctgtaacatcatccaccaagaacactttggataaacatcaaattacaagctaatcttgtgatattctatgttgttattgttgctttcctctgatggaaatctggtgaccacccctgatttgtacaggtcaaatttgatccattttgaaaagtctcttgctactgcagattagaaggaaatgactgtatgaccattttgcttagggtcttccctaagcattgaaagacgtctttgggagccttgaagcttcattagtgtgatatggaaaatctgcctctggtttctgagttttttttcaaagatggaggaaactggctgccctgcccttgagaattcgctactggggaggcaatcgcatcattacagaaagtgattatgtgtgataattgtgataagtgttggataagaacatgctgagaatgctcctgaagccacaggagaggcaaatggactgcagagcctgtgtaggagctgggttcacaatggagactggaattagccgggtcacaggcaggtgaagggtggtccaaggagaaggcgtggtctgagagagggtgcctgcactggttggcaccggctgactggaggggagggttgctgtgagcctgggagaggaggctggagccatcacacttctggtgagggcagtgctggcattggaacccatgtcttcagcctctacctgcatcaccacattatatgatggtccttgtgttctccatgtacttatacttaattttgcgaacccttttctttgagtgtagagaagaacatcaagctttgcttacagatggtggaattattggtggcagaagaggcagccctagtttctcccctagagctgtgtgtgtgtgtgtatgtgtgtgtgtgtgtatgtgtgtttgtgtgtgtgtggtggggtggggagtgcaatttctgaataaccgtgaagttatggtcatgaaaggtggccctgatgtgggaatcttttgaggtgcatggctagcaaggttccatgtttccccagggacttgtcttcagcccttccttcttttgtgcagatcaataataaggggaatcgagagagagagagaaagagaacgaaagagagcggggggaggggagagaggagagagagattgatttaggggaaaactctaaacaatttaggaagagttgcaggtatacaccatgtcaaagacttacggttgccttttataaagttgccaaagacttttgtgccaccttggaattagaaatgaccaggttgtggagtaacatataygggagggctctctttgtgggccatctgggtgtagaaaagtgctgagcagaggcgtgctgatgggagggaatttgaaaatctgggttactgaaacaatacatttaagcatctaatataactatcgtttagattatggctgtggttattgaaagtgactgtgtaggaagaggaaacagcttcttgtatccttttgagaacagacaaccatgaatctacagaaaacataaagtgattaatgaagtattcattttcagcagattatctaataaagttccatcattaaggcattaatctatttaaatktacttgaccagtcataaattagatttaaaaaatgtgtgagtctcacctgccaacctgaccatactgctttcaaaagtctattctcatcagtagaatctattttgatcacttctagccaatgaaaaatgtaagcttttaggagagaatgtttcctaggactcacccactcccattcaatgttctaatatgtaaagaaagttacatataaaatactgggatcaatcacaatgtccatctttagacagttggttagatcaattatctggtctttgaaaagaatgattgaggtctgaatgtgctgaagtggaaagatatctatgaaatatggtggttttttaaaaacacaagttgtaggagaatatgggaacccgtgtgtgtgtgtttttaaatgaaaaatacttatatattgacggaamacttctagaatgatacccaaactcctggagtgggggtggggaataccttctatatacacacttttctactgtttgaattttttactatgagcccaamctgtataatctgtttttaaatagaggaaaaaagttaaaaagaatttgtgagtctagcaggaatcacagattttttccatttaaagtcataagagagaggagaggatggggataggttggtcagtgggtacaaagttgcaattatagaggaggaataagttcaggtgttctattgcacagttgggtgactatggttaacagtaaagtatcgtatattacaaaagagctggaagagaagcttctgaatattctcaccacaaagatatgataagtgcaagaggtgattgagtacacgaagtacattgattggatcattgtacaatatgtacatatcaaaatatcaaagtgtcccctataaatatgtataattacaatttattgattaaaaattaaattcatccctgagaggtctgaaagaaaattaaaaaaataaagtcaccataaaatattgtgtgaaaggaatagtgcatattttcgtaagaaactgaaaacacttcccgtgagttgagacaagaatatcccaagggttagtggaacaaaatgagttaaataactttttcagtgggaagtccaagattggctttcataataatgcagttctctgtttttattttgaattgtgacttttattgttctttacatctttactgaattcttcattaagaatttattaataaaggtattttagaaaagttacctatacataaaatcctgttttagcagtacagtgtcctctttaataaaacccagtggtgaacacttttgataaatacactaaattgtatgtttgaaatcagatttttaaatactaggtttgttttgaagtgggaacaccttatatgtcattgtgtttttgaattttaaaaaggtatttatgcatggatggcaggggattaaatgtgaaaatatatgatattgtatcaaaacttctgactgaactcaatagggagttttcccccaggcaaaggggtaaaaaataagccatataaggtgatatctgacacattgtcagtgagatttctattggtaaccgccattgtgctcttagtggaagttgggatgatgggagggggctactagccattaaattgcatgtggtctttagttaaaaatgggggtgcagaataatttttgaagcatttttgatggctcagaattgcaagtatcttcagctttcatcgatgagtagataaactatgggacatacatatgccctcactcccctccccccaccattcctaacccctgacaaccattaatctgttcttgatctctataattttgtcatttcaagaatgttatatatgtgtgaagtaatacagcttatgatcttttgggactgcctttttaatcactcagcataatgcccttaagaaacaaccagttgttgtgcgtatcgagggctcattcttttttgttgatgagtcatattccatgatataggtgtccaatttgtttaaccatttcaggtttttccagtttgtttaaccattccactttgtttaaccattccaggttgtttccaggttttggctcttatgaataaaactgctatggacaattgtatataggtttttgtctggacataattttcataacttttcaaatgtggatgttcttgggataaacgtccaggagtatgattgctgggtcgtatagtaagtgtatgtttagtttttaaaggaactgacaaacaattttccagaatggctgtatcattttacattccaaccagcatcatacaagagagccaatttctttgcatccttttgagtatttggcattactgctattttttattctagttattctgataggtgtatagtgatgtctcattatggtctctggtatagatcgtttttcttttcagaaattctggtaaaatataacatatcatgtatttaatcaatctttaagtgtatagttttggtggcattgaatacattcatattgttgtgctgctgttaggactatgcatctgtagaacttttccatcttctccagctgaaactcggtatcctctgagtgataactcctcatccttccttttaccaaagcccccggcaactatcattctactctttgcctctatgaattttattactctaggaacattaatgtacaagtatccgtttgagtccctgctttcaattttttaggtatatacctagaagtagaattgctggatcatatggtaattctgtgttagctttttggggaactgccaaactttcctacagtggctgcaccattttacattttcagcagcagtgcacaagtgtcctattttctccccgtttttgccaacactttttatgttctgtttttttaaataatagccatcctgctgagtatgaagtggtatggtatagattttgatagagatatttgaaatgattatgtagcccctttgggagtagggatttctgattagggtccttcccacctttcaagttgcaaccaatcttcatcctccctcagagtgagattaaagttgatttatgcatcactaaacttgtaggcattccctgacatctgaatgtgtttggatcctgagttgagatagcaagagtttatatggtgagtttagatagcaaagaatatctaaatctgtttgggtaggaaaagtgatagatcagataacaatagattaatctaaaaagttacctgaatccaattggaaagccagagttcagagtgtggaagtttagagaatggaggttatctctattttaatgtcagttggcacacagacaatatagtagggaaagctcagtcagtttatgcaactctgtgttccatggttaaattgatagcacttagtcaaattgcctgaatggtactgaagacaataataatttctataatgccttgcaaatccaaatctagattttttttcaggggttggggttctctgattctcaatgtattgattctttactttgattcctagaaggcaagctcttaggaggtatgaaaaagtagggtagaatttggctccttttgggggtttcccgtgggaacaggacggcactcaggtggatctcaggccctgggcctggccagactcaggagtcccgaggaagaggaggtcaggtagcccacaggagtatttaaataaaataaaagtctattgtggtcacctgctaccttcaaggagtccaggagggaaggttatagactttgcctgctttcctctctctctttaattcagttacttgaaaggctttaaaaatttctacttatcctttcccagcattgtgtgtgtgtgtgtgtgtgtgtgtgttatgagttttgtctatcttcgtatagaagtataaactccactcttttttacaagtcttggttggtatagaagataatttgtgaccaggcgcagtggctcatgcctgtaatcccagcactttgggaggccgaggcgggcagatcacaaggtcaggagtttgagacaagcctggacaatatggtgaaaccccgtctctactaaaaatacaaaaatgtgacgtgcgcctgtagtcccagctatttgggaggatgaggcaggagaatcgcttgaacacaggaggcagaggttgcagtgagccaagattgcaccactgcacttcagcctagatgacagagtgagactctgtctaaaaaaaaaaaaaattgtaaaaataaaagtcacttaatgtggatgggaatatggggagggaatggggaaatggcatttaggacatttcctgctttgactaagacaagttgctgggagrtctatgcttctccccagatagactagtgaatgttactatgttgtcctcatgatgttaacagccctttgggaatctactcacttacccagggtaggtcagtgaattttctaaaataactaaaggacatcatctacctgttagaaagtaactgcttcaatcttcttattttcataggttgtcacatggaaaagaccaaatagcctgtctaactgcaaacatgaccagtgcagaggcaggaagcctggctgtgaacccacagaggattattattactattatttatttatttaattttagtttttgagatagggtctcactctgtcacccaggctggagtgcagtggagcgaccttggcttactgtaacctctgtctcccatgttgaagtgattctcctgcctcagcctcctgagtagctggcattacaggtgtgtgccaccacacctggctaatttttgtatttttagtagaaatggggttttgtcatgttggccaggctggtctcaaactcctgacctcaagtgatccacctgcctcagcctcccaaagtactgggattacaggcatgagccaccacacccgcccattactattatttttttaaataaaggcaggaaaacataaaatgtgtgcccagaaaggccacattttgcctcatcatacagttgttaaacctctttggttgggatttgtgattggccgtgatggccaccacggtgtcatcacatctgagcagaagtcccataatagtcagggcactttggctcactgggatgttatcctggtgtgttgtgatgtctgcactactatttgtcaatctttaacagagacaggaccggaaggggacaggaggttcatgtacacaacttggagaggtagatggaacactttcatgtgcatgttgaaagagttaacattttgagaactgaggtatttagacattttagaactatgatatttctacttgtgtcctgtgatctcttttctataggtggcaattaaccccttgatttgctctgtctgcgtaaagcatttaaaacagaagtggaggtgcttttgtctattgaaagccattggcacgttgggacagaagcaaccaaggcaagcaacccaaccactgaatcaggcttaaaaaacactttaaagatacacacttcactgccacctctttgcgttacactcttcctcctctgttctagctcagtttcaaccttctttactcatccatggctctcaccttctctgttgatgcctgcccactttataccttccacctactgtctttctctttctggctgtttttctttttaaactatgtgacatttgatgtgagcatcaagcagcacatggcacataataagcactcaatacatgcttattgactagactattcatactgtgattagcactgtccttcttggtttttccataaattaagaccacctggtggccattgtgtgcatgcctctgaaagagctggccatgtggatttgtgttttgatttaatgggatgggaaggggagctggggataagggcagcctgctgaaggagtcctcattttagagtacttgctgtgggctaagggaaatccagtctctggctagagttttcagagattgtgatttcctggactctcctaggtgtttgaaggatatgttttcatagaccatgttgtcatctcaaatgttgacccccaatgatagaaatgaccctggcagtgaatgaagtgacttattggtaggcaggtgagtgcaaaccagtgactccctgtctaccgtctgcttagacccaggtttcagaagtgctgagcacgtggcggtgttcagcaactactgcgttattatgctggtacacttagctgaactctggtggaataaactgtttacccagaagggtggaacttccagcagccatcaaagctctgagtggagctgagccagagaaggggcttgcattttcacacccttgggccacactccttcaggcagccttcttgtccgaaggaactgaaatagcccggacaggaagcagacaaagtctagtttgttgtccttagcctctaaggtagactattcaaatgaagcccattaaaaataaaccaagagagacaggagaatcgcttgaatccgggaggcagaggttgcagtgagccgagatcacaccgctgcactccagcctgggcgacagagcaagactctgtctcaaaacaacaacaacaaaaacaacaacaaaaaccagaaacaaaaccacattgacgatgattttgatttctctgtgttaaatatcccatggagaaacatataacattgaaaaaaaaaagagtctattgaagttcatgtatcacaattagtttgttttctcacttgaatatgagctctgtgagagcagaaactttgcttctggtttttcctgccgatttctggatactgtgtctggcacagggtaggcactcagtaagtatttattgactgaatgaatgaatgaagcttacataaaagaaaatgatacttagttttatatttataaatctcaacttttaaggaagctctaggtcaactaagaaaactgggagaaaacatcccagtgtgtgccctgaataagaccagaagtcattacttaggggaggtcaagatgctgccagcggggcaaacaacttccttggtaggtgccctctctcctcctccccgctttcttctctcctcccttcctgctatggccacagcatcagcaaatatgattatctgaggatgtgtatgaataatgtatgacttgagtccttaacttgcagggctgtttagtgaataggggtaccctaccttgttctagactagtagccctgtccctgtacagcttgggctctgcagagctgagagtgctagaattgggatcctggcctggtcacttgaaatctgctgttttctggtccatctgagtctgacctccctgctgaccccaggtcctccccttggactgtgtggctgccaccttgcccccagaagtaaagcatcacatgctctaccctacgcgagcagctggctagagtgggactttataatcagtgtcccctaagtcctggctcttcctggctggtctcatagctgcctgtgaccagagcagagaggcaaattcagaagtttggaatgtttggaaggcacgtttgttttgtgacgatagtgatggtgtccgtatgtaaagtgtggaaggaaatccacctggcagtaagtggatggctatggtttggccatccaaagcttagtggggattcatatctgcctctgtccaggaaatggcattcctatctcagtctcacataggagaaaggcttgatagagtgggctagctggggagttccaaagagcaggcctataaatggtcttttagtactgaatctgagcagaaattggggaatttccagatatgcagatgcaaattattatcctatgtattcttgaatatagccatatggtcaatttaatttaactgtccctgactagtatgcagaggcaagctcatggatttctatttttttttatttgtaaagtcatttttaacttatgtgaattttttattgtcttggaagaatctctctccattaaccaaagaaagtcattagttctgttctaattaagctaaatacaaagagaaaacccaaaatgaacatagtacctattaatggcaaaattttttgtactttctagtatgaaaagttatgtatatctctggaaaatagaagttgatgagtaatcctatcctggctggtattactgattttttttattccagtctaataccacaaagttcattctagtattcactctttgtttatgactttttctctgacaatgggaaatttggctatcatgatctacaatatatttactatattttcaagcctagtatacttgtagttttatattgctaacctctaccttctgagagaatatagacctgtcccctgttagaatatagatttrccaactagataaagagtttgtatatggttctttttgtcttacagtcaaaacactttagctttactgtcaaagttttttttttttaatttcagcttttattttaggttcacgggttatatatgcaggtttgttacatgggtatattgcatgatgctgaagtttggggcacaattgatctcrctacccagacactgagcatagtagccaataggtagtttttcagccattacctccctccctttctccccaccttaataatccccagtgtctgtcattcccatctttgtgtccatgtgtgttccaatatttagctcccacttatacttggggacatgcagtatttcattttctgtttctgcattaatttgcttaggataatgacccccagctgcatccatggccctacaaaggacatgatttgatttcattcttttttatggctgaatagtattccatggtgtatatgtactacattttctttattcactctaccattgatggacatctgggttgatttcatttctttgctttgtgaatagtgctccaataaacatacaagtgcatgtatatctttttggtagaccaattaatttccctttgattatatactcagcaataagattgctgggtcaaatggtagttctgtttcaatttctttgggaaatttcccaactgctttccacagtggttgaactaatttatattcctacccacagtgtataagcattcccttttctctgmagtcttaccagcatctattattttttgactttttaatagtagccattctgactggtgtgagataatatctcatctctctaacgattagtgatgttgagctttttttcatgccttttggccacttgtctgtcttcttttgagaagtgtctgttcatgtcttttgcccacttttgaatggggttatttgtttttggcttgttgacctaaaacaaggctgtataggtcagctcctttctttacaatcctctttggtatgcttctgtcatacgtttgtaatacagttagattcattgctacagtctatgttccactctggattctcctgtaatcctggttgatttttaaaatgttacatacagcaaaatttacttgttgtgttgtagatttctgtggagtgtggcaaatgtacagtgttgtatccatctccacagaaccatataaaacacttccatcacctatcaaattttctcatgctgctctcttacagtcaaaccctgctcccacctctaatccctggcaaccattaatctgtttttccttcctatagttttgccttttctagaatgtaatataaatagaatcctataatacattgtgatggttactatggcactgaacaaagggggatgaatgcagaaatgaagacaaagcttgttcctattgagcaagggccctgagcttctaaagcccttcatatttattgggtagaaagagcagggaggaggaggtaacggttggtcagctgcttgatttatcacaggttcacatgattgctaacaggcttcagatgtgccttgtagataatcacaagaaacactgcacctggggtatgactgccctcagcattccttctgggcagcagatgcagtttgtcagtttgccaacaacctgcattcatgagctgtttgctcatagagcctccagtggtatactgagttggtcatgacccgcattctttcggcctccaacaatgcatagccttttgtatatggcttcttatacttagcaaaatgcatttccgatttgttcctgcttttgtgtgaaacaatagtttgttcctttatattgctgagtagtattccatggcatagatgtaccacagtttgtttaaccactcatgtgtcgaaggcctggtttttcatgcttatgaataatgcagctccagttatttgtgaataggtttttgtgtgaacataggtttcaattcacttggataaattactaagagtagtattcctgggtcttataagctatgtttaattttataaaaaactgcaaatctgttttccaaagtagctgttttgtatttccaccagaaacatgagtgttcctccagttgtcccacatattcaccagcatgttgtattatcagttgttttattttagcccttctaaaaggtatgtagtagtatcttattgtggttttaatttgcacttccctagtgaacagtaatgctgagtatcttttcatatgcttacttgctatttatagcttttctttggtgaagtgtctgctcagatattttactccctctccttttttattggattgttttcttgttgagatgtaagggtcctggatacagcttccttttcagatatgtgatttaaaatattttctcctagtctctggcttatattttcagtattttaatcatggttttcacagagcaaaagttttaaattttgataaactcagtgcagtctatcaatttttctttttgtaggtcatacttttggtgtatttaaaaatgctttgctaaactcaaggtcatgcagagttttaaaaaaatgttttcttttagaaatcatgtggtcttacattttacatttagatctgtgatacctctgaattaattttttttaagacagagtctttctctgttgcctaggctggagggcagtggcatgatcttggctcactgaagcctctgcctcgcgggttcaagtgattctaccacctcagcttcccaagtagctaggactacaggtgtgtaccacccatgcctggctactttttgtagttttagtagagacagggttttatcatgttggccaggcttgtctcaaactcctaacctcaagtaatttgcccgcctcagcctcccaaagtgctgggattatagccacgagccaccgctgtcggccttaacaaattttaaataagtagttcaattgttccagcacaatttggtgaaaatattgtcctttctccattgaactgcctttgtcactttgtcaaaaatcagttgactaaggcaactgattttattattttaacgtattttattaatatatgtacatttataggctatgtaccgtgttttgttgttccagattatatgccatttcactggtattatactgtattaattcttatagctttattgtcttgaaattgagcagcgttggtcctccaactttcttctttttcagaattatttggactattcctattttccttttcacataaattttataatcaagttaactatatatatgaataaagcttcctgagattttgattacaattgtgttatatctatagatcaaattgggaaaaactaaaatcttaaaaatattgaggcttgtggtctatgaacattgtatgttctccattaatttaggtcttattttatttctttcatcagggttttattgtttttagcatacagatcttacacatattttgttagatttatacataaacattttaatttttggtgctatcatgatgtttgtttctaaaatttcaaattccagttgttcattgctagtatatgggaatacggttaacttttgtattctgtaattttgccaacctcacttattagttgtaagagcttttttattggtgctttgagattttttttacagagatgataatctctgtattttttttgtagatgataatcatgtcatctacaaatacagttttatttcttttattcctatctttgtgccatttttttccatattgaatagaagttagtgagaaaggacatacttttcttgcttttgatcttggtgggaaagcatttagtctctcactgttaagtattagttctaggtttgggtttttttttctgtttattaggttaagaaattttccttctagtttactgagagttttacttttaaattatgaacaaatgttgaattttgtaatgcttttcctgcatctattagatggcatggtttttcttctttagtctgctaagatggtgaattacattgattaatatttgaatattgaacgagacatttctgggatgaaccccactggttgtgatgtattatctttttaatgtattgctggatttaatttgctaatattttattgataagttttatatttatgttcatgaggactactgatctgtagttctcttgtaaaatctttgtcaggttttggtattaatataattctattttatttgaagaaatgaattccatataagtagactaggaaccctttgtccttgtgaattgtgagggaataaaatggtaaataatactgtgatactatacatagtctaccttttttgactgaggtgaaattgtagaactcttgatctctgttcatctttctctgcctcttggtagagtgcatgctttcttctcctccataagtggcttggtacctacagtgctagcaccagtgcaggcatatatcttgtcgctaaagctgtgccagccttctgcaaagggtagtgtttaaaaattccagaaaactgagacccaatttgcatagaattttgcatgcatgttagctagtgaggagaaatgaaaaataagtatttggaactggcacaaagttcagtgaacttttccctcgaaattatcagcatgcttctattatacacagaacaatagaaaagtcctcattaaactaatagaacagaatcatattcccactacttgcattccaggctcataacctagttcatgagttgcccttcttttaatcttgtttggaggaaaaatggaaggaaataagtaagttgtatgataatataactttgttctgggattggagatcattactttgtttatcaatctattaaatgtaaatatttaaatataaatacaatgagcattagttgagggggtttctttattcaccatttattgtggtttccccaaatgtaattatattttctttccctttctcttgcagatggggtaaattcamccaccctaaggaaatgaaataaaattactgtatgaagaccaaatttatatgaaaatgaagtatttgaggcagtcaatattctaattgtgaaaaaattttaagttccccacaaagggtttaagtcagtgtagaaaatctgtttgtcagtggtcagcctggtggaacgtatttcccaagtgaactccaatgacatatatcctcaaatgcatgcaaccattctcctaggtcttctctctattttgctttcttcatacttgtttttcaacattcttatttgtttttattatgtttctctatctttatctcttttctgtctattagctggtattgagaattcagggctaagtattaaatccaagatgatgtcattttcttgcagtcacaacttacctttacctgttggaacgggtgagagatgtacttgatggggagagtgagagagttaagaggaagatgggccatagcatcttttcagtcctgtttacttcaattctgaacagatagaagttctagcagaactatttaagatgtaatcttgacatgtttgtgaatattatcaccactcagaagtctggaaacacagaaacatgtttttttggtggggggagggtaagcgagaaaggtcactaaagggtaggctattctgaatacatgttatttatgaagtagactttttaaacttaggaatgactatagaattttgcatggcaaattaaatattttttatgcacatcttaaaggaagacatggactaacaatatatacagcttctgggttgaagtatccttttctcttattttggcattattgatgtttttcagagagagagagaaagagaggaaatatttgcaaaattaaaaattgcaaatagatgtctttaaacagaaatcattaatttatcatcagggaaaatgaaggaaagaaagaggctaaacatatcttggattttagacctaaataagaggaatgagctgggtggtacaggtcaagctacatctcttgtattagcacttaaactggggactttaaccgccctgtgtcttggttttctccagcgtagagtgaggataatgtgtagcacttggccatgtaaagtgcctgcatcagtgactgacaaatagttaattatcgttattatcatctttgggaccagataaggagaagatcaaggtcacttgaaactgataggaagtatgagggcaggatataaagaacaaagaaatcagtttctagctttgagtattaagatgtagtgaggtggggaatgcaagactgagctctttctgttggaactttttcgagtttttgaataaaaggttgaaggtgtgaagaaaaataaaactggaactgatcacgtggtccatccccgggaggcactaaagaatatcacygggtgttgaaatgtgtccagtgataattcttctatcctcagaagagaatgcccaggaaagtccaaggtcaaaggagagagcaagcacaagtgaagattattctgaggacatcctgtgtttgctttaccaccaatactatggtatctacatcaacacaatttttgggccatatgtccctatatctctgggtgtatgactctgtgtgtatatatgcatatttatttatttagataaacttctatgcagtcatatgcacaaatcttaagagtatacatgataaatttttacaaatatgtacacctgtgtcaccatcacccagagcaagacatacatttctagcaccccaacggtcccttgtgcccacttctggtcattaccctctccaaagataaacaccatttagacttgtatcataagagattagtttcttgcagtaaaaggtgtgaatagaatggttttctccctagcgtgtgagtgttgagaaagtaaaacttcagcaagacacgaaaatgtttaacttaggaaaaaaaaggtgagatctttgatgatatctttatcaacaaatatattatcactccttaatacaaagtgaatgctaattcatgaggtttattcatttcttaccacccttgtgaaaacatttctccccttgtatgaatcagagctcttaattgcaagcaacagaactctgatttaggcaaaaaataaagtaattgcgaggtggctggaaaccaagctcagaaaagagataggaacaacagaaagtcaccggacccacagtcaaagccttgtcctgtccaaggtggagtctggctctggtgctgttgctgctgctgaattgtgctgctgactcaattgtggttgcccctgccactaccatgaataagctctaaggaccctgggcctttttgtcactcactgcaaattcaaagcctagcaggagacacaagagttgagcctaggtcatatgactgctaaggaccaagagaggaaatgtccacttccgtattataaggtagggtctcttctgccactgaaactcacacaatgggtgattctctaaaaatagaaaggaagtttggatgctgttcagagaaaaaaagaaaaacaaaacaacccaaaaggcaaatgtctacaataccttaaagtttcttttattaatgttatttaattattgctattttgatgttattttagagccataatttactgccaaaatagattttacctatagctcatagcacatccaaagtataattatgtgttggatagaagatgccaggtacctgcagaacaaagtgctactatcgtgatacgctgttcacttgcatatttaaccattcatggaactcctaacagtcatctctgaggagttgtgccttgaattttcaaataaaattatttccatgtcatttctttgcatctggctttgcaaagaaggcttgcctacaactgagaggtgacatgtgctaatcggagttccatcttcacgcacttacacgggtatcagctactgtcgttcagttcagcagttgctcaaagatgaggcgttatcagtttaatttgttacaaaaggaagggaggataatctcttctgattaaaactataggtttgttttggaatgaagaccaatgtaaatttaatttacttgtccttaagaagttaaaaactatccagggaagactaattttttttttatgacaagctgtaatgcaccggcacctttatttcctaaattaatgttgtcacctaaccagtcatgattctgttagctgagaattattgttttttgtgttttgatagcaaatcttgagaatcagatcaaaattctgtgcagtgtccatgccagcatgaagggtttggaatgttgagggcctgtttggagacattctattctttttattcaggatatttgtttctattaacagtaggtttcttcacctgttacatagcctgttgtggcctggattttgcttatgtttgttttgacttgagtcaattcagaggaagataatgcttattgctagtgcagccagtgtcctatttagggcagtagtgtcccatccaactagtgtttgcaggatgactctgtggccctaggagcgtcctcattgtggggagagtctgagcacctgagctcaggccactgtgtgtttcagtttgctttgttgtggatacaccacttatgtcacacctagccagccccagctaccgcagactcttagttaccttctttagactttttcagaatgcttgtttttcagcattgtccgtagtaatatcagtgctcaatgatgaaggcaatttgaaggattatttgatggcttggagaaaatgtctgtttcagctaaacaaattttatttaaaaatatttagttaaactaaatactaggaaaagaaactctggattctaaggatttgtgactattataaagttcatgtttagcatgtaagtcttgttactaagagatgctctatgcctcctgtgcttggaatttctactggtttcccagtataaaaaggatactgctgcttttagatgtgactttttaatatccttgaaatgtattctttatttgaatcattgtaattgctgaccttagacaatttcttgagacagaggatccagaatgaattttttagaatcctgaaaaatccacccaaacaaatccttaggtagctcaggttaattaacagaatgcgactccataattccacagtgatagtttgtagctatggtcaactttgtaaatgcaggcctgttgctactctaacaaaacaaattatttagtatgctggctttgttcccattgtagactcaagcctgaggcctatttgccccctcttyctcctctccgttccttatctcctgactgtcttcctgggaatctgcttattaaattgttcatgtcagttggatggttaccctcctttatttctctcgtctttaaccttgtcttcttcacattgtagccaatctccctattctcttccctgtagctgccaccatctagtcctttctgggaaatccctttatataatatgaatataatatttgcgaaaactgtaatgattacaataacttaagtttcaggcagtatagccacaccaccaataataataatgtagaaagtggttgtgtttttatttgttactgaaagttcatcatttgttactactttcatttattcagtaaaaagttaaaagtgccaactgcatgtcaggtattgcactaggtgctggaaatacaacaagaagagagctcatagataaggtagaagaaaggtaaatcatgatgatagtgtataagcctttgaaagagtgtcatgtgtaagtttattattgtatcaatcagagcaataatgaactgttgctgttggacatggaaatgatgctattacactgaaaatagtatttatcaatatggaatttgtctttttttgtgtgtgtgtgtgacagagtttcactctgtcaccaggctggagtgtgctggcgcgatcatcttagctcactgcaatctctgcctcctgagttcaagtgattctcctgcctcagcctcccaagtagctgggattataggcacgcaccaccatgcccagctaattctgatttttagtagagatggggtttcactatgttggctggtctcgaattcctgacctcaagggatccacccaccttggcctcccaaagtgctgagattacaggcrtgagccaccacactgggccaaaatttgtttttggtatgtatactagttagcaggattatagacctcccaaagttatactcaggtatgaagaagaatgtagtttcttcaggtctttctgagagccatttgatcctcctgatcccctgtctgctgggtagcagaagatgacaaaatgactctgctctagggatgttgtctgatgcaatgatctaaataatttgtttaggtcttgcatgctcatttacttagataaaatactcagcctcctaactatttgacttcttactctgcacctttccaggatggtttccaaatgtatggggacaggggagtgttggaggtgagggattccttggcttcatgcagtcctcagtgactcattcatctttgagtgtctgcttgcatctgtgtctgcaggcatagacggtacgttggtctctttcagccatgtctgggcccagatgtgttcctgagctgaccttgaccccacttcctcttagttcttgctgatgctgtttggacccctccaaatctctgtcacattctccatacagcccatggcctaggatgtcactcgtgtaatcactctactcctgagggacatctttcttctcaccaggctgagcctgttgccactcaactcactactatcttcatcctccctaggggtgcacagggacttctggtcccatccacaccgcactagaactgaagctggctagggaaagctaaacactatccttccctcacccagcctctcggcattgctgtgtttactgtgctctgttcatctcctgggctgacgcaagaacagcctccccaaatcacagagagtcagctgccactcactcagaagtgtgtcataatttatctgacaaccatttccttctctggggccaaaacccagaaaaggagatcaagactcagctgttttgcctcctgcctctccttgtaattccctggttccagaagccagtcaatgttgggctttccccctcttttcttctcctatcctaaggcagccatcttcatccctagcattaataagaagctttgtcttccacaaaagcgaccatgatcaaccccatctctgctaaaaagacaaaaaattagctgggcatggtggcaggcacctgtagtctcagctacttgggaggctgaggcaggagaatggcgtgaacccgggaggyggagcttgcagtgagccgagatcacgccgctgcacttcagcctaggcgacagagggagactccgtctcagaaaaaaaaaaaaaaaaagacaccatgatttgaatttttcaaactctgttcttcataaggcctgcatttccagcccattgtcttgttgtaaaaatcatacttgggatttcagaaactgacatttctcttttcctttctgcagcaacagtgctaaaatgtttcctctcctcacttccagccccaagagccccaaggcaggtggatgtttcaggctgacaaaagaaagctcccatacacaaaatgagaaagaaaaaaagatgcacatcatgatttttcaaatgtgttatagtagatgtcagtgattcataaataatcacttctgtacaagtttgaaaatatgtgcatagcactgtagtatgtaaatatgcgcaaggtgaatgcttgccattccacagcaggtgtctgttcctggaggcaagccctcggttgtgccactataatggattactagtgtaatcgaggcaaggcagtttacattcttacactggggattttatctctaactaattactggatatgactagttgccaggtgtcattaaaggaaagctgctgaataccatgcaatgaagaaaaactataggctgaagaatgagcaggcacagattccaatattaattctgcttgttgccgcagaggcgaatagtaaaaataaaaaatgagttcctataaaatacaaatgagttaatgtatattaaggtgctttgagtatggcaattttcctaaggagtattagttataaatatttaaaacaacatagacatgtatttccagttgtgccattttagattgtagagatgaataatcattgtattttacagatgagaagggtcaaattaccccatgaatagacatgacaggtggtccctggaggaagtatggtctttctctttaaatgaatgaatgacagaaccttggaaaactaagggacagttgaaaaagaagaaaaaggaagggaaaatggtagtttgacgggagggaagtgtagaattttgacaaaggagtagtcatcaaaaatagcaggcagagagaggtcaggagagattggactcagcctctaagacctcagtggaggctttgatccagggatttcagaggtgagatgtcagccagagtgtggcgggttagaagggaaatagggaaaatgcaagaggaggaaggggaatgacgggtgggatggtaaaattcgacaagttggaaggaggctcacagatggtgtttgaaaagagaaatgtcctcctctgagccttgaagaaaggcgtgaaggagagtcatgggctggatggaccagagctgtgcatccaggtcttctagccttgtttattgttcttcctgctgaccgattgctccttacaaatggcacataaacatgtatgtctcaaagttgacatccaaacaaccccacaacaacctaaagtgccagctctgagaaaaatcaaagaaacatatacttagtgattttgctgaccacattaggatctgaagaacctttgggagaatctgaaagatccatgcctgttcaaaataacggcttatataacatattgcttctcaaatttcttcatagcaaaagaagttcaagctcattccattcatcattagttttaaaatagaggttagagaattttgttattttaattctaactaaagtctttgttttgagaatctgaagaacaggaaattcttgaatctggacatctctttccttctctctctctttttcttctccctttggcctggaagagcaggggaagccacagaggctgctctccaccatgtatgaggaaggatgggggcctgggaataggctgggttgcattgtcctgccatggtgtctgtggggactctgtagtatgaatttctacttcagggctttggggacacctattagcttctttcttcaaccttctcgcttttaccatcttcttgagtcactgcctacatgaaccctctagtgaaacccttgagaagtaaagtaaaagcattacctacttagatcctgttgaatgtgcaaatagggaaaaatctgaaacctctatagtgcctgggtttgggctactggtcagtgacttcaggtatattttccccccagaagctgcctctgctgtgatcactgttgaagcctctgttttaaatgaacctgaaattggcttattaggctagctgaattttttttttcagaatcagggtctcactctgtcccccaggctggagtgcagtggtgtgatcatagctcactgcagcctggacctcctgggctcaagggatcctcccaccttggcctcccaagtagctggaattacaggtatgagccaccatgcccagccctaaactagctgtttttgattgagaattgccctagaggttttatttatttgtaaaattaatggtatccttgatttttgatcacataactaatagttgtcaggccagtgccctttgcatgggaactatttaggaatcttgttaccatctgtcggtattccctttgttagagatgctcttggtataaagggctcagcagcagttttgtcatgagctcagtgttggccccaccctaatctagaaatttctttgcaggtttaggcayacaatatctaatgagtatatctgggagcctgtcaattatgatcttttgctgctattcagtggtaattgaaaaataattaagcagtagcacacagatatatctgacacatgtgacttagagatagaaaagcttgctgctatgctaaactatttaataggctaagcaaaaagattcgtcgtgaatatgtaacaatagcttttccgaaggaagggagggaaagataattaatattcttgaacatccatgacatagcagacactgtgctagctgtttcatcaaccttttatttaattcccattacttacccagtgtgctaagtatgatttcctctctctaaaactcagagaaattataaatgctgtgtccaaagctgcacagctatttaccagatgtcctgggactaccagagtgtaaggactcaataaatgtttgtgctatggatgaatggaatgtgaatgaaatggcctgcagcccaggcaagttttcacattaccatttgtctctcatctcaccatgtgtttcaaaacataaaacgctttgtttatcttttaggaagacccacttttctttgaatgggacatgaaaataatgggtgtggatattcttactcctatttattgttgaacatttggttcctgatttaaacttcaaagtacgactcctatgagagtttaatctccagaaaatccctgatgagaaacaggcagatagatatctattttatgataaatccttattcattcagaatttcagaggcaatgaagatgaaaaaggcaaatgcatacatatctctctctatccatatatattaacaaataaggctaaccatgttttaaagtagccattttttgtgatctgttttaatgaacagattagtatagtactgtagttttttatgttttaatttagaccgtcatcttgaggccttaaaataatttaatatcttaattagccaaagcattccctttcaagaacattagcttgctagccatcctttcttatgtagtatgaagatatattttagtccatattctaatttaataaagttttacattattttcaaagtgtctctgaaagagattaatgtaattgtggttcagtaattattcctgtccctgttctaggttagtctcctctcttatcttctccatagaaaatgggtatcactgttttccatttgaaggaaaagaatttttttttttcctttgtgatggagtcttgctctgtcgccaggctggagtgcagtggcacaatcttggctcgctgcaacctctgcctcccgggttcaagcaatgctcctgcctcagcctcctgagtactgggactacagctgcgtgccaccacgcccagctaatttttgtatttttagtagagacggggtttcaccatgttggccaggttggtctcaatctcttgacctcatgatctaccctccttggcctcccaaagtgttgggattacaggcgtgagccaccacacccagccccaagaatgttttttaagaaaaacaatttcttgctttatgaaaatcagtttcacatctttggtctaattatgttgttttaattttcaacaaagatcagttaaggtttatttgtatgcttttctaaatgaagggggaagaaaagaacaaaacaaaaaaaccagttcccccattaagctcaagaggaagtttcttgttctcaaatccatttaagaggataagccattcaaaatctcctctgtcacctctcagacatatttttctaatatcacaaaggcgtggagggcattctaagccctaaattgagcaaaatgaattggccttgtgactatttatccatgcattaattggtctaggaatggttctagcatgagcatgaagaaaactagaagtattcaactacacctaaatccactctctggagtagattctggggtttgcatttgggggcagttcccaaaagtatcaggcctctgtctctgttcccttttctctcaagctccttggaatccctgggtggttgtccagtggtccacagaggtacctgtgccagggtctgcgggggcatcccaggcaggcctgagcatcctgaaccttatttcatccatgcacctctgttaaaaattctcattcctctattaaaatgttgtgggaattagaccaaaggttgatgaaacagctagcacagtgtctgatttgtcatgggtgttcaagcaaaattctcaaatctctgtttaaaattctctattaaaaattaagaattctgtgcctactaggtaataattacataatcttaaaaatcaacctcttttttcccttaggaaatatagatacatttttgagaaagaattgcccagaatctaaatataatctggacatgaatagaatttcagttctaaatgcatgattcttttgaaaaaggcagatactatatgcagtgtgaacgtgcatatagtaaaatccccccctttttagtgtacagttctgactgttgacaaatacacagagtactgcaaccaaatatggaacattaacatcaccccaaaattccctgtgctgcccctttgttgtagccagtgcttcctctaacctcaatccctgtcaactgctgttcttttccctatagctgtaaaagataacatttccaagatgtcatataattggaatcctatgttatgtagccattcaagtctggcttttaccattcagcttaagtcatttgagattcatccattcgtttcatgttttaaaactttgttcctttgtatttcttagtagtattacattgtgtggaggtaacacagcttattcactgaaggatatctgagatgattccagtttttggtgattacaaatagagctgccataaccatccatacacagatttcatgtgaatatmagtttatacaacacctaaataaatacctgggagtagaatttctaggtcgtatggtaagtttatatttatcaaagggagattgttaaatgtatttcagattttatttttcttctaattataaaagtgatgtatgtttgttgtagaaaacttaaaaaatatagaaaagtaccaaaaaggttaaaaaaaacccttaattccatatgtatttcattgtcatctgggtatgtgcataatctatttaccaattgtttggtgtcctattttttgtttcacaaatattttctgtgtcattaaatattaaataacttctgataatacctaagaagtacatttaatgataggagtatcataaaccatggcagactgatagaggagatatttttgtacagaggaacttagaatctttgtggttgtttgaacacaccttctcatatttgcgtagtcctctattatatgaattcatttaggaacagttaaaactaatatggccaattgccttgtatagatacgccctttargtttgaggcttataggtatraatagaatgttggtccactggacgttattttttcccttggataaactcaatacctcttaactgttatttaaatggtgactgtaagaacattattgtcctttactttcataaaataatttatactaatcttcttaagtgaaattaaggttagggactatcatgttaaataaccagctaatcactaaaaatcttttttattttctttttaatgctgcattagtggttcaagtgaggtctctgttttgagagaatcagtaagttggctgttttcgttggtatttgggaaagctagggatatgcttggggtgtggtgtaattcattcacatgcctgatttgtaaagccaggtctatcttcctgattttctgaagaataggctcatgacatttgactggacaatgaggaagagtagaaaaagggtctgagaagagtttaaagatttggctactattttggatgtctggaaactttttctttacctaagtatcaaccctttattctttcagggctcaactgcaagacatacatttctgaattaagagagcattaacaataaaattcctgtcagggtcaattgttaaactagcagtcaaggtgactgacttgggcagtatgtaacttgtgcagtttccccctgtgttgagtggttttaatctaaattttcctattagcctgagtttggttgcaaagaccatatccctaaaagtttaaaccaggggagaaagtgtgtgtgcatatgtgtgcctgtgtgtgcacaaatacccctcagtgaaaagctcactgccagcccagaacagagtagggttcagtcttcaaaatgacaaggaagtcctttggaacttctgggcactgcactccctgtctgccaggtatgactagccaaactgcaaacaaaattcaagttacatagataccagtttgctgtcttgtttactgacatgttttatctaaaaccaagctgtagcagttacaaaaaaataatttattttcaaagagttgatttagagcttagctttggttttatttttgctagggaagcatttaaagagaatctaaaatatgctatccagctaactaagatatagggagttttaacagaaaattgattggcccacaaataggtaaattagttcggtgcaaaagtgtatcaatacagtatacgatgaacttactaagcacagtgtaagttgctaggaataaggccatccagaattctatgctgaatagcgtttcagggtgactttgtattttggcaacatatcccagacagttagtggaaatgagagaacatgttttatttaatttgtactttggtaccttttatgtgaacgaggcatgtttaagcacttaatgttgtcaccagccttttaaaactatctttttttcccgctgcccaactgtagtttcccttcagtgttgagtggtygtaatctaaacacattaagtttttgtcttgttctttctgcagagatagaaagctgggtctgaaaataaaagcagagcttttatacaaggaggtcagtgtttgtactcagaaaagaaagtatgtaaaccagatttctaatggtttttataactgttctgaatgacattggcatttagagattggaagcttttaaaattctttgcttaatatttttcctctgcaaatatttttcttcattacctgtcctcatgtcagttttcttcctgtcatgatcattacaaagyccattttggtatccatgtgaattggtataattggagcyggtgaaattcagattaggcatcaggaagaactttctgaaaagccagaactgtgggaatactaagaagatgggcargtttcttcttagaaacatataaagaaacattttaaaagtgatcttcttggggagtttgtctccttgcttagacctgagggggtgagtgaaataatcttttgtgaccactttcactttgtgcttttgtgattctctgaatatacatatccactgtaagtttgaatgatttttatcatggaatcttatgtgtagcaattccctctaatgacaggaatagatggtcatctactctccttaagctcttctaatggtgacaagaacccactttcctggataaggaagagagtccatatttggacagttctacttgctataaaataatttttaactgtggcctaaaatctgcctctggtaattctctccacttgctcttggttctgtccccctgagacattgtgtagtaactctgttttttcttggatatcatcctttaagactttgagaacagctgtcatatcctctcgttaagtgtcctctttgccagaataaatccctgatttcaaaagcctttcttctcatagtgtggccctcaacatccagttaaaatgcagtgcctctaattgaacagaatccctcagcaggccatggccaatgcagaggaccatggggtcatcaccttccctgttctgcctactgtccttcagtctcaggtagtctgagttcattttgggtgactgtatcaaactgctgccccatcctgagcttactgctgtctgaaatctctaggtcctttccacgtcaatgctatttatctggtcctcttgcatcctgtgttgtgctgctgagttttctttaacttaagtacagcattttcattgttagttggtgaagttcgtcttgttagtgttggtcctgttgaggtctttctgagacttgattcatcctgactgacccttccaactttgcttctaccattggtaaatttgataatgatatctatgctgtcattgaagccataagtaaacatgtagaacaaagtagagcattgcttgtcttgtggaaagccttcttatttttaaaatgataatttctttgtttcatcccaatgtagtaaagaaatggtcaggctagtggctgattaaatgggtcacaactggtggcttccctttgttgtgcccctacagaccttcactcaaattcttagccttgcaagtctgaaaacaagttttctttcaagtcagatgtgctatctaaatcaagtgttggaaattgctttgtaaaaagggtttaaattatgaaatattggaatcatagagaatagtacagcaagtaatataacaaagccctcttttaacttatcacctatagttaagacaagtcgaaaggttaatgtttttccttctcgtccagaaagctaaagaatgttgtcagccacagagagatgttgtggcaccctgtactaaatacacggtactgaatgttctggccaaagagaaaacgtttctcattggagaaccctgatgagatcagccattgagagtgctgccaaacgactccaggttgagtaggttctgcaaatcatgttgctttctgtggctgctctttccaacatatatcttgtgttccaaaggagcagttttggtgcaggatagttgaccataggtgtgtgaacttgccccaagaaacaaaggaagactacggtgctggcattaaaatgtgagctttatagcagttcaagggacaatcaagaaaataaatamcaaagaaaagcagaaaatggcagaaagccctggatatgataagaggcctcataaatatcactgcagtctgaagggactgacccacagttgtggatagctagaggcaattcttggcttcaagggatttcaagaacctgtaaggattgccagtgtgtgtagctgcatcgctgtgaggacttggctgtgagagtttaagagactgcctggctcagcctcctgacaagctgtgtgatcttaggcaagttatttaagtgctccctgcctcagtttcctcatttgtcaaatgaggattataatagacacctacctcaaaggactgttgtgggattaaactgatcaactgaaagctgttagaactgagattgacaggttggctaggtgatgatatgtgttgctctaatcatgaggatgaccatgtatagtgctgattttatttttaagaacatatcctctgggctaaaggaatgctgccttagggggagctgcagtatttactctatctcctgtgaaacagagtgaaacattcatgtttgctggctggatcttgccccaaggacaatgctaaataaatattgaacaattctcattctttagattttctgtttctaaaagtcatttagatggccatacttttgtttgtattcttcatcacaacatcaccctttatttaaatacacagaatgtgttagatttctcaagtttatttagtcaccgatcacatttcaggcgggcagcttcttttgatattatggaggcagatacatatctttcctcgataaggtgggtagtaagtagctaattttactcaaattgtatagactatttttgttagtgttagagagtagaacttcacaagttgggagtttgtctttttggcgcctttaaatacctatgaaccagttacacactaactattgttttaatcttgaaataagagcaaggagtagatagtagataggcctgaattcgagtcccagctgtgaccttccaatttgtactatctcactttcccatttataaggtgggaataacaaaacctagcttgcagtgttgtgagatttaaacgtattgccaaatagtggtttccagagttattcagtgaatatatcgccatctaattctgatctaaaaacagtttttctaaggttcaagtttaaatgtaaagcattaacatgcatattacttatagtttgtggttaagtttatagcttatagttctgtttataaatttataaaatgaatttaatgaaatctactcaacttatcctcaaatgtagagttttttaaatagtaaactgtcccagtcagatatgttgtatatatctgtgacccgcagagaagtagttgggggtaaaaatgcttcttcccctgttaagaggtgctcgcaaggctaggagaatgactggtgatggccatgtaggtggttagataggtagggatgtcctacttatcttgttggattccagtgttgccttgcatcggtaggcacctttaaggcaaaataaaggaaaatatatttcagtagactgctgacttgatcatgtatgcaacctataatcaatataggttcaaactgtccaccataaggaggattttttttttttttttttttgtcagggtttcatctgttgcccaggcttgagtgcagtagcacgatcacagctcgctgcagcctcagccttcctgggctcaggtgatcctcctacctcaggccccmgagtagttgggactacaggtgtgtgccaccatgcctggctaatttttgtatatttttgtagagacaaggttttgccatgttgcacaggttggaactgttttgaaggttgatatttttaatggtttaaaattttagatttgaaaatgaaaaatttattctctagtttatcctaaaaattaagtagctgtttagaatcttttggttttttacttgctctgtgttgagtctttaattaaacagttgaaaactaacatcttagatgtctttgggacagtatgtactgagctagattttttttttgcaatgatcagatgaaattctttaattttttcytcttctctgcctttaagctaaaaaaaaaaaaccctctaatctcttatgcagaaaagtagaaaattcttgatgttctctgtgacaagaataatccatttttagtaactgtgctcaacctaatttagcatgtgggacttcaatgggaatgcgttagtttctgtgattgttgggaagatgtttttattgacttggtagttatgtgtgctttcattatgtggtcaaaaggtttggagttgtatagtttggaaggagggtataaccagttaaaaaaacaaaatgcggatctgtgtctatcttgtcaggaatgagataacttaaggggttgctgtaacttaaggatttcttcagttagacatataccttgaaaaactcaaatcatcataagttttggaagcatgcctttgcttggctattaaaaaatttgttcaaagagaaggggtcttatgtaatacatagtggccatttggttttaaggaaagaattgggatactgtggcacagtcatcaggatatttgacaagttactgtgtcataatgtacttccagggaagacccataattactgtgtggccagcaaacttctcttttagttgtttttgaagggatagggtggtcatggaatgagaattgctttcctttctgctaggtaaattttaaagtcatgtgtctctggaaagctttttgtattcattacatgtgctggggttttgggtgatttcaagaggcccagagtagacagcataatattaatataatctacagtgtcagaagtatggtaaattgttagaaatggcatttaaaatgatacagtttttctttattatgtaaacagttatttatcaatgaagctgttttctcctagctcttctcatttctgaattaagggacacttgtagaagtacatctagcactacatttggggtaaaattgttgagattgagagggagagggtagtgtgtgtgtggtcagcatagcctcccccagtatccacatcccccaccaggaatatcacaatttagtgaactttttttttttttttttttaacaattgatgaactaacattgacacatcatcatcatcgaaaatctgtagtttacattagggttcactcctgatgttgtatattctataggtttgcacaaatgtataatgataaagtatccacctttatggtattacatagagtgttttcactgccctgagaatcctctgtgctctgcctattcatccctcccccacctaccaacccttggcaaccactgggtttttaaccatctccattgttttgccctttccagaatgtcatagagttggcatcatgtagtatgtaacttgttcagatcagctttttttttttcactcagtgacatgcatttaaggttccttcatgtcttttcatgacttgatagctcatttctttttaatgctgaatgctaacgctaataccatcaactggatgtaccacaatttatttatcatttgcctrctgaaagacatcttggttgtttccaagttttggcaattctgaatagagctgctgtaaacatccatgtgcaggtttttgtatgatgtaagtttttagttccttttggtaaatattgagggttattctactatttttaattctctgtatagcacttatctgatattttcttactttatctttccaacagaaggctctagaccatgagaacagggatttgctcggtttattgctgcatcccttgttcctagaacagtgttttgaatatattttaataagggcttaatatatgtttgatgaattaatgtataaagctacattttactaagaaaaaagtggtatatgaaagcatagyggaaacacacaaacagtaggaaatgattcttttggtttacaaaaatgttctcccattctagttaattaactttgagtcctttttgtgcataagaatatttgagggaaatttgagaggaaataattactttatatcctgctttattcatttttagctttttwaaaattttttatttcaataggttttggggaacaggtggtgtttagttacatgaataagttctttagtggtgatttctgaggttttggtgcacccatcacccaagcagtgtacactttacccaatgtgtagtcttttatctctcacctgcctctcaccctttcccaagtccccaaagtccattgtatcatttttatgcttttgtatatcctgtgttattcctaaaataaattggagtagtttaacaatgaaaaataaaaagactaaacacataatagggtcttactccatgccaggcagaggcattcattattacatttgactgtcactaaaatctaaaggactatatttaattccattttcagatgaggaaaggaaattaagttacagaaattaagccagttgtttaaagctaaacagtgataagtgatagagtcaggcttgggatccaggccaactgactccagatccagggctggctgacttaaccatgatgctctctggccttcattatgtgggagggtctgttagtacattcttgcattgctatcaagaaatatctaagaccgattacactaaaatctcagaaatcaccactaaagaacttatccatgtaactaaaacccacctgtaccccgaaaactattgaaagaaaaaataatttaaaaggaatgatggaattagaaaatcatcatttgacaactattacagcaataattcattaaggcaagaaaaatcagatttttcttgaaattaagaaatgagatgaggcgtgaaaaagaagaaatatctcagagtgggtaatatataaagaaaagakgtgtaactggctcacagttctgtaagctgtacaggaagcatggtgctggcatttgcttggtttctggggaggcctcagaaaacttacagtcatggcagaaggygargggggagcacacagtcacatggccagagcaggaacaagagagcaaagggggacacgttatacacttttaaataagattttgcaagaactcgctatcacaagaacagcaccaaaaggatggtgctaaaccattcatgaaggagctacccccatgatccaatcacctcccaccaggccccacccccaacactggggattataattgaacatgggatttgggtagggacatggatctaaactatataagagggtaaaaaaaaggatggaaggrgcataaattggtaaaatgaaggcctgtagtgttggcagagagaaaagagaagaatagggagggacagttaaatactacgagacaggttgggatgagatggcctgaaattcagagggacatcatgggcatkcccagaagagtggggccttccaggatagctggggttgggatgagcagaagggccagggcagcatgctcactggtaatgaaaggtatgaaatcctgaggatttcacttcagggtctttggggagacagaggagcaggacacacttctaggcaaatgtgctgatagaatttgtgcattaaagaggaaggaagatgatcctgtgtccttggaaggccacataaaggatagacaaagtgaggagttagcatatagcacaggtaacatttctctgtgccctcataagctagtgcttgtaccactttatatcccagaaaaaaatcagatacacaactgaggtagattaagatcctggaaaatgagtgctctgttgatcttctaaacagatggtaagtagcatccagttccagaagaatgcaagaactgataccactttgccaaattagagtgaactgtcttcaggataaaaatacttctgttttttctttttcttttttttaagttgtgtttttgcagtggagagggaagactattttgaagtagagaggactttcatttataaaatggagtctttcaaatgagtgcttactacaccttctattttatttctctgaatcctgtttccagcttggagaacttgaggagggtcattgtaactttggtcaaataatgtagccttctaaacaaaatatcctcttctgtaaaatgagggtactgatgctgcgctgccgacctcactgtgctgttttgagaaagttgaggaaactgcctggcactcattagatattcaataaatgtttcttcaatgaacaatactgaataacaagagtgatattgattttagtaatctctgagtagctggctaatttattaatttattaagtaattaataaattaatacatttattaatttttattaattaaattaaaattaattaaattaaattaaaatttatttatttattaagtgtcagaagtgctatgcaagtgccratatattttatttcatttagcaatgttaagaatttcctaagataggcaggcactgtttttattcctgttttacaatttagtagcagaggcagccaggattggagtccaggtctgcttgaatctttgaggccttacacttttcactagagcttcaggaggtggmtagagatccagaccagtatctctggtctgcatgtacagtcattgagccagacccatgtttttctaatctctaggttatttttggtactcttaaaaattccagagcagcmgggtactgagaaagagactgtagctcaaggaaagccaatctcgatagcagccttcctggcataactgcctgtgtctcctagactggtctttgtaaaatgcaaatctgattgtgttactcccctgctcaaaactcttccaggaactctttgtcttccaagccctccatgcgatggcctctgccttcatgtccagcttctcctcctatcctactttctacttcaggaatcacagcctggcgataataaactgtcattctccaaatgagccattctctcactggttttcacgcctttatttggaattcccttccattcacagcatcctttccatcttcagagaggcctttcctgacctgttactccctctcccatccatacagagactcttgtgctcacttgtgtttgtttaagctcttctcttcctattaggctgtgagctccgtgaagaaagaaaggataggtcttgtcgtcttcataccrtctgtgcctaacacagtgcctgacacacatcaggtatttattgaatgaaggaakaagagaaaataatctaaaagaggtcataatattcacagtccttgaacatggtcatttcttcgaagtactcaatggatactcatgtgtaacttcttaagacttcactgtggagttaggtgtgaggaaatggtcacggagccaatcaatgcaccgggctgtctcttgttttcggcagaggctttgctgtgggggacgcagcactgaccacagtggcagggcttgctgggagttaagaaggaagcatgggtttgactcctgcttcttcctgaccctccagatcactgtataattatcagggcatttacctctcgaagtctctctttcctcatctataaaatgaggatgatggtttctaccttataggccaattgtaaggaattaatgagataattcacttagaatggtacttggtacattcaaatgcacagtactgttaattaaaacacaaagggtcctatcatggccatttttatccttatgtgttcctaagcaaccacaattaataaactgataaatactactgtttttgcattaaggctttctgttaggaaatgagaaatttcatatttaatgtgagttaatacagtgcctgatgtccctttataactgagattgcttcagtaacatctatatggtaggagtttgataacagtaaaatatctgcaaataggtacctgccatggtaaggtttgtaaacaacgtcgaattttatgggaccattgaaagttggtgaggggagggagggagggaggtagaagagggagaaagaaacagtgaggggcaagaaaggacaaggtcagaaaaaggagctccttcgttttaaagccatggctgcttctgcctaaagtggctgggaatgagaaaggagtccccaagtgtgctctcctttctccctgcagggttgtatggaaggatgggctccccagaatggggatgtgccattagtaggatgtgagtagtgtgaaacctccccacccccactttatgatgtgtttcaatgagacacatccgaggtgcttctttggccctcagctcttgatttagatgcagtgttccttgtcagcaccaaagtttaaattcttttctgcctccctctcccctcctcctttttacaaaagtgtttccagattgccattcctggtggggtgaatctttctctctcctgctcatttttatttatctatttattttccatctttctcacgcttttcctatttcaactaagctccatsttgctttgtttttccagctctttctctgcttgcccccgtcatcactccccagcccactgccgttgtttttgtttctctccccaccgagcccwcttccttcttttcttttcttttcttttcttttcttttcttttcttttcttttcttttcttttcttttcttttcttttcttttcttttcttttttgtgatggagttttgctcttgttgcccaggctggagtgcaatggtgtgatctcagctcactgcaacctctgcctcccgggttcacgcgattcttctgcctcagcctcccaagtagcagggattacaggtgcacgctgccaccacgtccagctaattttttgtattttttagtagagaaggggtttcaccatattggccaggctggtcttgaactgctgacctcaggtgatccgcctgcctcggactctcaaagtgttgggattacaggcgtgagccaccatgcccagccccttgtgtccttttctttcccctcttctgtaggctcttggagctggggctgactgactgctacctgctctttccacgtgccctgcttctctagtttccatcaggacttcaagttttccatgctatgactgggctggcctttttcctgcttttgcttcgatttgaggagaagagctacaggacctgaaagcgctctatggtttaacaaaggtgacgggagcccagaagagaagagacaagacaatggaggctggggatgctgtcggggtgggtgctgaggaactttagggggagttcattgattctgatcctgacttcttttcataaaggctcttcccagtccctgggggaggaataggattcatctgggggtcagactgttgctcttccccactagtagcttggggragtgggaaaggtattcgatggaaggtgaccaccagggatttctggtccaaggttagcagtgtgatggaacctagatcaaggttatgggtcttcagtttgctgtaatgtaaggggtttgatccagatgagctctaaggcttctttcagatctctaaattgtacatttctgaatctctacttttcttactaaggattcccagtatcttacaatgagcattgcttggcagagtctttagcactcttatttaagagtggcctcgtgtgtgtgtgtgtgtgtgtgtgtgtgtgtgtgtgtgtatgtatgtgcatgtgtgtgtgtacgtacaccgaggatagataggtggaaggaatattctcgcacggatgctggccagatgagagggacaaggggaactgtctccagcttttatacctttgtacaaaggagagggactgcctgtggaacacaaggacttggwggtccaccatgaaataagaatggatagttatgatcaggttatgcccagagataatcaatccatggagacctggggttgtttgtattcctgatagtcttcattttagtttgagatgttcaatgctgttacttggcccacaataaccttcagatggcagttgatttgacataaatctgtagacctcaagtgctaaataataaccatgtgaggttactgtctgtgtgggttcaaggtgaatttgaagttgacaaattgtagtctttacastggtgcacatgtaaagcttgtttgagacatgaaccataaaaagggcttagaggaatattttcttaggccattagtgactttggtcactaatagaacttagttgtcttcccataagacagcagagggtatcctatagtccttagaggggccttagagactctttcttattggataaaaggaaaccttttttttttccaaacaagtattatgaggaacattaatatgtaakcttgataaaactttattattataaatgtgttctttaagtttattgcatttgtcaattcgatggaaaaatgacaacctggcactttaggtcctctccaatgtcttaaaatttggtaaataataaatttaagtggatgataatccttttagatttcatactaattggaaacatatttcccaaatgaaatttaaatggaatgtttatgaactcccaacatcctcccattacaacttagggttcccctgatctcagtttgaaaaccattaatacagagaataaaaataaactaagcataaatccaaggagttagaaaaataaaccaaagcaaaaatataagagagaaattaaaaaacaaacctggggctggacacagtggctcacacctataatcctaacacttcaggaagctgaggcgggcggatcgcttgagcccaggagttcaggaccagcctgtgcaacaggtgaaaccttctctctaccaaaaaattagctgggcatggtggtgtgtgcctgtagttccagctcctcaggagactgaggtgggaakatcacttgtgcccaggaggccatgrttgtggtgagctgagatcatgccactgcactccagtctggggtactgaacaaggtcctgtctctaataataataataataaaaataaataaataaataaataaataaataaataaawaaaaataaaaaataaacctggggctggatgtgatggctcatgtctgtaattccagcgctttgggaggttgaggtgggrgggtcatttgaggcccaggagtacaataccagcctgggcaacatagtgagactttgtctctaccaaaaaaaaaaaaaaaatttagctaggtgtggtgtggtggtggtgcctgcagtcctagctacttaggaggctgaggtgggaggatcccttgagcctaggaatttgaggctgcagtgagctatgatcatgtcactgtactccagcttgggtgatatagtgagaacctatctcaaaaaaaaaaaaaaaaaaagaaggagaagcgaaaaatgaacagaaatcccacgaaatccaaatccagttatgttaggtcccccattttaaaaaatattgaagcaattaatcaatctagaattatataccagatattatagattctagacactgaatattagatagttctttaagttctttagcctcattctttctcagagcaaataagcaaaacagaaaaacaaacaaaacacaccatctcttagtagtgcttgttcctcctaagctgaagcaatccttgtcgtctttggatgtctgatgcttagagggctctcactggggagctgaactctgtcccctgtccttccctgtattgttttgtgctcttcccttggggcctgcagaacatgtctaatcctatgtctgcatgatagaccctcagatatttgcagcggtgaccatttacccatgagtcgtctcttctttagcaaaacagtcccagttccttcaattgttcttcatatgacagcatgctttttgcatccctttggcatccttgtccttttcctctgaacgtgttgtcagctttgtctatatttgtattaaagtattccatggcccaggtgtgtctgacaggtataaagcagagctggaccatactcactcttaatggagttactaaattttcatcaatatagggtagggcaggctgctccctcagtgatgctagtggattattgattaaaatcccaacttgtgtctaactgttaaactgcattttgcttccttcttggtttatgtagttgatgatttgggggccagtatagggcttttattcctaaaggattatcagaataaggcaagagtgattacaatttttcttatacccaagccagtacatttcccactatgatctgctgcttaaagtgccagatacttgttttcacttactaggagttctctgtctccatggaatttgtaagttagggatttgaaaaggaagcaagctaaggggctttataaagcctgcttctggtcttgtgaggaatctggagtcatttgctgacctctgtcatgaattgtcttttacttagttctgctgtgttatagaaacaaaggcaatttcaatttgatactggtgaatcattccatcaagggtgaaagtcgtctagattttaaatttatatgtgtgtgtgtgtgtgtgtgtgtgtgtgtgtgtgtgtgtgtgtgtatatatatatatatatatatatatatatatatatatatatatatatacacacacacacacacacacacacacacacacacacacacactcgcactcacattggctcactgcaacctctgcctcctggattcaagcgattctcttttctgagcctaccaagtagctgggattataggtgtgcgccaccaagcccagctaattttttgtatttttagtagagatggggtttcaccatgttggccaggctagtctcaaactcccgaccacgtgatccacctgcctcaaccttccaaaatgctgggattacaggcatgagccactgcacctggcctgtgtgtttatattttttgaattattgtgtttaatgcagaggtttgaataatgggtatcttttacaaatattaatatatgcatttaattatgttaattatttctttgggtaagttattttaattgtgtaatttagatctttgatatccttgtcaattttttgcttacttgttctattagctattgaaagaggcctgttaaagtttcccactgtgattgtggatttgtctattctattggatttgttaacttttgctttatatcttttgaagatgtgttattaggggcatacagaagtaatattatgatattatcttcttcaactgactctttttatgatgaaagatttctctttccctagtaatatgtgttgctttaaaatctgctttgtctgatattattttgtttgtgctagctttttcttggttagttttgcatggatgtctttttacttttaagctttctgtgttatttttaaagtatgtctcttgttggcagtgtataggtatcgttattgtttttagattaaaaaaaatccatactggcagacttggtgtactatttggagtagtctatctacatttaatataattgctgatatagttggatgtatatctacatatagctatttrctctctgtttggcatgcatgttttatttttatgttttttgtttcacctgtcttattttctttttgatgaatcaactatttttattatttaagtttcctctctataacttattagttatgcattcttttggtggctactctcaagtcaaaatatgtatatttaatatattataaatatgataaaagtactttcaggccgggcgcrgtggctcacgcctgtaatcccagcactttgggaggccgaggcgggtggatcaygaggtcaggagatcgagaccatcctggctaacaaggtgaaaccccgtctctactaaaaatacaaaaamttagccgggcgcggtggcgggcgcctgtagtcccagctactcgggaggctgaggcaggagaatggcgtgaacccgggaagcagagcttgcagtgagccgagattgcgccactgcagtccgcagtccggcctgggcgacagagcgagactccgtctcaaaaaaaaaaaaaaaaaaaaagtactttcagcaatttcctaatattgctaggtactttaatttcatctaccttttacattattgttgtcacacattgtagttctacagatattttaaactccgtgacattataatattttgtaaaacattttcttatatattacacaaaatatgtaattttataattttgtaaaattgtttgtatatttgatttaattatatttattcacatatttacctactcgctattcctcattctttcctgcatttccatgtttctgtttgagattattttatttcttcttgagtaacttccttcagtatttctttcggtgctggtctgttggcactgaattctctcagtattagtcttaaacattttaatttcagtttcattttaaaagatatttttgttagatatggaattttctttcatccctttacagatattacccaattgtcttttggcttccattacttctctgagtggttctcctctctggtattttgttacatttatgtcctcattgtttccatgactttttatttgccagcccttgttattcctggttgttttcagccggactgttggcctgctgtggtctattttatcctatctggagatggacacctactataaaggctgtttctcaaaaaatgtgttataagtcttttaagttattttagttaaccttcttttaaaaaattggcattctgatatttccccctggatttaaccaatttgtatttacgtgaatgggacaatacatttgaatratcttgatatttcaaattatataaaagtcagacgcttttaaacatgcttcaaatcagatcaggggttcttcagttttttgattcacatgttctttgtgtactcttctcagaatctgtaactgatagacagactccccaaataaatgccccaaactgttgcatacattttccggaggattagggtacatttcccctcaccgtatctatctgtagatttcaggatgggaactacattaagaacataaaggaaagattgagttaaatgaaaagctgtagataagtcactaaatattcgtgcatttgctgtttgttcactaacatggtggggagaaaatgtactgagcctggcacagaaagatgtagatttatttctggctctgctcctcactagatccaatattttcagtgttctctttaataaacaaggttcataataatacctcccaggtattattgtgggaataagacaagaaaacacacaagaaagcactgtataaattgtggtgtgctgtacacatagataatatgtataagtagttagatatgtcratatctgtatttgtatacatgtgcacacacatataagaaataatatttgcatctccacacttccttttaacgaagtacttcagctaaacacagtaatttgaataaaatactttgtgcccacggtgcttcctttggtaccacatatgctattgtacttgagaaattgtgaagaggataacctaacttgggggttggggcagaaatcaagaaacctaatattacacatctggctctgggatcctgagctagttagcagtagtacctatagttgtatttacttacctataaaatgggataataaccatgcatgctttttttttcttttaacttttcaaggatcttacaaagttcagtacacttgttctacaggaaaggctctgtatagatttttttttcttattgtaaagaagacaagtttcaaatattgaatacaaatcaaatttgatagttcacttagcactgtattttagcataatagttttcatggcatgtattagtaaacattgattataatatttaacagtcaacttatatttacctttattatgcttctttccctaaatcatcccatataaaggctgtgtataatactagaatccattggaagatagtttatgtcttcctgtcaaataaaaaggtgacaattaccattgaaaagtatttattaacttcccatttttgcctgttactataaaagctagagttcataaactttttttgaatctttagatgcctttgagactatgatgaaagccataaaaaacctttcctcagaaaatggacatatatacacacaaaaaacattattatgttttgctaataattttcagaggtcctcaaactgtctgaaatccatattcagattcttcccttggttaagaaaccccactataaaaagatgtatccttttttctaattgtcataatttgaaaatacagtatttgttcattgcccagtcatgccatatatttaagaaaccagagagttaaggtgttgttcagcaaatagcattgttattaacgaagtgtaattatatacagatgcattgtttataatgggagggaagaaagggaggaagggagagaaaacatgagtacaggaatacccagtgattaggctaatacagccactcaattactcaaggtattagagacatagattaatgaaaaaatctttagaacatgcaaactggtgttgacaaccatttccactttaaataccatctggaaaggaataggaaagttggatgagatagtttaaggtggcaaaaacatttgttacctttttggttctctgggaagaaatccatagatgtcacagcatttcagcagaaggattggtctttgaaaattattgagttttatgagtagaatttctctagaggatgtttgatggtaaaaaatgttagtttaatttacctgattctttgtgtgtatttatattgaactatgtttagtatgattctagtcagttcagcttttctgctctacatttgtgattcctgttttccatgtgacttggccttccaagattttatgggagtactgatgagtattttttatttgggcatgatygggtaagaggtgatataccttcactatttgacagggaaagggaatgattctgacactgattccaactggttcacttgggaaactaaaaattttgacctgccaaaggcaaagtttgtaggtgaattcatatgtgaaacagaagagggaagactaaatttattcaaattgagatttggtttggccaccagcaatgtttacattattttgcaatagacttttatgaaagtgrgcaataaatttcagtggcaatggaaaaaggtgaattaaatcagcgaggaactgtttatgatctgttaacacaggaaatacttccaaagatagttttggcaaggttggggtgaaaatgatactcttaaccagcacatgtgataaaagttgatacaaaatttttggaaagaagtttggcaatttgtgacaacttgttcatatttttggaagcatttctagaattttattctaaaataacatctcaaaggataaaaattacttaaaatgtttataaagagttgtttaaaatgttaaaaagtcagaagtacacttaacgaacagtagatgaatatttaagtaatcatgcaattgtggaacatcaaacacttggtggaatgcaattaaaaagggtgccaaagattgtaacaatgtagaaaaayacttttgatagaagagaagaaaccacacartatgtattaatgtattatgccatgagtatagctgtgtaataattacctgtgcatatgaataaagactggaagagaataggaaaaatgaaaaaaggttgatagtttaggatcatgtcaatgcagatgaaatctaaatacctttaattgctattatttattcaataatgaaaacttttaaacagtcttctaattttatgcttttatggatttttatgttagatattgaattaattagaaatttaatcatttggtagaaggcatgtttttgctcctaatggatagctattgttctaaaactgtttattgaattgtccattctttccctgctgatttgaaatgccacctattataacataatttccatgggtccatgtgtctgcctcggactttgaacttgtctgtctctatgctaccattactctgtttaaatgaccctggttttattgtatgttttgctttgtggtagagcaagctttgacagcccaaacattctctctcaaaaatatcatttcgattctagtgtatttactcctccagatgaactttagaataagcttgttgagtttcatttgaaaaatgggttttgactggaatacactaaacttgttgattaatttggggagataattttgcctagcatgcttcttattttttccagaaatttcagtggcatatttgagtgttttttattttggatatagtgagtttatagaaaggtgagaacacatctctattgtttctatgtagaagcagagtgattctgatatttatgccaacaaatttatctaggaaagtttctagttttcaattgcctgaaacaaagaatgtaattggatccagatggggaactgaaagagatactttggaattctgtacattggaattttgtctttgccatatatgaaatcggtggcctttttagaaaagtagcagattttcagtggactcagtggttagaaagatcccactcttacccaaaaaactgccacctgtggttggctatttaagctgtacttgcatattctttcagaaggccgttcttcctgctgatctcctaagtagctttatctaaatccgtctcctttgagctttatctgccttttctgaatgaaaatgtccgtgttatttcatcttcatattttctttccttgtcttcctctcctgcccatccatttctgtctaagtgggtctctctgttggtttctgtatcacccccttcttcttccatagcatctttaactgggtctttctgatgtttttctggttaccatataagagactttttttattgctgaatatcttctgagtgttaggacttctgggcatctctctttaatctccttaatgggcatgtcttattactcacatgactgttggttatcctttcactagtgtaaagcatggcatggttcttggaaggcaggcgtgatgaattacaagactgtaatgttcagggttgtattgtgttggaaagggttgcaattaaactctcataagctgtagtccttgtccacccaaccgaataaaatagtaatatgatcgttgttttgaatagatgcagattagatatccttgtgatctgtgaaaatttttgatctgtttatataatttgtttttttatttaaaaaaaatcacgaacaggtcaggtcagattctgcctgtggatagttaacagtctctttagaaaccaggaacatgactaaagcaagctgttcttccttttttaggaaatggaattttgtctaagtttcctctctcagtcatgttagacatttgttgttttttgcttttcagatctccttcctgaacttttttggaagctattgtatggtagatttttcttggcgtgttgcttttctattgattacgtttatgtgtgcacatacacacgcatgctcatatgcagaaaaagggcaattcaaaactgccaaccagtgattttttttcagaactctatactttgtatttataccatttcataatttccgataactgtgtgtgtgatacattttaaaccactagaaaagcatagttgtttgtttattgtaaaaaactgagattaaataaccatgtgactactagaaaaccctacaccgattttgtttttgatcctgattggcttaactcttagtgtcctgtgaaatatcttgctaatatttgtcagaggcaaattgatgttaaggagtctgtgtaggcttttatctgttcactttctcctctatcatagggtaaggatatcttggcgagcaggtttgtttttgttggacaagcacacaaaagcccagatgcttctccacgcagggcmgagctctggaagccctccaaagtgggcgaccctttccacctccaggtttccatttccccgccactcccacaggctgggcagaatgcgctctctctctggaggccccactttgtattgctttttgtgttttcggtagggagtagcacaaatccttcaaagcctctggggtctggagatgacctggcagtccctaccatagctgctgttcccctgggtgcaacacggctgctgtagcccctccgcaaagcctcaggatgatgaaatacccgagagccccagcctgctgccccacttcctttgacattagtcctcagaggatgcctcggtgacctgaggtggcagctcctctccttgggaccaaggcactttgcagggctttgtgccaaccagaagctcttaagagaaagtgtgaggaaagagcacttggaaacccctcagagaagagaaatagcaaatggaaatagcatagcaagggggagggagtagtcctatttatttggcaatgtttgtaaatatttaagattcttacagctgactatggtctagcacagggtgaggccagagctaagaataattatcatgaacttttgtactaataatggaattttggatacaggataaaaattaactcaagccatgatgttcagctggtagaaattcagagtagaagactgctgggtgtggtggcacatccttgtagccccagctaccagggaggctgaagtgggaggattgcttgcgcagaggagtttaagaccagcctgggcaacatagtgagaccctgtctctaaaaataatttttgaaaagcaaacggcaacgaagtaccacactcctacatctagtacattttaaagaaagaaaaaattctttcctgtgccctgaasttctttaactttaaaaacagaacaaaccagctctgatacccatacctaaatacatcaggaagcatcttccctaatgtcaaatgygttgttgttggaaggaagcactcatgctatttgaactcaaccacatgaagtgaacataacaaatgacactgttatggacccaggtcctttgtattgtgctttcttagagccaggacaaggaagtctgacaatgccccgacttattcctttttcaggggcagatgatgatctatgcgaagtttgacaaaaatgtgtatcttcctgaagatgctgagttttactttacttatgacggatctcatcagcgacatgtcatgattgcagagcgcatcgaggataacgttctccagtccagcgtcccaggtgaggtgtcctctttgttgtgcagctgggaaattagtctgcaaataacttccctccagggctgtaggccaggaagagagccaggaagaaaaagaaaacagtgctgcaaggtcaggagtgtgtgcgtgcctgtgtgtgtatgtgtatattaggaagaacactcacatctgagattcttccagttgtatctgctgcttaattaggagtcttaacttagaccaggcagacccatcctattgactgcacccaacttttatggttgggtgtgctttgcatgcagtcaactggaggaaacactgtctattgagtatcacctcctaatcacctcctataacctcagactcattgccagggttggctcaggcagaactgacattgacaaagtttgtcttctctcttcctcattcttctgtaagcagcctggcagccatgggtctgcctctcctctgcttgctccstttggtcactggggttctttccttgatgccctgtccatccagaatcttccttgggggatctccagctccagaactttctctccccatcatcaaaatgcttacatttggaaacctgtaatttcccctgttgtcttcttgatagatgacaaattaatatatcctgttcacatattgtgacgagctaatagcccttctcaatatagttgttttatatttttattggtatgtgggttgtgcatttaagagtcatcaggctttaacctaatggtggaattaaaatgtcattacctacaggacagggagggcattttagaattcttttttattgattggttggtttttcttaactgtgggtctttcaggcccttttaatttgtatcataaagagactctttaatttttattagagttaagattgagatcatttttaaaggagcttgtccctacmtgcttctgtaacatatctgctacacgtggaaagaaggtagccagtgaacatgcaaacaacacagacacagtgagaattgtagagaagtgcagatacctcktagctctacctggtcttggtcactgaattaatctgttgtccaatttctgagaccatcggcaattttaagcacttctgtctttagtccagtaatctgcatcgttaaaagaaagaaaagacagtcaaaccgaattaatgggccagtcatggtggctcatgcctgtaatcccagcactacgggaggccgaggtaggaggatcacctgaggtcgggagtttgagaccagcctggccaacgtggggaaaccccatctctattacaaatataaaaattagctgggcatggtggccggtgcctttagtcccagctacttgggaagctgaggctggagaatcacttgaacctgggagacagaggttgcagtgagctgagatcatgtcactgcactccagcctgggagacagagcgagactcygtctcaaaacgaaaacaaaaaccaaaacaaatctaattaacggcacatagttacttcagctgttggttgctttccctctgcccttttgctctggctaatgttttccctacctttcgttttgctcccttttcttggttttctcctttatcaagcccttatagagaaaggataaaaaataataactaaagtgccactcctattttcaaaactttttatctttttctttacttgcatgtggtggcgactctcctcctccttccttaggaggaaggtaatataatcttttgtttatattgtggtctacttaaaagtgaggtttcttatcttcattttaacagaatctagaggcaggtgacagtttctatttctgaaccttgaatttccctggtgacagcttttaccaggacaacctttcaaaatctgtaagacagatttatttaatatttcctgggtatgtgtagtctggtgggaggtgggtgcattctgtgcccgtaccatgagaccacttttaagagtcgatgacaaagtgacactagttctctttcagtaaacttgggatagtcttgttccttggagccctagctgcaaagcctctgggaaaagtctttggtgaataaggcagaggaggaatgattgtacctgttagccatttgactgggggcaacagggtgctatgaaccagtggtagctgaataactcttctctgtccagtcatgattatcatgatcatagtgatttgctgccaccaattcctgaaaaatctgccaagggcrgcataaaaatgtacctgggtaagagcttcccagctctggcaaaataagagagtggggcaaagaagaggaagagtgaagggagggacaaacagcaggatttggtgacactctcaggagaaatattgagaacacctacaagacagagacactattgtcagaagagggggcagtgagcaacaacacacacacacacatagatatgtatatatatattttcccttttgttttctcttgggtagtcttcacccaccttaactcacattcaaaggagctctatggaattagggcaaacttgtgtaattgtatggtgctatcttataaacttattgcttaaatatgtaaaaatatgtgactcaggaggaaatggcagagtggaaaagagcaaaggacttgaagacaacaaacacaaattcaggggtcagggtaggagtaaaaggttaaaggaatgctgaatagcagtgtttggtaacgataggagaacagatgctcaagtgttcagagctcgtaaaggtaagttttaaaatcaggagtaactgaaagaagatggagtcagcattagtttggcccacatgcttggcagtgtgtaagggtaatgggctggctttcctttctgctttgttctcctggagcgtgttgtctgcttaagctatgtggtggggctagcacattggacccctgtgagagcatctcctacagacttggggtgaactgttcactgtcttgttgtccaggccatgggcttcaggagacggtgacggtatctgtgtgcctctgctcggaaggttactctccggtgaccatgggctctggctcagtgacctacgtggacaacatggcttgcakgctggctcgtctgctggtgacgcaggccaatcgcctcacagccygcagccaccagaccctgctgaccccatttgccttgacggcaggagcactgcctgccttggatgaggagctcgtgctggctctgacccatctggaattgcctctagagtggactgtgttgggaagttcttcacttgaaggtgggtcatcaccagaaaattcagatatcccctctgtgtgtcaagttcagaatgtaccttatgctatactgtgtgttcccctcggcaggttttcctgcccactttttacctgaaccttgctctgatgtggaggggctccctgaggtcctgagccactcatctctgggctggtttatgtgactccgtgccaggaggtgtgggataaatggaagagccttgtctcaagtggggaaagactgtttctttatggtatgctcttgagtcagctgctctgggctgtggctccacttcccttggcaagttttcttgctgtgggaaggggacattgctgccccatttccaaataggtaggctcactggacaagaaagatcatgtcaccaactctgtgaaacacctggaagacatgtgaccacatgggaaacataaccaatgaattgacatctttgaaagtgtcagtgtcactgagagcatttgtgttacatttgtactagtttttggagttctaaagaccaaatggactctgaataccaagtatttggaatctgcgtgtgaacaaggctatagatgttatatataggcccttactagacatgaggctaaactgatcaatagatgctttttaaaaatgaaaaaataaaatctttttttgagagatggggtctcactgtgttgctcaggctgaacttgaacttctgacttcagtgatccttctgcctcagtctcccaaagtgctgggattacaggcatgagcccaygtgtccagccaatagctgctttttattggtgattacaagttatatataattttattggaaatacacaaatgttgttttgtaatttattaaatacaacatatattattgcttttttttgctatccttcctgtgaccttagctttgtagtcagatgatgctatttttgagagtttctgcttcctggtaaattctagttgtaagtttcaggttggcttaaattcgatcatggatgagattaaatgcactgctctgggtaaaggggtgtgaattttgtaaacagaattataaagccataagtcacaatccaaaaggatctctgtttctttcctttaatcagggtcacactaaaactcttctgggyacttaaagacgtctcttgtttttaagaccttggatgagggaagtcacaagtctagtccagcaccgagccatgcctgaatcctgtgtgctgtactctcctgtgtggtggctaattgatacgtatggcgtgggctccctgagggtgtgggtggtgtttgttctgcttgctattatccccaaggattcagcaaggagatatgaaatataagggggagttgcagtgatgatacttgaaaggtcttgggatacaccattcattcattcattcaacaaatactttttaaaaatgaagyattaataaaatatttttaataaagtatttaataaagtaaatgtgctgcacattttaaatttctacaatgagtcatagtagtacctgcttctttagctgatgagacagggtcatcttgctctgttgcccaggctggagcgcagtggcacaatcatagctcactgcaacctcaaattcttgggctcatgtgatcctactgcctcagattcccgggtatctaagattataggtgtatgtcacatgcctggctaattaaaatttttatttttatttttattttatttatttatttatttatttttttagagacagagtcttgctgtatttctcaggcttgtctcaaacacctggcctcaggcgagcctcccacctcagcctccccagtagctgggattataggcacctggctcaacaaatatttcttaaactcttgctatgtgctaagcccttatatacaagggaattgcaatagtaatacttgatcgtctggagatacaccctttctatctcacatatgtaagtgatagatgacatgtatgatctacattaatatagatatagtatatataaatttatatatctatgatacatattgtctatatctaaatattatatacrtataatgttttctggctaagaaacttcatcttaagcctcttggatttttaaaaagatttctaaytataatattggaaggtgtttttttgggggggtgtggatccattttgacaaagacacaaaagtttcatgatttcccatgagtaaaggaagagcatcacagcctcacgcaggggcagatgcaggttagtcccacagcccctccccaggccagcaagtctctcagcacagcagcttggtgcctgcagcggtttaatttgtgcctctgaaaaattacaaattgttgaaggtcatggaacctcataactgcacatgaatagcttaaactaagggtctccaaaatggaattcatgttacccrcatactatatttattttttatgccgatatttagaaatacattcrtactctctagtatttaatccrtggattgcaataatagaagcatacagttttccatgctgggcatgcctgctcaaagttatttttgctggtagagatacataaaaaaataagtttggagaacgcttgacaactcatgttgtcgagggccatcctattgccattttcattgctatttggggatacattcttgtttgccaggcttttagctgtcatggcctttgatttatccatatttttrtaacagacagatttatgtcaccaggaggtcctttctgacccctctgccagtatttatacatactatatgtattttcatgagagaaaaactggagtggtttcttttcatagtaaaacacttttctattctagtgtcctagttgttaagaatgtgtgctgtggaggcaggttcagatcctgaccttattacctcctggctgtgagacttgggcaaggtattttagttctggtgctgcacatttttaatttctacaatgaggcatagtagtacctgcttcattagctggttgtgatgatttaattagataatgtatggcaagacctctagaagagtatctaaacatattaagttttcagtaaaaggtgatgttggtatgtgcatgtgaataaattttcatatatagagtgtattgtatgtacttatatgtgcataggtagaaagcagatacaattggtttggacaaatgaagctgaaggcaaagtataaaatcctggcattgtaagcaattctttgaaaatttctaggaatgtttctagactttctctaaaggcagtttgtagtacttgaggtaaaactgtctgcagcctagacttgtagtgtagcttctctacaacatcaatgtcaarcgacagggttaatgctcatgtttgaagtcgaattttactctgaaggttatgaccatcttatgagatttgattcagcccaccatgtgtttaaatctctgtatctgcctgttcacacctcagttctgttatgtatgtaygtaggggctcatatatggatattggctaagtttagattggtaggtcttaacagatgtatttatcagtacatttctgtcaaaattattccacgttaaaaaaaacaaattgggcatttagatgaatagattsaaatataaattcttctgtgtcagttttaattttgtactttagaaattgtattagatacwaggtagaaggaaaacgtggagtttttattgtatttactgaatcaagtagttggacataagttaatcattttatagttgggaataaacaagagtatttggtgaaggactaacattaatgccctagattaactggattatattagatttttacaatgcacatgtatactctatggatgtattttgactcattgcctattcataaccatttggtggggttccactaatcttgagctgttttggatttgttttttgttgtatttttaatttaatagagttttaatctaagcagtttaaaacctcttatgtgcttatasgtcttttttagtatacatattttatttgtgttgcttgtcttcaggtagataaattataataatgatgtgaaaaataaactgtgccatcggacccactggacattataatgtattagtggcagtggcatcacaggtggaaaacaatttctttcctagtaatttttcttccagtacttgtccaaaaattattttaatgctcagtgttcacttttattaaaatttttttgtgattatttatttatgatttcttcaaatataaatagatcttaccgaaggagtattcattgatttctgtaatgactttgtcttggaagagtgatcaaaaccctgctgtgacacattactgtattctttgcattttataatgaacttctcatttttttcccttgtcaatcattgagagttattaggaaggactgggaatctggaaaaaggccagagtctgagtagagcatggatcttgtaacaaaaagcagagccttctttcagccctgtatcttacccgtcattagtcacaatgcaacttcattatgtgtttgaggaaaggaaatatcccagattttatttaattttagaccataaataaaattggatttctagttcataaaattaagaccattccttttatgaaatagcattcataatagtgccttgtgcagggtctcagaagcccaaatttggagtaaagcattgaatagtaatataattattcaacagaatctcacaatttatttttatttttttgttttgggtttcttgcttgtttgttttttgagcagaaatcttttctcagagatttgtataattttgacaattaggttaactgggataacacattctaatgttttatgtgttgatgctcrgatgactttggagttgaaagccccctcgaccttcctgctccatcaaactacctccctccacttgtgttcccagtagcttgayatggctggcaagcaccaagcttgccaacaccagtgaggggctgccatgtgggtaaagaacccaagggtactacaaatggtatctccaaagacagatggcatcgttcctgtgaacacagtagcttctctcctaacctatggagtaggtcgagcttgtcctggttaggwtttctaatttaagagaaaaataaagcccagttccttaaaaaaacaaagaggtcatataaagaatatttctcacatrtgtttacacttacaaactaatatataacaatttggaagactcaagatattttttgccagagtaaattactattgttttcaaaaacgaacttggactcttccagttgkctaggtaaaagtagttcatgtgatcaaaggtctcctaacaggcagaagttcttctgctcattatggaacaggtgcattctttgttatatccatcataaaaacataaccaaacctgtttattttttatttttattttttttttgagacgaagtctcactctgttgcccaggctggagtgcagtgggatgatattggttcactgtgacctctgcctcccggattcaaatgattctcctgcctcagcctcctgagtagctgggattacaggtgtgtgctaccacgcctggcttatttttgtatttttagagatggggtttcactatgttggccagtctggtctcgaactcctgacctcaagtgattcacccacctcggcctcgcaaagtgccaaacctggttttgtaaaggtactagcatgaaytgaatctgcagggcaaaaatattaaagtgtttaacaaaacaaagtattacctggcagattgcttcgtcaggtttaaagagttaagcttttctcctgcctttgtgattggttctatgagtgaaagaaaattttaaggtaacccaattgaacttttggaactcttctataggaatgttttggacttcaacacagctgatgtatttagaggatccagcttctcattctgtgggtccatggttggttggagagctgtccccaaagaaaaccaattggtggaactrgcaggacccactgagggtggcttagagaattgaatattttccaaaagtcagattaagagtacactccttaacttgcaaataacaccaatagagttataacaaccacaacagatttaaacttgaatccagaaattagagaaatgatttgttagtttcaaggacaaatccaagtacaagtcacagcataatgagtagtaagttaaaggaaatatagaaaaccttgtcatggcccacacatgtaatgtataggtaaagtaatgtgatgctcttactatggagaagggtcgttagtataacgctctgctcttgcctgaatagggtcttcataaattagttccttttgaaggagaatgtttgtttttctatgctttacacataatggaaagaaaaggaaaagaaatacagaggcccgaaaggactttagaagacgtttataagagttagggttatctagcagttctttttttcccctaaatttattattatttttaattcaatagctttttggggaacagtagatgtttggtccagcagttcttaaaatgtgtcttgattgttcggtgttcacttaagtttaaaaagcagttttaatattgcttcttatctgcaggaaaagccattacrtaggaattaacagttcattacaaaagagtggatgggaactactcattttatgtgacagccacatcttgcttcaagccacataccctgaaacttctaggcaacaagagaagggaatatgtggcctagcaatgtttgacagagaaaaatatctgtttctctttctttgaatacagaaaagagatctgtagccagtaggaagcaagatttgtttaatgtttgaaatggagcgtggcttgtgkttttatctttgaatactgtctgctggctgtagatatagaaagaaaatagagcaaggccccagagcctggcactgtgggttggcctgatgactgcactgtgtccaggtcttactaaccagagaagggcaaactgatttataagacttacttgctggcccacagatgaagtaaaatgtcagctttgttactctgccataaagctctgtactggacagcaagtttgaaataacattagctgaaacaccagtgggtaggaaacccataaaggacagatttattacaaaatacaagaaatacaagtttccagtgtttttttttttttaagttttgaaatcaatacattatgggtaacaactgattcaggggttttgtatgtttctcttggaaatcttgacatttttcaaggggttgtgtacacactcagtattgctgtctagccttctgtcaattctgatagtatctaatgggacaaacatctctacaccttttctgacatttcaagctggtagtatactccttctgttgctaaggcaacccactggatgaacactaggggtggagagaatgttctttagatcctatggcacttgttatgatggtaaatcgataaaattgttttacrgttctcagctatatatatgtatattatttgtgaagctttaaatccttaattttaaaatgtcttctttgtcttacattccttttgtagtttttaatttttgaggaatatgttttctggcagtaaagaatttaatatagaattaaacttctaaggaaaaggactcctctccccccaatcatttgaattcatttttcagtttaagtaggtaaactcttattgaacacattctctgtttaaggtactacatgttaaataagaaacagcagcttaactcttccttaaaaaataagcttcctacttttgtctggcaacaatggcccttatactggaatagagaattacgcacttactcycacttctgggaaatagaacgtagagttggattccggtcrctctctctccctcaattataattttcaagaacaaaaaatgtaaatggaagcaaacagcctacccaatgtgcttcccaaaggattcgggactgtagaaggtttttgaagtcccattcctggcttacctcctctggggcttttctccccttaaaacgtagcaggatgcatatagcagtttttgcttgcacgcagaggattaaagctgaatttaaaaaatgacagtaaccaaggaatatcttcataaccttgaaggagaaagttaaaattttgctattctcatagatttcttaatgggatttgaatgctggcagttgtccttgtactattttatctacaaaccaaatgaaatattggtttgtagataaaacattggttttaaaactaccaatgtttggaggttaaaatccccacgattgaaaaagttgggtaggagagatctggggaggagagtgaggcagggagccagaagagatggtacattcttagggaaatgaataattgtgcgtcctgttccaaagtccccctttacttggcccagtgttgtttaagaggccttgtcttgactctctcaaatataagccttggtgtggggatgaagctgtatggatagaaacctcaaaaaatcttctgtaatcctaccctaggtccccatatacctactgtccttttccacacctataactgtagttgcttttattttgcaagtttgacatgagaatgtatgtgtactgtgagtggcgacacatcaggtcaatatctggaggagaggagaagcatgagtgacggatgtgagcctgggtccttagaatttgctcagctcaagttccttctgcttatttttccctcactctcaatttgttgattttttttaagatggggtgtcgctgtattgcccaggctggtctcagacttctgggctcaagtgattctctttcctcatcctccctagtaactgggactataggtgtgtgccaccacaactgggtaatttttttttttttttttagagatgaaggtcttgctatatttctcaggctggtctccaactcctgggctcaaacgatcctcctacctcagcctctgagtagctgggactacaggaatgagccaccacacctggctggttctatctttccttgccctctttaaaaaaatctattttgaggctgagtgtggtggctcacacctgtaatcccagcactttgggaggctgaggtgggtggatcacttgaggtcaggagttcaagaccagactgaccaatatggtgaaaccgtgtctttactaaaaatacaaaaattagccaggcgtggtggtgcatgcctgtaatcccagctacttgggaggctgaggcaggagaattgcatgaacccaggagatggaggttgcagtgagccaagatcacaccactgcactccaacctgggtgacaaagcaagactccctctcaaaaaaaaaaaaaaamaaaacaaaacaacaacaacaaaatctattttgagctttttattcttgtataaatttttcttcactactcccatcttcccatctgcagtttataataggagatacaggtatataagtattacatgagtcaattcctgatttttaaaaagtagtccccaattcttgtagtatatgactctcctatgtttcttgtcaacacatttaatttttatagtcttgatttttttttgttgttggctttaatgtatttttccttgacaagtacatgagatatatcactgcagttggggccaattcaagccatcctttgtataatgagaggcataatagttaagaacttgagttttggaggtggaaaaatctaggttcaaatccttcatgttccatatactacttaagtgagcctaagcaattgcataattatgtcaaggcttagtttctgcccctataaaataaggatagtaatagtacatacatcatagaatggctgtcaggattaaatgagataacgcatataaagtgctgaataaaggttagctctttatagaaacaagaaaggtaaaatccttatcatagtcactgacactgagtaagaatgaaagaagaaatgttggtgtggtggttcatttctttttttcattcatggataatcgttgtccatctgtattcctggttgacttttttccaacctccccttcctccctccagatatggcagcatcttttatactgatttccggtttggtttatcccatttaccttcctcttctagtctcaccagaatatcccttgttgattgtgccttacaggtgaaggaaaggatgaaatcatccattgaagctgtagctcatacccaaagagtgtaatatttctaatatttctcaatccgggactttggacacaagacactggcttccagtgcaagggcactsaatggaccctgcctggctgtaggcgaatggccagtttcctggttgtctttgaaggcagacttccaatgcagacttcaaagggccatctgcgaggcatgatgagtccacactttttctgcttgtcaataataaaattagactgcaatgtattttcatttgtctcccaaacagaacagggtccctggagagtcaagtgggagggcgtctgagaattctagctcatctggggtrtaaggggagatcttgcagaagagtgcctgcacacagttggctatcagcaaatatctgttgagtgaaatgaatggtggacttgaatcatagccttgaagcaacattaacaaatgaaagaaaaatcgataaaggctggaaaggaggaggtatgccataattgctacttacaacacctaatgaccgcctgctgcccaaagcatgggattacagcacatttgtcttaatagcacatctgatgcaattacagtgcacggtaagcaggcagctagttccttacaattatgcctttaaattgtgaccacaggaaaattgttttcagacataccacatatctatttagtgactgtttattgtagtttttttgtattaaaaagatcagacaaatgtgtaaaactgcttagtccccccaatactggcttttatagttcttgacagccctgtcccatttgttattttcattacagccccctggcaatcccaggtagtaggcygggcagttatcatgtccgttttacagatcaagcaacttgaaacttgagaattaaatggctttccatttcattctagctgttagctggaggcttgctatgtgttcaaatccagagctttgaatccttggtctccccatctttgyaccatacagtgttgtatctggattcttaatatcttatactggtggctatatgcataatttagtttggaaatatcctcagaatgtgaaggtcaaaaattgagttgccatcttgaaattctgatgaagactttttaaagttgcaactgatttagtattygttccacaagctaaaataaagtatatcttgccaatatgagatgcaaaatccaggaagtacattccagtgttatacagcactatgtgaattttctggaatgaatgtgtgtgtgatgggtgttttcccaaattattttcaggtgattttcagccggaggtggttgtaatatgagtgtctcgactgtgctgaagcagaaaacaagttttagggaggaaaaacctgccattatgcttgtttcagtcctcctcctctaccttttgggcttatgatccagccatgccaaccatgttggtcttgcgctctgtggaatgtcctgatttcatgtctttcttatgagtgtgtttgtatttgcagttcctatcctggactcaccaacctcagatctcctgtttacaaaaggctgatttgtttatctacatgccagagctctgagtaggctgtgtaaatggaagatgctctaaggcacaacccttttctcattcttattgagaatcctgaaaacatcttaaagattgtgtatgatacccatgccaaattctctcttctactctctatgtaaatttttaataatttttttcattgtactttttgttcatcatttttggcattttataaatatctgtaaattttcatatcatgatacatgatgtaggttgaattaatttaacatgcagatttgttttcttgtagtccagacagtttccttacttctattcacattctttgtgtctagaactacaracaatgaagtaagcctagagctgtagttcatcacatagtgatttcatgggccagatatttatagacagtccctgatttatgatggtttgatttatgattttgattttatcattgtgtgaaatgtgatggtgtgaaagcaatatacattcagtagaaagtgtacttcaaattttgaattttgaccttttcctgggctaggccatatgcagtatgatactcttgtgatgctggacagtaacggtgagccacggctcccagtcagccagccacacaatcacaagagtaatcagtcaatactccacagtgcattgtgtggccagtggtttttggatattgtgttttgtgtttggccatcccatcatatctacaaaacacctattttcaacttacactattttctacttatgactggtttattgagatataattccatcgtaagtcaaagagtatctgtattttattctgaacaaaagtaagctagctgtatgcttctcaagggcagggaccaccacactcatctttgtatccacagggcctggcagataataatggtctcattcaatgtttgtctactgaatgacttagatgaacaaattgagacctgcatgaatacatatgtggctttggaaatcagaataaaacttattttaatgagttgaatttaatgtgaatcaaaaaaaaattagtcttctaaaaacrtattgtgggctgggcgcggtggctcacgcctgtaatcccagcactttgggaggccgaggtgggcggatcacaaggtcaggagatcgagaccatcttggctaacatggtgaaaccccgtctctactaaaaatacaaaaaattagccaggcgcagtggcgggtgcctgtagtcccagctactcgggagcctgaggcaggagaatggcgtgaacctgggaggtggagcttgcagtgagctgagactgtgtgccactgcaatccggcctgggctaaagagcaggactccatctcaaaaaaaaaaaaacaaaaaacaaaaaacaaaacaaaacaaaacaaaaacgtattgtgttgcatacatttcaatggctccactcaggtgttgtgaaacattacttagccctaaaaaatataagtacttctgaattaacttgtattgaaaaatattatttgcttttagattatggtatccatcacatttttgctttaatattttgctaaatgtttaagctctttcctggtttagcagtaagtaatgtaggttaaaaataacttgtaaaactcacagaaaactctttttgttgttctttggtaaaatcttatacctaatagatcttaattaagagctgactgggtaggctgtgttataaaaggaagatataggtttgtattttgctaaccacttattaatttaaattagcagatcccaactctggctttgcattggaatcacttgagaatatttggaaaagtgtgatgacttggccctgccccagaagttctgatttaatttttctggagagggccttaaacatcagtcttattaaaaaataataaaataagttaaataattaaccaaggtctccagaactcacaatcactgctagaggcaatgtaagttattacmaccatttttggaaaacacagcagcattatctaatacatttagagaaactaatatctcatagcaaatctgttccatagcaattccattcctacctataaaccctagcaagaaaacatgctgatatggtttggctgtgtccccacccaaatctcaccttgaattgtaactcccacaattcmtacatgtcatgagagaaactggtgtgaggtgattgaattatyggggtgggtctttcctgtactatactcatgatagtgaatgagtctcatgagatctgatggtttttaaaatrggagtttccctgcacaagctctctctcttgccgccaccatgtaagaagtgccttttgccttctgctgtgattgtgaggcctccctagccacatggaattgtaagtccattaaaccactttcttttgtaaattgcccagtctcaggtatgtctttatcagcagcatgaaaatggattaatasagtaaattggtaccactagagtggggtgctgctgaacagatacctgaaaatgtggaagcaactttggaactgggtaacaggcaggggttggaacaatttggagggctcagaagaagacaggaaaatgtgcaaaagtttggaacttcctagagacttgttgaatggctttgcccaaaatgattatagcaatatggacaataaattccaggctgaggtagtctcygatggaaatgaggaacttgttgagaactggagcgaaggttacgttttagcaaagagactgacagcattttgctcctgtgctagagattcgtggaattttgaacttgagagccatgatttagggcatctggcggaagaaatttctaagcagcaaagccttcaagaagtgacttgggtgctgttaaaggcattcagttttataagggaagcagagcataaaagtttggaaaatttttggcctgacaatgcaatagaaaagaaaatcccattttctgaggagaaattcaagctggctgcagaaatttgtataagtaatgaagaactgaatattaatccccaagacaatggggaaaatgtctccagggcatgtcagagggcttcatgggagcccctcccattayaggcccagaggcctaggaggaaatggtttcatgggctgggcccagggtccccatgttgtgcagcctagggacttggtgcytggcatcccagctgctccagccgtagctgaaaggaaccaacacagaactcgggccatggcttctgaggstgcaaacctcaagccttggcagcctccacatggtgttgaacctgcaagtgcacagaagtcaagaattgaggtttgggaacctagatttcaaagaatgtatggaaatgcctgtatgtccatggcaaaagtttgctgcaggggtggggctttcatggaggacctctgctagggtagtgtggatgggaaatgtgaggtgggaccccccacacagagttcctactgggacactgcctagtggagctgtgagaagagggccacaatcttccagaccccagaatggtagatccactgacagcttgcgctgtgtgcctggaaaagccacagacactcaatatcagcccatgaaagcagctgggagggaggctttaccctgcaaagccacaggggcagagctgcccaagaccatgggaaaccacctcttgcatcagtgtgacctggatatgagacatggagtcaaaggagatcatttttggagctttaagatttgactgctccactgaatttcagacttgcgtagggcctgtagcctctttgttttggccaatttttcccatttggagtgagtgtatttacccaatgcctgtaaccccattgtatctaggaagtaactagcttgcttttgattttacaggctcataggcagaaggggcttgccttgtctcagatgagacttttgactgtggacttttgagttaatgctgaaatgagttaagactttgagggaccattgggaaggcatgattgggtttaaaatgtaatttgggaggggccaggggaagaatgatatgatttggctgtgtcctcacccaaatctcatcttgaattataactcccacaattcccatgtatcatgggaggaacctggtaagaggtgattgaattatggggatgggtctttcctgcactgttctcatgatagtgaatgaggctcacgagatctgatagttttcaagatgggagtttccctgcacaagctccctcttgccgctgccatgtaagaagtgccttttgccttccaccatgattgtgaggcctccctagccatatggaactgtaagtccattaaacctctttcttttgtaaattgcccagtctcaggtatgtctttatcagcagcatgaaaatggactaatacacacacaaatatcagaaaaaatattttaccctgtgtctgtatgtgtatatatatatgtgtgtgtgtgagagagagaggcagagggagacagagacagaaaaacagagagatacactcataccaatggacctcaggagtgcaaatacccctcctcctttcctagtcacattcttctctttttcctaacaggtattgtgctgacttttatagtagccatttccttgcttttctttacagtgttacaacgtatgtatatatgcctaagtaataattttaacttttactcttcttgaacttcatattaattgaaacatatcctgtgtattttgtgacttgatttttcccttttgwcattatattcattacttccttctgtgttaatctgtaattcattttgattgttagaatattgttgtatgattgcactgcaatttattccattgatgaacattaagattactttgaattttgaccatttatattttttgcatggtttcttgctagggtttataggtaggaatggaattgttgtggactggatttgcgttagtttctctgactttattagataatgttgctgtgttttccaaaggggttgtaacagtttacatttcctctagcagtgattgtgagttctggagaccttggttaattatttaacctattttattattttttaatagacattttaagaacaggtttaggttcatggcaaaattgagtggaagatacagatatttcccatatattccctgcccctacacatgcacagcctcccctattatcaatacgccccacagagtggcacatttggttatgatcgattagcctacatttgagaggttaatttattctttaatcttccaagctaagcctttggctaattgaaaggtatggccagatcttgtgtggatatggtaatggttctaaattgaccagtaacaaaaccactttcctttagtaacacttaaactgtctgaccttccttgcccttgtgcttcagatgcctggaagctttgacctgtgctgtttttgcagatagtaaccatagagttaggacaggattgaatactcttaggaaccttggatctttattgtgacagactcatttcatgggcaaagaaactgatgcccggcagagtgagaagcacaaactcyacactcccttcctatctggggcagwtggactcctgttatgcagtaaggaatggcttattgaatggcacagcctgttcagttcctttttgtgtcttggttttcatgctctcatgatgttataggtcgtaccttttaatgtttgccattacagcaattattagtaattctgcattggttacattagttcaaataactcctggcaccaaccaaacaggaagagacatttatttagtttaagaaattattttaaacactcccacctctgccaaattgtataacctctttccacagtttgttttgctggctgccgttaagaaatctgaaactctataacaggcagaattatttatatatgtcatgatgcttcctatttcaagctgtttgcctcgctctgcactctgaactttcatactgaatgagaaagctctctcttacaacattttggtcagtttttatttgttttctttaaacatcagaagattctctcttcccctgccttacctcctccccgggaagtgggtagattctcagaaagagaggcaacagtgagccattcaggcctgcatgtttactgttctctctcattgaacaagatgtgaggatggagccagaaggagagaagagggagctggattagcagaacaagcttggagagctctcstggtagaggaaacagatctgcccacactcacactgttggtcaggttgaatacagtgaaatacactccaggttcaatggtatttagggcattgcaccagacatggcagaaagtgttacttaaattgataccatgctttcctttaccaatggtataatttgaaaagggaacacaaaaggtttagatgttcccttttgatcatttttttgggaggggaaagaaaattacaatccatacaactatggaatatttctcactatattcagattaggagatatgtcttagaaattccatccgggctgggtgcggtggctcatgcctrtaatcccagcactttgggaggccaaggcgagtggatcacctgagrtcaggagttcaagaccagactggcatggccaacatggtgaaaacctgtgtctactaaaaatacaaaaattagctgggggtgatggcgcgcacctgtaatcctagctactcaggaggctgaggcaggagaatcacttgaaactgggaggcagaggttgcagtgagccaagattgcaccaccgcactccagcctgggcaacagagtgagactccatctcaaaaaaaaaaaaggagagaaattccatcttagtatgcctggttaatatctcatgctgacaggttttcctgtgttggggagtacacatgcacatatgtgtgcatatgtatatttgttacctgatcttaacaagtctattcctggttattatttaaaaaggaagaaaaatacaaatattatccaacattttagataccctgctgggaatctaaaaacaaaaacctcactttttattcaaaggagtataatggtcaaaagttaaaggataaaatagtcaaagataagttctctaatagctaacatagttttttaattttcataaagctgaagatatcaagtatattaaacaaatgtctggcaggagtgtattgccttgtctgtttttagatattttggtattttgaatgttattttactgaggggaagtgttccatgtcacacagatgattgatagagtaaatatactggtaagttggtggcatttcactgtgatgagttcatttacatattttaagtataatgccttacattcattgatctagctatctatatmtctatagatatagatatataaataattaaaaatgtaaactaagccttttatttgcattcatttatggtggagtgtttccttctaattgtttcaaattagagctttgtagaaacctggcttcccaagtatcatcattaccacagcctgcaggtaggacaaagctgagtttattgcctactatggtatgggagaacaccacctccacagggccttagaggtgtcttgaagggggagctgtgaggtgaggtgagaatttattgagaacttgaagtttggcttaatgagggtcttttttttgagacagggcctcactttgtggcccaggttggcrtgcagtggtgcaatctccactcactgcaacctctgcctcctgggctcaagcgatcctcccacctcagcctgctgattagctgggaccacaggcgagtgccaccatgcctgtttaatttttgtattttttgtggacagtgggttttaccacattcaccaggctggtcttgagctcctgggctcaagtgatcctcccgcgttggcctcccaaagtgctgggattaaggcattagccaccacgcctggccttataagggtttttaatgttggggatggtggtgggtggggcatgttggacaggaaaggagcttgatcaggactcgggaaggatcataatgtagttargattgcttttagggttcaaactgccttttattggtttctactgaacagttggttagtcttgtggaaggttcctataatgagcaatcattcatttgcctgggcaagtggctcctggaatagtaaaattgtgctaatgaagataatggaatagtaagatagcgttaatatggacaggaaactgtggagaagtaggtcattttgttctcagtgtccattttacagtgaacaattcagtgtacagactattcaaactaagtaatttaaatacacacaaaccgtagagattttracagccaattgtcattcaactcctcaaatgctaaatggctttcatttgccagatactgtgctaggtattaggaataaaatacctcaaggacccctcckcctggaagatgacaacagagagyggcaaacaccacagtggagctgatgcacacggaccgaccaagggccctctgtgcaggggccttacaggtcgagcctcctgagcagagcaayggggtggctttggcaatattgacataatctcagggatttagtagatgggtagaagcactgctgtgaagtttgagaatgacccatatgaagccatttctcttgcggcttcttatcaggggaggagcrgctctgaggacaaagggtggaaacggaagtccctctacagtctcagcctctaaaagcctccctgcctgagcagcaggatctcctcaaggaactctttgcatatcaacaagtgtctgtttccaaaggatggtcctttcctagaacctgcttccctagatgactgcactgcatgtctagtgaaagatgacgtgaatgtgtagtgcaatgggtggaaagaacactctacctgtgctcagcggacctggccccagcacctactgcctacctgggcattcacaaaaatcttgaactctccaaatttgtaaaatgagatacagtgattgggtgccattgttaatttcttccaactctgayrttcttattatgtctaaatacactgtccctttgataaaatgtgtaaaacaaactttgtaaatggaggaactaatatggtatgtgttttttcctcttcagtatcttctcacagagaatctcttctacacctggctatgagatggggcctggctaaactttcccagttcttcttgtgtctcccggggggagtccaggccttggctttacccaacgaagagggtgccacaccattagacttagctttacgtgaaggacactccaagctggtrgaagacgtcacaaagtgagtttagctacttgatagtctctctcttatttgtataaagtcggccaagcattatagaaaaatggaaataaccaaaccacaagctaatgttggtttatgttttactgttagctctcatgcatatatatagatcatataaacagatatactgggataattggtattratgtttcatgagggtgagataggaaaaaaggtctcaaaaggctctgaaaggagtgataatgaaaaaaaattggggaaacactagcatttagatttcagcttaaatgtcaaccccttctgtgttattctctttgatgattatgattaattcagaatgttaaataagagtaacattatgactaattcacaatattataattatatgtgtggtcatttgtttcatatatatctcttaatcatttgaggtctgggactatttctgttttacccattgcaatgctctagtacaatgtccagcacataatatttgttgaaaggatataaatctttttttgaatcaatgaataacagacaaatgctatggtatgatttagtcaatttggtggtcattatggtctaatgaaataatgtaaaggaaataatttgtaaactataatgttctctgtgttaatgagggtatcaacacttccagtgaataatgagtgtattgttggttacttagaaaggttcaggtcagccattattcttagcttatgaaagaaggattcatatatagtgatttttttgacttaacgtggtaaaaaaccaaagtataaatgggaaagtatgttgaaaattacaacatgctacataaatattaaccattgttagagtaaatgctacataaatattaaatattattagagtattattatgtggcatgttcaaatggactggcttttcttgtttggctcatggaactcaatgtaattaatttatagttatgtagtacataagtggacattagagtagaaatcagagcttttggtttatttttgtttctcatttgatcaaatgaccatcagccaaggggcaagcctatctggagggaattgtccttttccttgttttaacatgaccccacttccttggctaaaaagggcaaggcaagaacacttcctttgactcattcatcgtgaacaattctgtgttctactgaggtcctagaggcacacttcrtctgttggtagctttgyatctttttactgtgtccaagacgagaagatacgtgttttaaatgtttccaggtctaataaatccattcatggatgggattagaagtagagtgtaagctaaattctggtgatatgatgatagagcttccatattctaaattaacaacagtgaccttattgctcaggttcagagaccattcatctcagtggcttgttattggcatggggagttgttttctggaaacttctggagtccttgccagtaatgagtgtcaagagtttggagaggtcccccaagacttagagtaaaactgttctttaaggatctctttttgtcactccatctgatggagataacatttccttcattggaaatatactatatttttgtaaagcaaacattcattaacaaaattaggtcatgttaaaagaggaaaggggcatagagctagttctgtgaattgaggaatctgggaacaatctggtgggatgtgacatgctgaggtatgctgtaacccaagaayattaatatttccccttgaggtttctttactgttactattacaggaccttataagccatccagaatattgcgatactaaccatgaagcctgmatgtaatttacaaatgtacaaatgttctcagccaagatataacagaaaataagtgtatattcaagtcttgaatatacatgactctccaaaaaacacataatttgaatcaacacaacatttaggttggaaatgtcgttcctttgtgtgtgagtgtgttcagaaatacaacatgatcaaatttgtgcatgttttaatttgcataagaaagaatttacaacagtggtaccatgtgttatgaatatctcacttatttatgacatccaaacctcaccatgttccctggagatcatatctgttttccacagtaatcrcctaataaaccactggctgccagctaatttgttctactacaggtagccccattaaagtgagaggcatcttttcagattaaaaggagaatgaaatgttgaggtaaagtactatgtttaaaattcagtactgtttcattctttatgtaaacctttaaagtatgtagtatatgtcaatggtttccaatagacttcttctctaggtggaaaaagaaagatggctttattagtatctgtttttatgatcttatgtatttattgcacgtaggtgactttcaaggatcattttgccagttggatttgtaagatcaggggcagtgatcctaagggctgggatcctggggctggtgtctttgaagctctgtgtgggttttgatttgtgttgtttcagttttcagggcagayggtccccaagcttctcccgagtgcagctcagtgaagaagcctccttgcattacattcactcatcggaaacgctgaccctgaccctgaaccacacagccgagcatttgttggaggcagatattaaactcttccggaaatacttttgggatmgagcctttcttgtcaaggtttgtacatagtgattctagcatgtgataatgcatgcttcagagaatgcaggcatcaatttcttattatgagaacagtgttttttgggggtaggactttttttaatgaaaccttgggggacatgaaattggaaactgcattagatcagtagaatgaagattattatatattttataggagtttgtataatattttcattttcttttctgagccagtcttttccatagttgggttttaatactttaatattggatattttcattaatttattgattgtattataattattatctaaagcagttacatttagggctatcttacatgtataatatctacttctggattatcatattgctcaaatgtagttaagcatttgttccagtgcagaatccagtacagaatccagtacagattctgcttgaatggaaacaggtaaaatcctagttcttttccaaagaggttttcaccttcccatcatggtccaaaccccacctttgggtgctatcatagcatgccagtctcagggtttaaaacatttcaactttatctctcyttttttttttggtagactttgaaagaatattaagaatatttccatcttttaattatgattaatcaaggtgttattttgagtaaggcttgaataaggcttgagtcaatctagttggcagtgctccrgggtctattgaacacactaaccagatcctatggcctcctgtgttctcaagcacattccttcacaagacacaggtctcgtgactatttaggctttacagagtaaaaagtcagcttagaaaaccaatattatcattggccacagtttcagcttttgtagaatatttgcttcacataattgaaataatgagttagccaaaaacattatgtatcaaacaaagattatyattggcttactccatatagagttttatttaatcagttaaaataaaacatggtcttcagagtatgatctttctctctttgctgggttttagggaatttggtgtgtaattttctgacatacagcatcacatccagtatatacagaatgagggtcttcttttaaggatgcttgtcatttaaaactgctcaagcyggctgggcgtggtggctcacacctgtaatcctggcactttggcactttgggtagccgaggtgggtggatcatgaggtcaggagatcgagaccatcctggccaacatggtgaaacatcgtctctactaaaaatacaaaaattagctgggcgcagtggcatgcgcctgtagtcctagctacttgggaggctgaggcaggagaattgcttgaacccgggaggcggaggttgcggtgagccgagatcgcaccactgcgctccagcctggtgacagagcgagactccgtctaaaaaaaaaaaaaaaaatgctactcaagccttcagccatcactgtggtttctcaccaaagcaccaagtggtggttattctggctgggcagacgcttggttttgccagcatcagttccatgggggcagagctcagccaagtgcttttcctcagaagagatgctcagacagcggcatggcacttggtgactatcctgaaaagaacagaacaaactctattgaacatttgcttcattataaaatcttctaaagtcttaggctagatttgtgatttctcatatacatttgagataatactgatgaccttggggaagatttatgatgagtaaatctagatacctcaataatttattggagtggactttataatcacaaaggccaaatggagatggctctccagtttctatgagattttcatcttatgaaaaacacttgatacaagaatcagttagagtggaatggccttatgttccaagtttccacatccctctttttccttcctttcttgaggtgtatggctgatgtgagcagagagaccgagaaggaagggctgagagattctttatggcttccgaagaccttaattcttacttgcctgacaaagggattctattgtattcttatctaaattttttgtgatgcatattacttggttagatattattttaaatataagcaggtggtaattattttataggttgtccacactgaagctttacaactttggatgataaatattatgagattacatatagattttgtataaaaagtattcctgctttattgaatcttatctaaaagtctgtttttatatgacagctatagatggtgactttgatttgagtgactgatctgtactcactgaactacagcccatactcagtcttctccaaggggacatgtttagtctccgggtttgggcattgcttagttatctgtagtcctgtagaacaatgacagtaaaaccttgctgtggaaacctgagtttgctttacaatatataagagctctccaggtgaacccagtcagaagccatactttcagagttgtaaagggttcatactttcgcactacatttcaattgacagtgatggcctgacagtttctaataaatattaaatgttaaaatggaaggtggtgctaaatatccaaactgtaaagacagaatattaggaaattaaataataggcaaactcgtagccgtatcttttaatcactttttagttatttcctcataacaatccaaatgctgataatttcactccacagcttggctaaaattaataagcagctaggaaatttaagtttttcaaggtatattcaaaattacttataaggataaaaattaagtttgaatatattctattttcaagagaaaatagcgtttccttatttcaagttttgttgtgtaatcagaaaccagcattgccttgatgttcttttctcacatagccttggcgactctcactctcttcattgaaagacggggggtcagggctaaggttcagcccaagtagacacatggggcaggtggctggctgtcttagaccttgagcctgtgtggtgacccctcctccatccttgggtgcttatgtggccatctcatcactaccccttaatatggacctgccctggtccagccactcattccatggtgggccttagaagagaacacagtgtcctggaagtggggctggggtgaatttacagcccatggggggtgggcaaccaggcacttgttgctccctgcctgtttgtggtttgctaaattgtatatatttttatattccttttactccagctgcagggcattgttcctaagtagtcaaagaatgaagcacccaatccacggggcttaatgacacgyccaaggggataagggacctatgtcagttatgtgattacctgcccaagtatactgatgattgattttagaacctgtgctgggggtgtcttgggctggcttactattcagcacatcaatgcataattctgtgtttcttcacattttcactggctgtggggaatctgtcaaaaggaaattcggatggtcccaagagggcaacttttcgctaaagccttttggaaggctcatcaacttagtttcacccagggccagcctgcaycagcgtgtgccaacctgcagctcagggcccatggtcatcctggatcttccttgtgatcacggtcctagcccctcacctggtcctctgagattcctrtgtcttaggatgtggatttggtctgctccaggtggcagatgcacaggccagaagcccttctttctggcgtcaagattttcggttctctttctggtacatgcatgatattcctgagaaccttctgcttggtgtgacctgcagaagcaataaaagattagtggcagggactttggcccctgccttggagtttctcctgactttgctcgccctcctgctggggtgctggctatatgttctcccagcggctttcacccaccctctatttcccaacctcctagctctgagatcattgatagtgacttttgcctctttgttgtatatctggaacctcaaatgrttttctgtgcttttttgttttttttttccccattgtttcctaggcctttgagcmagaagccaggccagaggaaagaacagctatgccctccagcggtgcagaaactgaagaaggtacgcatgctcctttcccacttatggcagccacagagtgctctggaccaacaatctaaccagtccgttgaagtgtgtggtgaagcyggccaggaatcaaggggctcagaggcaagatcaggggtgtgggatacagcaaagcccctgggtcctcggacagcatcaaatgaagtatactgtttgtttccactctccatttaactggaatgtcctgagtgctgtttgccgggacctgggccaggtcctctcgcattcctgatcttcaggatgctctcttgacattctgattgttctcctcattcagcttgttcattcattgagtccttcattctatcatttgttctttagtttcttccacctttgtggatctcctactttttgctaagcaaggatactctggaagtcatgaaggagtttttgtcatcacgagggtcgggggacaccactggcatttagaattgaggcatcagggctgctggatgttcatcaagatacagaacagccctatgcaactaagagtcgtcctgtacagctgtttacagtcctgatggtgattcagagacggcatgtgtgattctgcttgtggtggaagttcataaaagaagatatattttttataatacattgttcctactctattccacaacatgccacatggaatcattctgatgccccacttgtgcataatacctagctcatatgcaggaacatcatcattcctcattttcctcaacttgacagtttatctatgcatgcaattcttacttcatttgaggttrcttctgcttttccatatgcaaattaattttggtcttttagtaagttatggtaataaacagaagttttcattctaggaagcatatttttgcatattcctgtatttcttgtctggaacagatcctgattttgtgttttcaaaacccggtggttgcaaaaatctaaccacattattgcgtctcctagggtatttagggtaaaggttttatgcattgaaatacatattatcttcttatcagttactctccatttgcttcatattttagttaggatattatattgatttttatttttaattagacatgaagataaggttatatgtatctagggggtagagttaygtgatctactaactcaatttcaagatagtgaaggaagcaacacaaaatacctgttaatgtaaagggcataggtctgatagggttgagaaccaccaagcttgatgctggggctagggaggaaaaatatgacaaggcgcttgttcctaagccaccaatgttaatagctggtcaatacttttgattctgcttttaactggcctcacagaagagttggattctaggtatttgtcagatactatgatcttaaactctttacctgcatgtttgttaaaaaaaaaaaaaaaaaaagtagtcttggctgggcacggwggctcacacctgtaatcccagcactttgggaggccgaggtgggtggatcacctgaggtcgggggttcgagaccagcctgaccaacatggcgaaaccccgtctttactaaaaatacaaaaattagccaggtgtggtggtgtgcacctgtaatgccagctactcgggaggctgagacaagagaattgcttgaacctgggaggcgaggttgcagtgagctgagattgcgccactgcattccagcctgggtgacacagtgagactccatctcaaaaaacaaaacaaaacaaaacaaaacaagattaaaaaaactagtgttagagaaggcatatttctggtgagttgctgagtctgtgtggcccatcccgactgcatatgttcctgggttaagcccgagcagctgagcctcctcctcagactgcaccttcttggagcccaagggaattgcctttactattctcccctgtgggtgacactcgctactggctgtgttgacggagccactctttaccctgctgcccaagaaggtggtgggcactttgtgctttctccttgaagacctgtaggagaaagctctttctggttttgtattgggaacacagcttcacctgagtgcctggctcagctcacttttactgctgtacctgtagccgatcaagtttcttacttctagctttctgataaacttggagctaagtttctgggcacttgattacaagggcctatggcaatgctgactgcattttttatattaccttgttgcttatttaagcctctgcccttactttttcttttttaaaatcaacttctgattttaaaaaatcctcttgcaaatttttcctctcttgtattctaccttcaaattaatttagaacactgaggtctaaaggagtattttaattccaagttgttcttaaggggcttacagtttgaggttggggcagaaaaacaagctctcatggcacagtgtgataattgctacaggagttatttgcaagtagctctgtgtattagcatgctgtagactgtgacagtggagcagtcagggaaagcttcctggaagaagtggccctggagctgtgatctaatggagggaagggaattctacatgcaatacaaagtcctgagccaaatgacgtactggggaaaatgcagctcattttgaagccctggaatataktgtgtgtgtgtgtgtgtgtgtgtgtgtgtgtgtrtgwgtgtgtgtgtgcgcgcttctgtatggtggtggcagtgatgccaagaacataggcttaagaagtaggcagattggcatggctgtacgtgaagcaagttgttagaattctaccctgacagctctgtaaagttcactttggtgggagtatggggaatggatgggagaggcctagtggaagatggggaccagccatggggctgctgaaagcaacgcagaagagaatctgccctacagcagtgtgacaagatgggagagttgaggacacatgagtgaggtcctgaaagtgtaggatctgattggctgtcagtggtaagggagaaggacggtgtctccattcctggggtgtagcactgggtgggatgggccttccaggaagcagaattgtgacaaaatatacgttcagttttagacaagttgaatttgacaggtgtttggggcagccaagttaatatacgtggctgccagtttgactgaaattaaccaataagcacaagaatttggacagaaatccaagccctctgactccaaataattaatgggtatactttagagcccttgaatctagacaatgcttttgtatttgtctacccttgaaagagtactagaaactgtatgcatattccagcagagggcaatattcaactaaagtggaaacattcaattagtttttgtccattcatgagtctggaggagactcaactgaaagaacaaaacattttgagcataagagcttcctcttaaaaaaaaaaaaccaaacaaaccctaaagcaaacttcctctttaaaatctattagaagattcttagtagattatgcttttctgtcccctctgggacaatgtgtagtaggggggaaactctaagcttatatctgtagctgctattaattaaaagactataataattctagcctggacattaactttgctgtctctgtgagtgtgataaatggttttattattgcctacgatccagttatgtttctatagttttatgattctagttgtactcccagaataatggcacattatttcaaatgaatggccaaaaagtcttcttattttaatatgctcctattaataagctaattattagtattaataaaaaacctggctccatattttccccttgccttcttatccttgtttgatctctctgtcctaggatttcctaaagagcattgtacagaacactgatcttggaagctattttgaaaaataaggattctttggccaaataagtagaaaatgctgtacagtagttccctcttatctttgggggataagttccaagatctctagtggatacctgcaaccctggataacactgaaccttatatatactatgtttttttctatacatacacacctatgataaagtttaatttataaattaggcatagtaaaggttaacaatgataattaataataaagtagaacaattataacaatatgcaagtatcactactcttgtgctttggggtcattagtaagtaaaataaggttacttggacataagcactgccatactgaaaccgttgatctgataactaagagctactgagagactaatgggcaggtagcataggcagcataaggacactggacaatgaaataattcactttcctggtgggaaggagtgagatatcatgagatttcatcatactactcaagaatggtctgcaatttaaaaaaatgtaggaattatttctggaattttctatttagtatttttggaccgaagtcaacggcaggtaatcaaaaccatagaacatgaaatccctgatggcaggggctactgtatatgaaactcccacttttgagattyggaatgcatttaatgttttgtgggctctagtaagtcaagaaacctatataatcttgtttaacttagcagttctctaaattaatggatcacacgagagtccttttttcgcagttctcaacctctcatagaaaccgtctgtgaaaggtactttgaaaatgttgttcttcctcaactctgtggcacctccctctctggatcttatgtcctccattttcactatcacctgggttcccgccatctgttagtccagtaatgcgcacaccagagaagtgcaagaaagaatttttcaaactgttcacagtgatcttgaatattccagatcatycatgcctccctcgacatcccacttcaattcttgatatcacatgggaggctattgcctgcctggcatctactgggctataacgcaacctgagaacaactacagtaccatttgccactgtatgaatccgcttaaaaaattattttgtagttcaaaaacgctctgcatttgctaactgtcttaacttggtgtcactcatttgttactttgttggcttctccccataaattatcttccacattttcattgacaaggaaatagggattggaacatgtgttacaatcaccaagaagagagggcaaaatcatttccttcagggtggaggcagccgctctcaccggctcaaagtggcttcccctttgtgattctgtgtgggaggcagaagaggctgttggtccaaatgcaagattcaggctggacaggtggacacgtgtccttaggcccatttccatatccatccattcagtaaatatgtattgactgcccatcactttataccagccactgttcttggcagtaaccaaaaaaaaaaaaaaaaaaaaggcaaagagaaaaaaccttgccctcaagtagtttgcttgcatttaatttcactcaagcatttgttagcacctgctacgtgccaggcattgttctaggcactggtcacaacctgagttaagtctatacactcatggagcactcatacctatggtcatcgggaggggcatttctgggagtcaggagtcaatcctacgcactttatgcatgagaaagtggcagcacagaaaagttatgtaacttacctgaggtgacactggcccargccgtcagaactcaggtgatcagtccactcccttaccgaccacactatagactcccactacccctatagagcagaggactgatctatttagcgtctggactgctcgtctagagttctctcagcatttgggggatagaaaaagcgcaaacattggaaacattgccttgaaatgagctctattccaaatggttcatctctctcaartccttatgacccgcaggcacagacatgtctcgatgacacatgccagtaataagctgactttgctaaaatcctcagctctgccgtgaactggcttttgagcataatgcaagtgattaggctgtttgcttttgtggaaaatgatggggtggggtggaggtggcggtgtcatttaatacttacttcagtgggaaaatacagataaagcaccttgcccagtattgaacatagtggatgtttactgaatgatgtctaatcatgagtgcaagttatataacacacgcctatggtggattcaatggtaaagatacgtgttttgagataccaggacccagccattcgtgtcgtggtgactagaagtgagcagatttttgcttgaacattctgtagacaagggtgcagcacttccctctgtgatttggtttgtgaaatgtagagagagttgtgtggtggattttccttatttgaatatctcctgtgagatattactgggaaaacaatagggctcttatccacacaaagtgttgtttccaagatttttcatttgagacactctagctcaagggctttttaggakaactgttgcagatggtttagatatcaagatataggtcctttaagccaggacagctgggacctgggtgttggggacttaagacagcagtactaggcaggccgttctgcagagctgatcattcacttgcatacacagctctaccttgactctcatgtgaaatatctggtcaagcacttgaaaatattgttttcctagaagtagggtatttttggcattttcaacaaaaatcatacgcagcccyaggaaatgatttgtaactgttgctttcatttagtattattatcattattawtaagttctggkatacatgtgcagaacgtgcaggtttgttacataggtatacacgtgccatggtggtttgctgcacccctcaacccgtcatctacattaggtatttcttctaatgctatccatcccctaccccctaccctctgacagaccctggtgtgtaacgttcccctccctgtgtccactttattcaactcccacttacgagtgagaacttgkggtgtttggttttctgttcctgtgttagtttgctgagaatgatggtttccagcttcatccatgtccctgcaaaggacatgaactcatactcttttttatggctgcattttacagagcaattcagccttttctgtatttcctttagtgactgactttgccagtcctctttcttctccttgtcacaggaaagaacagtctccatcattaaagggaccatgatatggataggwtatcatgatgatatgatactcattttgtatattattataaaaaatcagtattttctcacacagaaataaaaattctcctcaccacttagtttatcaaaggattaaagaatcatagtttgacttggaaagaactttagagatcatctggttaaacccactgtatgtttgagctcaaaactcagaggttccccagagctcacctagatgcaacacatttggctcatatctgagatactttattctagctgagtcagataagcagcctagagagaaaaaaaagtattaaactcaactaagtattctaatagaattrcagtgatctttacttgaaaatatagctaaaggttagtttctttcttgagttaaagtagaatctaagtttggtaaaaatggaattttgtttatgtctttgaaagatgacttgcttaattttattcaagccrttgattaacttaggaaaattatgccctggcttcaatttaaaaatgcagttaacccttgaaaaactcagattaggggcaccaatcccctgcacagtcaaaaattcatgtgtaactttgacactcctcaagcttaactactcatagcccactgatgaccagaagccttgtcaataacataaaccattgattaatatatattttgtatgtyacatgtattatatactatattcgtataataaggtaagctrgagaaaaaaatgttcttaataaaatcataaggaagataaaatacatttaccatttattaagtggaactggaccaccacaaaggtcttcatccttgttgtcttcacattgagtaggctgaggagcaggaggattaggaaagggtggtttgtctgcgtgttttatcaaattgtcaaaaaatctccaaaaaaattaccaatatatttattggaaataatccatataaaagtggactcatgcagttcaaacccgtcttgtttaaggatcaactgtataatgatttagagcttctgtgtaattgataattgcaaccaaattttggggctgaggatactttctctccataattgaattctttgctttagagatttctatggtgggcaggggtgggggttcaggagatgtaaaaatctgtatcataaaaatttatcaaacatggagttatatgattcaacaattatactcctaggcatatacttaagagtaatgaaaacatgtatctacacaaaaacttttacttgaaagaatgttcattgcagcattattaataatagacaaaaagtggaaacaactcagatatccatcagctgaggaatagataaacaaaacaaagtagatacctcctatctatctatctacctatctatctaatggaatactatttggcagtaaagaggaatgaagtactaatacatgctacggcatgggtgaatcttgaaaacattatgctacatgaatccagtttcaaaagactacatattgtgcaattcaatttatatgaaatatccagaataggcaattctgttgagactgaaaatagattagtggttgccttgggctggggtgtggaaggaggatggtgaggtggttggggagaaatgtggagcgattgctaatgcgtgtggggttttctcattggagtgatgaaaatatcctaaaattgattatggtgatggttgcagaactcaatatactaaaacccattgaagtgtatactctaaatgggtgaattgtatagtatatgaattataccttaataaagctgtcataaaaacatatatgggggagwatataccaacatttaatggtagttatattgatttttttgtttagttttttttccaagtttttatttattttatttatttttttgatacaaaagactttattgcagcatgggcttcatgttcacattggttctccttgcccagcaagtcccccaggrgccttgtgagcagctcagatagatgctgcacacacactyagtttgtgtcacagctgaggaaccccaaactaaraaatcccaaatcttataaggagactgctagcaagcctgcccaacccttgcactggaagaggctgttatctttactaccctggtctgaaaacaaatctgccttcatccccaggggaaacactatttctcggtttcaagactgttggccacaaaaccatccttcaaaagataatccggtagaaaagttttcacagtaagagtaggcacaccatggagaatggcctgcagcagtctggtgttgcaagagggctactgtggctccaaaatcatttcttcattgaactctattcagacaaaaagagcaatggaaaaagatccttttgccctgcaactttttttttttctattagtgatagaagccttttttggagaggtgccaggaaagtttctattaagactctggccagaattggatcatatgttaacctccagacaaaaaaaactgtgtaagaggagggacttctccactgtcttaaataattacttttgtctttaaaaaaagaaacacaagtaatttaaatgaaaaaaaacctgtattttaaagaagatgtcttaaattctttctgaaacaatatagaatagaaatataaaaatgatatgccaaggagcacattttggagttgcttgaggccaaggatttcttccatcttggtttcttctccccagctgctgctcagtagggaccagtggagcttgttgaattgagtggaatgttgggctctcactcactgataagtctcattttgatatttctgtaaataagtgcctcattgttgctcccagtccatatttataccgagcaggcaaaatgaaagttcttattagtagtcccacttttaggaaaaaaaaaaaaaaggaataactgggatattgaaacaaactttcaaagtgtgacaacagtctctgaattaagagtggcaagtagtctctcaagtgcctttgccattttaattctctggccattgtgaattgaatttgtacactaggataaaacattgtagcaacacatgcaggtgcagtagttagtagtgaaacagcaatacttactaagtggagaggaaaagggttggcttttggacttacagagctggaagggtgggaggaagtaaggagaaaaggattcatctgtctatgaatctggcagttcagaagttgtgataaaatagcgccagtattggaagtgtttcaattagttaattctaaaaagtaaacaacttttccttctctgtcctgatccacagcttgtctaaccatccaccacatcttgtcagctatgtatattttgggccaccagatgtaggtggagatgagaagcatttattcagcacctgttaagtgcaaagcacccagcttggtgctggggatacaagggttgagcggaaatcgatctggtcccagctctcccagaatttacagcctattgagaaaaaaagattcattcaaagactatgaactacccaccatgtatgccagagaggcacagaggctgctatgaacactaccatcagggtgtttttctgacatttgtgggggcaggcagagcaaactgagagcatgatcctggttttccacctgtgcttttgacactaccctgtagatgtaagccagtggtggacttggttgttaacaagacaacactggtggtctggctgcgtctgaccacgattcttctgccacatccaaatggtgattaaaatcagaatactgagcatcctgtgtttttggttgtaagcttttttatttgcttaagtctagactctgtggtctcatttgcaaaataagacagtaagacatgtgcatagaggtgagattttttaggcgaatctgtttcttaatgagacactggcatgaatcttacagcgacttaaccctgttcacttgtgcagtgtcactagtaaacataagtcttagagattatctcttgttccattatagtttggcaataamaaaaaccatgtttatcaagtttggcaagtctgatttagaggagtaatccttacttctgggtgggcttgagggcaagattaataggcctttaaaacagaataggtagagttactgataccattatctgctaaaggttgctatagcaatgagtggtttgattgcactgtgtaattggtggtacagtgggttagtgtaaaaggatcctactaatttaacagaaactctcctagagcaatttaattaatccattagaatgaatgccaaattctttgaaagctctaagatatggwtctgtttagttctaggttaatyaaagatacattattatctggaatcagcacagtatcactaatatttttaaatgatttttggataaagactttctacatttaagttattttttaaatgatgaggtacaatttttaatgaagacatatattttaatatagtttgtgktacttgttctgaagtgaaaaaaattgcactggactacacggaaaaacgtaggcatggcaagctataaaaactagttcactggccttttgagaagggaaaggaagctggaacctaaatgcactaccaggtgtgaacacatcctctgtaactgcaaacttcactaacagatgagattgccttttccattagcaatctggataaaatgtgtactgttcttccgaataaatgctgtatgtacagaattctttaggaatgcaatataatgatcatttaagagtttatggctgagatgactttaaaggaatgaatgtcctaaaacaggcaaagtaaaagggtgtgactcttgatgtctgtgcagatgtgtctgttgaaactctggtccaggttatccttcccttcttttttttttttttttttttttaacgcctttgtggtttctttcctacttatcccaatttttagtgtttgagtatatgagtttcaaaaccaaaccaaatccctactgtacacttataatgtgccaaataccatggtaggtgcttcacatcaattttctgcatctatgtagtgggacaaaaatgctaattttaactatgtgttttggactttggcacttgaaagcaggtccttgaagggtgaaattagcccattttgacattcctacctctggcaatgttactctgctgccacctggaggccttctgtgggatgtgcatttaaaggccggcagggatgctgtgtacacaagctgcctgggctgggtgtccactatgatcttgtcctcattccctgctgagatcagttgacatgaccacacaaaattggggttattactttgttcgctggttatttccttgttggtttaatcatagaagctaatatgcattataaattcaagagcaatatactattgtggcatgcaaatgtagtattacttgctttctgcaaagcaaattcaaagttattgttgtccagatttttagaaacacaagacaaggattgttggtttctctgctccatcctgatcttattacttatagctccatccttgtaatttgtcatctttattatgatttgtcatgtagagccatataaatgaataccttatacattttctaagcataaacatggatgataactcctagcattgttgcccagaagtgagaagagcttgaataaatccacctgcagatttggggcattagataaattaataggagtgacaaaacggaatagggaaggtctaggtaatgaacctgctggaaaacttcagrcgtttccccaggattagcataaagcagggctgtgggggaagggatgtggagattccagaaaaggagtgagaccccacaatgttgtatgttaatgcaaatctggggtagagactttcagtcatatgtccttgctagggatatcgagtgctttaattttccccaggcccaaacctgttcttggtggttatttcgacaatagcggctcttgtttaagggcaactgagtatttgggaacagaaccaatcaattaaaccacagataaaaatgctgccttgggtgaaccttttttttttttttcttcatcccagtacatcctgaccactactgtttccaggaaaccctttattcagaaagaggacacccggtgtgcccggggctgaggttggagctgagggctatgctggtgttcttgaccttcagtgatgtgtaaggaaaagccagacctcttatataatgaattacgctcttttaaaacatattgaaatctgtggtatttgaggaaatagacatgtgggatttcctcaggtggktacgagtcacgtccttacaatctgctattttgaagaacktgcggtagtgagcagccttcctttggaatcaagggcatttatttatttaatgataattttttccccttcaggatttcctgtgagagctcctgggcttgtttccatcttagtccacacagataataccagagtatggacagtcgggttattagacactctgctctgtggagagctgatktttaagaggcctaatctaaaaacctatctctgtgcagaaggctcctgggcaactcatttacacttgtcagctagtakttgttgttcttcttaacaaaagctcccatcagcagatcctgataattatttcttttgcagagattaagaattcagtgtccagcagatcagcagcygaaaaggaagatataaaggtaatgaatgactccctgcttctttctttgcacgtctttccataaagtagaaatgaagatttagtggtaataaaaatgtttaaaaaacactaaaaaaaggatgtgccccaagtcactttcagaataatgtgaaattctgttttctttttctttcttttttttttttttttgagatggagcctcgctctgtcacccaggctggagtacagtggcaygatcttggctcactgcaacttctgcctcctgggttcaarygattctcctgcctcaccctcctgagtagctgggactataggcrcccaccaccacrtctggctaatttttgtatttctagtagagatggggttttgccatgttggccaaggtggtctcgaactcgtgacctcaggtgatctgcccgcctcggtctccccaagtgctgggattacaggcatgagccaccgtgcccagccccattttctttatcaaattcttaatccctattctttataaccaaacctagctatctttctgagttgtagttgtatatgcaagatgattgaatacattctgcaaaacaaatttctacttgaagtttgatgtttatagatatttgacaacaatgtgattacaagagtaaatgtgggagatgtcctctgagaataaaataacctgtgtacagctttcaggtgtgtttcagcttgggatagattcattactcacttttagctgttaaataatattaagtataagactagttttctgtttacatgtgatgatacttgtaacatgttttcattgatgctttccaaggttgtttttctagttcacaaaaataaacattagtgtagcatatatgtaatttttwaaaaatccacctgactttatctcttccagcgtgtcaaaagcctggtggttcaacacaatgaacatgaagaccagcacagcctagatttgggtatgaaataaygcttttacctatactcgtaggggcatcccagatccaggtttagagtggacaagaagcaagtaaattttaacataaaatattccttcctggtaaccttatctatttcctgaaacgcatccagataaattttatttgtaggatcatttgtaatactatgactctagaggttgagactccatttacaatctaaaaaacaaggcaatcaaagcttttcctgaacagttttactctgagccagaagctggctctggacttgtcatatgttcccttgttattyctgtgaagtaggcactaccagtctcaggttcaggtgaagcagttgaagcactggtggagagtagatggtggaaccgagactcataacttcattccacctggccctagaatctccaagcttaccaaaatcccattttgatgcccagtggggtccccttggagctgagcctatgtgatctacactgctgagctcaggaaaagaccagatgtttgttctgggatttgagtctgatgtgagtgtcctttcagaggaaccaggtgttcctccacccttggcaaggtagaggtatttcctccctctgacctgggaattctcatctgattacaatattctgtttcacaactccctgaggaccccttcctaaatctcctcccaggtactctctatttcttcaaggctaatttggaccccagccctatctcttgagttacttagaggtgaatagagcataatgaagctaatggggtgtttgaagatacaggctgagctatcagcagaggctgagtttgggcacctggatgtctgtgaagacctctggggctgacaagtgagaggcagatgagcacgaaccaytccagttggtttcctctggttctgtgaagctgaggcatctcacacacctggaaggcacacatgggcaggacagtcttagaagttgcaaggggtgaggtgttgctgatggtagtgactgagggctcaagctgatgtgaaatcaggaaaagctaaatcartgctcagagtgagattaatggagaaggtgggtracccacggggtcaccgtgagcctacacgtgcatggggctccctggaggcygrgggagtgtggttggtatgctgtgccaacacacgacagagcagttacaaccattcggaaatcatgctgtgtagagcagagcaaggaggaagcacscttggtgttggttgatggtgttgctagtagcttggccacatgccagaggtggtttccaggatcttgctgcatgtggccctactgaaattggaacagaaatttagacccacactaagcaatatacacgtccttaatatttttgctatttaaggtaagagtaatgatttacttacagaagaggggaagaggaaggcaaaaagagagcaaacatctctgtatagatggctgttgtgggccactgatgtcagggccattgctgttactcacgcacacaggatgtctcagctacaaattgcatcatgctcctgggaatgttagctttgaagaatgtttgctaagatgaattgctgggggagggaggtaggctactaaaagtattaaacactgagacgatcttaatttcaggttttaaaaactcactctagtttcaaacttgtaaacttgtgagcaagaagcatgtgctacggaaattgtagtagtctgacctcgtctgagtgttttgtcagtaacatcattaagtctgtgaaggatttgagaaagataaatgagcacaactttagtccagtgatttatgaaaaggaccatgatgagtgtttgttgtgctascattttctttttggttcatttaaactttttgaattaataaagtcccctgagtttttgcaaaggaaattataacagattttcaaagaacctgagacagagaaggggacagcaagctgtgagcaatagtcagatggtcagacacagtctggaataggaaatgggctctccctggaggccacttcaacactcttttgttatttgttatctgttattttttattttttgagatggagttttgctctgttagccaggctggcatgcagtggcgccatcttggctcactgcaacttctgcctcctgggttcaagcaattcccctgcctcagcctgccgrgtagctgggattacaggcacccatcaccatgcccaggtaatttttgtatttttagtagagtcggggtttcgccttcaaactcctgacctcaagtgatctgccagcctcggcctcctaaagtgctgggattacagtcatgaggcaccacatctggcctcttttgttattttataagtgctttattctgcccagtctctgaggaaatgctgataaatggtgtgggataaacacatgataaatgctgataaatagatatgtaagtctttgctgacttgtattattcagaattgtgtggtgtggatgtggcctcatcagtgacacaagtgctgttccagtggcrccctctgtgctgatggacacattttatagctgttctatccagtgtagtagcctgtggccacctacgtctattgagcatgtgacatgtgactgaggaatcggatttttaattatctaattttattgtattggacagggcagaacagagtaagttccctttgtggtggtgttttctttctccttctagaagtgttttatgcatttattgttttctattttttttaagttgttgtggtacattggagatgtatatatttttagggtacrtgagatgttttggtacaggcatgcaatatgaaataagcacatcatggggaatggagtatccatcccttcaagtatgtatcttttgagtttacaaacaatccagttacactctttaagttattttaaaatgtacagattaggttgagtatagtcactctattgtgctatcaaatagtagstcttattcattctttccatttttttttgtacccatcctttgtaatgttttattgacctttcagggcatcaakaattaacacttaccattagtttataagctgaaaatgatggttggagaaatgtcttgggtgagtaacaactggcaagctcatccaagccggtgccccagaaccagctccgcaaggagctgacatctatgtctaatgcaggacttatggccccattctctgcagatgctgtaaggggtcggcattttgtcgaaggggagaatcatcagttgaagggctaagatctgcttctgttgctatcatagtgcagagtgggactccttcatattctaggcaggtaggatggggaaaaatggcaaagcatttgaaggaaacagaagaaaagaaggtagatgaaatgaaatgggtcaataccaaaaataagaaaaaaagggtctacttggctcaagtaaatggcactaaaygtgattaagaaataggatctggccaggcgtggtggctcatgcatggaatcccagcactttgggaggccaaggtgggtggaacacttgaggtcaggagtttgagaccaggctggcsaacatggtgaaaccctgtttctactaaaaataccaaattagccaggcgtggtggcgcatgcctgcagtcctgctacttggggggctgaggcaggacaatggcttgaacctgggaggcagaggttgcagtgagccaagatckcaccgttcattgcactccagcctgagcaacagagcgagactccatctcaaaaacaaataggaactgcttaaagttttgatcctatttcttaatcatatttaatgccatttacttgagccaaatggaccctttgggcagcagcaaatgttgtgccaaggagaaggggagtgaacatcttgcaggaacaagtggacagcctgtgggaaatggagtagatggggagtctcagctgtaaaactggaatcccaattgcaaacaaagatgcataaaccatcactgaatcagcaaagctgcgaatggcttgattagacactatcttgcaaactctacttttaagaggttgaatctgaaaaaataaagctatgtggctttggttagaaattaagatatccagttaaatgttaagttcctccttgaggactgtgaaaccataatgccagtgtctcagggggaattacagaagctcctggaacatgatgctcctgttctttcatcgaataatatgtcaaagtgtgagtgaggttgtgggtgacagaccagatgtggtgacactcatactgaagctgattttcctgcaataatatatcactcatggtctgcattagattaaagaggacatgaaatttatttggccaaagctgaatatcttatgactatttggatggaaaaaatgaagggttggtgaaactgacatgtcaaaacaagaactgtgtgagcatgttttgactttccctatgagggaaggtgatagggagatagagacactccytataggtgataggggacatgaggatagcactggctggcatcctcctttctgcttggagagtctcagtactttgaagctctaggcatgaagcgctgcctcayctactcttccaggtctggctggtagagagtgggcttggcgcaagtgcaagagaagatattaagcatagtatcttgcaaagtaagcctcttggaaaaaaattatgttagtcttctataattatagaaataataaatgttcacaatagaaaaattgrgaattttagaaagagtagaaaaagaaatccctataatatccccacccaaaggcagttactattaaatttgggtatatttcctaccagcattttttctcatgcatgcatttcttttttacgtagctgtgatcatgaaaacaagataattcgtgtcctgtgttattcatttgacatattccataagtaagctccattatagaaagtaacttaaaatgatgttgtatgtttgtttttgtttgtttatgttttaataaagcatgtggattacttctataagacgaaagggaaaatgtagatcctatgcacaagtatttatttccctccaamccccctttttataatatgtattgttgattttatagagtgacctgatcagtacatgtaggggctcaaatcacagctattctttaatacttcgggttacttcattgctattattgtttgttactaatatgtaagatgaggaaaagacaaccttttggtgggtgttgggactgggagggagggcattgaggacagatgaaccaaagctggatatggaaggaaacccaacttcataccaaaaaaaacaaaacaaaacagaaaaaagaaagaaaaaacccgtctagaggccagttgggaaaagaaggaagcagaaacaaacaataggatatgaggttcagatttctttaccaagaagacacagatctttcatgactgtagacaagaccgagagagaaacaaagcctccccaccccgaaagtcccctgaaaggaaaaacattgggaaaagggaactggtaggaaatgactggaagaaccaaagaaacagtcctcctaaacagaatgttaggtggtacgtaatacaggttttcaggatctccatttgtgggcatactgggagagtgcaggcctacatgtgctagtggtgagctggggggaaatggtgcagtcaataagtgctagtttggcaaacaaccagataatagaactaattaggttagtttctcttcttatattaaccaaaagttcttatattaactaaaagtgctattataaagtagcacttgtaagtcgcctgtggaaaagaacgttttgagatgtttttaaagaggatcttggccgggcgcgggggctcacgcctgtaatcccagcactttgggaggccgaggcaggcggatcacgaggtcgggagatcgagaccatcctggctaacatggtgaaacccggtctctactaaaactacaaaaaaattagccaggcgtggtggtaggcgcctgtaatcccagctacttgggaggctgaggcaggagaatggcgtgaacccgggaggcagagcttgcagtgagccgagatcgcaccactgcactccagcctgggcaacagagygagactccatctcaaaaaataaaaaaaataaaaaaataaaaaataaatgaagaggatcttaagcatggcatcttagaagctgtgacccctgtgagtggaagctgaccctcttggctgttatttaataacacatgtgtatctagactgaaaccgcaagaatgtttcgtgaaacatgggagggggggaccttagcagaactcttctgaaaaatacgttttcaatcctaatttttggcagatctctctctacaccccaggctacagagcttctgtgtagtcctttctttttttcttttctctttttttggggagttggggggttatctctttaccacaaactaaagcttcccagtgaatcattttgaagtaaaggggctggagacagtgaaatatcccaagaagaccactgggaaggcaaagttatttgtataaattccaactcaaattttattctttttgttcaaggaaattttcttactgtggttgttgaggtttcaaaaccaaggttgagaatcacggtcagagatccctgagggagctcagcaatgctgaaatcacccctaacgtactrggttttcagtagttttgggaattagagaaatggagttctayttttatctcaactgattacaaaaggtattaatgaaagtccatttgtattaggttcacagattttcaatgattatcaccagtgagatcacagatctgtgggaaataggcaaactttggggggaaaaagtgttgaaagaatttcctaaccacttcaayttatgagatgattaaacctttaaaagttaattatttttgaacattaagaatcaagtgactgtaatttgctgtcacagggtcatttgttggactttgaagtgtacagaatgggatgaagggagtgggttgatatttacactgatgtcttaagggcattatgaggatgcctgatgcttggcattagtactaacctacctttagtacattctaaattacctttttctttcattttacaactttctgaagtgtaacaagggagggaaaaatggcagtactttctctgaactctaaatttyccttctccaaaataagatccttgaccccaaataaaccagcttagtgactaagcagatttcatgtattccattcctaaagactcccttagtttgatatttcaataaaatgattagattataaacttcaaacaaatagaaactcttaagaaagtgacaacaaatgtacaaaacatgaaacargtgaaaaatatgaaatatattctggaaatggtatctataaagtttgttttataaaaagttaaaataataccactaagggatttcttccccttttcttgtgttgaaacacttcagaatacccatgtatataggcatttacaaaaaaaaaaattacatttacaaagggataattggccagcaagctcgattgctskgtgtstgtgtgtgtgtgtgtgtgtgtgtgtgtgtgtgtgtgtgtgtgtgttggtaggcttgttttatactgagtatccagtggctaattccttggaagggactttagggcaattaagattctggttagcttttatgccaggcagcacaagttctaacaatttattggtacaatttactttaccttttagagtggctaatttaaagaacatttttatgaaacgtggctccttacttgaagcatgggcaagaaagccaacagaatttattccttttcccctgcaacatcaccaaataattgatttggaatgagaattaaaagaacatttgacagttatgaaatgtatacttactctgatacttctgattagttgtgcaacaaattcatgacaaattaccagattaatttttactttatttcttcaggactggggtttttcgatggtttcaaatttakaatcttygcatttgaaattagataacatattcctgtctgctttcagcagaagtttactctccaactcttgctggtgctctgggccagtatcagcaggtcctccagatgcctgtggcttagatttgtagtccctaatgttgtccacgaagagtttctgtatgggaccaagtttcttgttaaatgccactgtgtgacaccaaygttcttctgcaaagggagtgasactactgaccgaatgacagaggagaacttgaagagcctctgaagaatcatggggactctatgtgcctgagccaccacctctgccactgctgtcagaatctattctttacattatgaggcttcactgaagatgtgtcgctcaagtatagggagaagtgatacaatcagaggtcaaataggaggcccactaggaagcagtctgttgattcttcataatatttaaaataacagaaaatcagaataaagagttaagttgggctgggtgcagtgcctcacrcctgtaatcccagcactttgggaggccaaggtgggaggatcacctgagctcacaagttcaagaccaacctgggcaacatagtgagaccctgtctctacaaaaattttaaaaaattagccgggcatggtacatgcctgtggtcctagctattcaggaggctgaggtgggaggatggcttgagcccaggagttcaaggctgcagtgagcagtggttgcaccattgcactccagcctggatgacagagtgagaccctgtcaaaaaaaaaaaaaaaaaaaaaaaagaaagagtcaagttgatggtgtccagagcttgaggaaacttggaatgagctaggtaggttcatccaggttcttgagatttgtctgccaatgaaatttcagcccatctaacagatagattcatctgccacacaggtgccaaatggaaacctctcagggagttcactcttgagatcttattaaccccatggagacactgttttttttcctgtgaatcaraattattttcaatatactttaactagtgtcctcagagttacatggcaacttcacaaagtaagaacttaagcaaaatcaatggagcttaatgcaggacttgaattctacatatgtgaatgtggatgcaaacattgttttagcatcggttccacaaacatttagtgaatatagattctatacttgttgctcccattctttaaaatttttttaaataaatttatcttttaagaacagttataggcttacatactttatttcgattcctcactttttacctgatttccgttttctattccaggatcccattaggatcaagctgccgttaataaatactagtcaggaattttgtagaatgtcccttaattgggttttttctgatttttttttcatcattacactgagaattatgggttttgggaagaagacccaaaggtaaagtgctgttttcatcacaccatataaaaggtacatactatcaatgttcattgtcactgttgatattgaccttgatcacctggctgaggtagtgttggtctggtttctccactgtaaagttactcttcctcacctgcctttccacactatgtgtagcccacacataaggaaaaagtgaggagttaatctgtatacttgtgggtgtggtgtctacataaattatttggaattcttctacatgggaaatttgtctgttccccccattacttattcaatcatttatgtatgcctgtatagagtcatggatatttattttgcactttgggtaataatcaaatactactttatttgttgtcaaagtgttccagttttggtagctgggaactcttttagttggctcttgtatcctttttacatatcatcaacattgtatatatcttttttttagggtggtaaaggtgttctttgattcttgaattgtaggtacacaacactatgcctttatcmaaatccacagaacattagagtgcaccgagtaaaccttaatgtatgcaaatttaagaaaaccttgaggttggggatgggatgcagaatgtgacaaaacaatctagctgtattaaaaatgtaagaaatanccttaccaaagggaattttgggtgtggtggagagaggtgcagatctattaactttgcaaatgagtggagtctataagaataaaggcaaaagaaactacaataaccactgtcctttggttgatacagtttttctcgcaggcaaaaagataaagaattttaataccactctacatgtattgcacaaataagtaaatggattgtggctagtagctgccacgtttctccctgttggagtgggtgcttacagataagcagggggaagaggctagagtgatccatgtggtaacagattagagttgtagatatcagcatgcactcatgttcagttaacatagatacacacggttgcatacagaaatatttgtagatatatgtacataggttaggatacatttatatattttcttgatctggcagttaagagtgcctagaaggaaccacaccccagaagcatatataggacgagcctgcccgttttttctttttaagtgagttttatctatcatattttatgtgaattttagcttcagatctatggaatttatagtttattaaactctttgctcatttgtttattaaacatttattaaactatttgttaaactctttgctcattacagtttattaaactctttgctcatttgatacctcatagttaacttatttacatgtggataacaatataaaatagttaacttatttacatagttaactatagttacctcatagttactatagttacctcatagttacctcatagttaacttatttacatgtggatagcaatacctgtatatagtatatatcgatatgtactatatatcgatatatagtacatatcaatatatactatatatcgatatakagtatatatagatatatatacatagatagtatatatagtatagtatatatagtatatatatactctatagagtatatatatactatgtagatatactatctatctatatatactatatatagatatatatagatatatatacatatatagatatatagatatatactatatatagtatgtatatagtatatatctatatatagtatgtatatagtatatatctatatatagtatgtatatagtatatatctatatatagtatgtatatagtatatatctatatatagtatgtatatagtatatatctatatatagtatgtatatagtatatatctatatatactacacatctatctatatatagtatatatctatatatacaatctatagtatatatcgtatacatctatatgtaccatatatacgatatatcgtatacatctatatgtaccatatatacgatatatcgtatacatctatatgtaccatatatacgatatatcgtatacatctatatgtrccatatatatgatatatcgtatacatctatatgtgccatatatacgatatatcgtatatatggtatatatcgatatatactatacatctatatattgtatatatttatatatatacaatctaaatataaacaatataaaatctatatacaatatataaatctttatatatacaatattaaatctatataaaatatagtcagttaaactttgcattttaaaattattaagtctgtgaacaagtctatggcatgtaagaggtttttttttttttttttgaaggtttgggaaaattggaatgtaacattatcggatgctgctctcctgaagtccgtgggttcttcctaataggagggatttctttctccttaggctataccaggaacttccctatccctgcacccctgctctgtccagacttggggctcttattcttgcttctgccacctccagggcccctcacatccactatctgtgttgcctatgcaagataaatccaaaattccatatgatttattattcagaacaactgagcaaatttttcctaattctttcatttcaggttatgctcagaaacttcagcatttaaaacaaaaagagcttcatcaaggtttcctgttgtttgtctgttatttttcttaagatattcatctaggtagaacatatctgtagcaatattaaccaaatggtggaagctttgacaatgtaattcttttttttttttttgagatggagtttcactcttcttgcccaggctggagtgcaatggtgtgatctcagatcactgcaacttccacctcccaggttcaagtgattctcctgcctcagcctccatagtagctgggattacaggcacctgccaccatgcccagctaattttttgtatttttagtagagatggggtttcactaagtaggccaggctggtctcgaactcctgacctcaggcaatccacccgcctcagccttccaaagttctgggattacaggcatgagccaccacgtctggctcaacaatataattctttaacatgtgttgcttcagtcaggaaatctatcattaatattttaatatttatatttattaataatagattataattattactattttcctgccctgaggtgttttgagtattttcttgttttcttattatatgtagacacatatcatatatcagtaacttcttctagctgggcttctaggtgatattcatttttttcctcttagagaataggggatgtaaagaccatatcagaacctctgcaggtgcacataaatgtttttgttcaaataaataaaggtaataatggcagataagaaattcaaacattttgttttaagcaagatggtattatggacagtggcatcatgtgattccaatttttgacaacagtggttgtaccatgctcccgattcatgtctattttatgtgaattcaattttatgggctctgtaaaaaataaaaagtgctgggggtkgggggaggtagggaggaaaatcagaattcacacctcggggtggctgtacccatcatttcattttgagagaataaagtccgtgagtgagtgggacactgcagatgtgaatgtgctgtttctaccatgcttctcagagtgacagcgtcttggcacaagggtaagagcttataaagatcttcattttctgtacaacatagcctccctgtgaaagccacccatttcaccgggtgcctggccatagttagatccacagaaggactgtttgtgttgagcttgctgagaaatgacatggtggcttctaagggattttgaggaaggctttatccatccctgattttcaccttatgctagaagttaaggctgcatatgatgaagcatatatttaagttgtcactgcactggctcagcttrtccaggaaaggcttatcctagcctcagaggccttgcctccttttatctggatattttatgactttccaggaacaatgtctagtagtattaaaaactgtggtgtcttggtggcttaacagtggagtagagaagcaaagcaaatcttcctctttgagctccttcccttcttcttcctccttcttctcctcctcctgctgtttctgtcttggtatagtttycttggaacttccttgcacattgccatgtctcagttttaaaaatcaaatgattactcctcagggtcaaagtgagactatttcagtggctgggaaccatggcttatgcctgtaatcccagcactttggtgggccgtggcaggcagatcacttgaggtcatgaattcaagaccagcctggccatggtgcatgttttgtaatcccagctacttgggaagctgaggagacaggagaatcactggagcctggatggcggaagtagtagtgagccaagatcatgtgactgcactccagcctgggtgatagagcaagactctgtctcaaaaaaaaaacaaaacacaaraaactgtttcagtgtctataacagaagaataatatatgaaagggaaattttatttacattcaacatttaaagcttgttgaaaatttacttctgttaagttcttcactgttataatctcactggatcctcacaataaccctttaaagtatagatatgattccattcgctatgagacaactaaggctcagaaaatgggaatgacttggttagggccactaactgacrgagccattatttgaacccggatatctgtgtctcccaaacccatgatttttctttttagcttgtggtgcactaaaaatgtaagacacagttcttgcccacaaaaaattttgggtccccctggaggatgagaaaactgtgcaaatactgtaattcagatcaaaatgtaaatacttctttgagatttacaaggttgaaaggcaggttaatgtctaaatgaagatcaaggaaagtttcctttctgtgtgggtcttttagaaagctgaaacttcaaggcagcagtatcttctctgaataattataacctcatggaagttcttttctaggtgaagaattttgtaattaaaggaggcacattcaggcgaatgtatcttccatgaaagcattcatactcttacatggtaatggttgtatgatatatggtgaaagggtggcctgggggatatatcattgaattctgctgtctgcaattacaatcagccagtaacagtcacctgttgaatatgaatgagatgtaaatagcatcttgaattaatttaaatgcaattatattgataaactacagaaaaaaaacccacttcaattactatagaaaacaaggaggataaatgatccacattcagaagaaacgtgttggtgagcaaggaggtaagctggcctaaaaataaaaagggctgtgcaaacactatttttgacttcactttctagttgtatgttaactgttcatggctagtcagtagaaatcattttattctttagaaaacactgataaatggtaaagcaaatgagtacattggaaagtctcttcttttgatatctgagttattttcacatatgtcagttgggtgtctcacatgtattggttaggtcgttcaatactgtttcagaataattttgacatcaagaatcacttgatatgtaactggtcaacaaggactgcatttggaagaataagattaggatgaatctgtctggaatctcagctaatagaaatactttttatgcagtttttttcatctctctctttgtctatattgccctgaagttcttctgacctgtcactggtagtcacgggaggaacagcctattccagtaacttgctgatgtggggtttatctacctcctagttgagtgactctaaaacttcaataggcatgagaattgcttggcataggggtggtgcttgttgtaaattattgcagattcctgggccaccctcagagagattgattcaacacatctgggatgggaatctcataatctgcatttaaaatgaacagttttccctcaggccccttcctccattctgatgcctctgagaaattctgcccccgattctgctttctctacatttgtagtcttctgaacgctttgtcacatttctgaccaacttaataaaacaagttagggagcccctatagattgtattacttttgttctgtttgtaatttaataagaaacatgtctttctytttcccatagcatcagtcaactgtaagaagtatagtattcctatacctttagttaaggggatggtatagtagaggtttagcatgtgtagcaaggagctacaaaacccactcctaccaattcaggatgaggactttagtatttctaaccgccttggaaattttgcatttcaaaggattctttaatggtagcaagtagagctgaagaaaaataacagtatctcctgatccaacactattttggtttggtgattgtccacactagtgaaggtcccctttccttggtctacagacaacttagaagcagccaaaaggccatagacctatgcacactcccatcattgtctgcagcctcagaacaatgggttttctctacccagaagtactgtcctttttacaactgttgtgctaaataaaatacaaatatatattttaaacactttataatagttcttgtagatgtttttgtcaaaatatgtgtttttaatcagttgtcatgtaaaggttcttcatccacagggtaaaggtcattgacatggcagaccgactattgtaaatcattcattctttcagcaattgcctacagcgtcctaggcaccattctgtgctctaaaatcaagagtgaatgtaaatgctcttccacaagatttggtatattttctaattaaagatccatatggactaaaactcttttactggatataagggctgaaagttacatatccttataattatacccagctggttgagaataatacgtacttattcacctaattaaaagccacaggcttggcatggtggctcacgcctgtaatcagcactttgggaggccaaggtgggtggatcacgtgaggtcaggagttcgagaccagcctggctgacgtagaaataacacatctctactaaaaatacaaaaattagccgggtgtggtggtgcatgcctgtagacgcaactactcaggaggctgaggcaggagaattgcttgaacccaggaggcagaggttgcaatgagccgagatcctgccactgtactccagcctaggcgacagagtgagcctgtctcaaaaaaaaaaaaaaaaagccacaaaatagaaaatgtatcagtatttctttccacttagttgcaatgtttgtaactatactctagttgtattttgttttagttgtatgtttatgtgacaaactatataaaaacacagtagtgatttatgtaattctgattttgatttaaatttgaaattaagtggtctctcccctttctcctcttctccctgtatgcctcactcaacccctacmcaatcagacaggattagcttccatggagcaggctatgcagctattttcttacacagcgtggcacagtagtaccgacaatttaggaaataactgaagcaaagaaatgaatgttaattaagacacatactgtcaccttctaagtctgcagacttaatggatcctcatattgtatgtttccaatgtcgtttagkttatttggacatcaggtgacctcacaaaacaaaacaaacatttcttgctattgtttctactaaaagaaatgcttaaaagagactgcctgataacatttgggatatcctttttttccactgcagatctcggctgttgtgcttgagcttatttggggcatggatatctatgtgcctataggaagcggagaagtgagcctgagcagtgccacgatttatggggaggcagtaatgagcttctcctgaatgctaattactggagaattgttcagggagacggcaagaactgttggtttgtggtaaattagtcaccagctctattgagrtggactgaaagtttagatcrgagctataaaggcaccaaaatcctgatgattgacggccagacttggtgacagtaccaatatggaaataccccaattgtgctaaacagtggtagataactttgtataaatctaatgaaatgagtacaatctatataaaagttaaaacttccaaccacattaggattaaaagggcggtgagactggwttgttaaatgaattatgagagctgttttggttcttagatccgaaaagctgcccaagctgccaatggtatgaaagaatagtctgctctggaaagagctcttcctggagtctgctggccttcatttgcctggggatcaagctttctggctgtccacacacataaacctcaacctttatctaacacggcaccgggtagctcttctgagaagcaatattctcactccgagcaaaacaagcctgcactgggaggcttttcttgaatcacaggcagctctctttcaattcccagttaccttcctccttcatttccatttccagcaaccagaagaggggagttaatgattcatttgctcccaatgaccttttgaataagtggactgcagtgtttcagccactcttagctcccccacttctccctcctttacttccctagtttggctttaatatttacagcctccttgtcggtctacacgcctgaatgcccgaaggaagcaaaacatttattgcctttccctccctggtgtgcaggagctatttcatccaatctcattccttccctttacatcacatggggaggcttgcctcctggctggggrcgccccgagttcttcctgagtctctactgtttcatctgttgatttcaccaaaacaaaaagatggattctgactcygactcaccttttaactactcgtggccttcctttcccaaaatgaagattcgaagaaggacgtccaaacaaggtagattgcagtatcttttctttccttcacgggcaaaaccagacatcctattctttcttttccgtgtttctttgccagactgtttttccaatgtagcgcgtgtttatacgtgcctttataaaacactcactgtacagatacatataggtttctgaggcaaacctactaattcttcttatgttcctttcactttgaatctacctaccttggtgttattatgtatgtgcaattctctttaaaaaaaaaaaaaaaaagaagggagtttagtataaggtaaatgttttggattcacttcttcagaattaccttggagttaccttggcaataaacagtcctgttgatttaaacatgttcagtcttagtgggatttgcagagaatacgcatgtgtttcatacccagcttctgcatcttttgttttagttttcaagtgtatagtaatttaaaaaaatttttgtaattaagaaaatttttctattttatactattttattgattttatagatgttataaggaaaggagttgaaaaaaatactttcaacacaaaagcctgtgtatcttcagagaatacagtcacattgtaaatagtttactaaaaataatgatcaagtaagtaaaatcctttactgctgaaggaagaagagccatttatctgagcgtgattgataatggaatgggtttacattacttattctctcttacttgcaatccattcttgttgtagtgtgggccatggaaacaaggagcaagctggtgttagggtgtagargaagtgccctgagaagctgttatcccatcctcggctgggcttagctggcagtgattgttgccttctgaggtttaaaaaaataagatagtgtgtaatccttccccgttcttgtcttgtgcagggacgygtgtgcttatgttttcaattcaaggagaaaaggaacattttcataagcttacaagcagaaaaggtgtttctaagcggsttgcctctgcagtgctgtccttcgggagcatacctgttctagggagcaggatggcttaccctgtcaccctgtgcttctcccagaggaggatggacgctagcagttgtcagcaaaccagcttagcttcaagcatcttctttcttccttctgaaatacaatagaagtgtttatttggcttgtttgctctttagcttagatcaaggccaaccccaggaataagatgcatttaccgtctagggctagtagaaagactcagcctgaacacatttttcatgttgctcagctgccatcctttaaattctatcattgaagactttaatagcttatattcaatatacaattttaagacattaaaattaatgttttaaagattaattttactttttatctaagaaaattgatttttctattttattgattttatagatgttataaggaacagactgaaaaaaatttcaacacgaaagcctgtgtatctttggtggatacagtcgtatattaaaaggccatgatatatgtaacttactgttaaatgattcagggggtatatatatatatatatatatgagcacaagcatgcgcttataaaaacaagctcgtacacaartagaaaatgcagtcaaatgttaacaatatgtaaatctgggtaaatagtatatattgctatttttttgtgctgctgttattctttcagctttttwwaaaaaaatagtggatatccttsagcttttctgtaagtttgaaattattcctgaatagtaaataaaaaaccatgtaaattgtttttgagggaggagatacacaaagtcattattactttggagtgaatattatcagttctggtatattgagagcttcttgaggataggtaccgttctgtagagtctaccaaatctctgtgtcaattctaacccagttaaatttgggttgtaatctgctttatttagttttgtatttatgtggcccagtgttgttggggcctgggcagcccaacactggagagacatgggattaatgatgaggaggccagtggagaactttgagaatccattggagttgtagggaatgcatttatcatgctctccttttaaatccaaagttgaagcatggccagtacgagctgcaacagaaagtcatagcatagctatgtataaattaaacatgactcaagtgaaagcaggtacctgggatatggagatgattaactatttgccactgataaaagatgagtgaaaataaggttggtagcagagaggtggggattgttagaccatgtttcacacttgcgttctttattaaatcatggtgatttagttatgaagagcgggtttggtcatgctgtaaygcgagctggacagagtcccagcatcacagatccttagagcctaaagggccttagagatgatctggtccaattccctcatttgacagatgagggggtgttattcatatgttcaacaaacatctggggtggggggtgccrggcactgttcttgagggtatggtgaagtaatgaccctcacagatgctgtctctgcttacagggatcttaacatggggacccatctcccaggacccagacatgccccctccatatagtgggagaaatataagggacttggttttttatcctgatggccagtttgtgaactgtagtctcttgtcgcttacaggatatcataagtatttttgtcagtctttaaaactgaggtggcttgaatttcttaatcattcttcccttccttctaatcaccaccaacatcattctcatatgtaggttcaagtcacctgagaaatcatgaaagtggctttgagagcttggaattactggcttgttggcaaacctctcttgagttaggtcagaaataatgtctgatrtgctctcttgctctttccttgtcctgaacacatatatrttactggcttgtggagggagtgatgtgaaaatttagagcaaggatttggtaacaagaggaaaataacattagcagaaactcgctaataccatatttcaattcaaaagtatatcyagtactttcttatccttatgccttcagcgggaaggtaagaggatgtgacttagaagcagtgcctttggaaatgacccatgtccagagcggagcatgatgaaagcagttaaaaccaggctgcccaagatgtactcctagggtcygcaaaagttggcttgttccttgcataggcagccccaggacaggccatactagcggcccagcagttaatgattggagtgggccagaatccattactgttccacttcaagggctccaggaatgcctgattttctgtttttttgttttgttttgtttttgttttttttaaataggagattcaatcaagaaatgtattgcttattaatcaacgattgaaaaatayaggaattrggctttacccaaggttctcataattgtcattcaatctttaaaatgcatactttagtataaatcattaggccccaggaaatgttgaaatgtttattcctttatgccttttatccacttgtgcaacttccctcgttctctccttccccagctcatatcatatgctgcctttccagtgacacatagtgtgaacatttgttttctttttgctggtgcaaaaccaggctacaattgccaaagaaggcaatgcataccagaaagcttgacaaccttggagagcttagatagcaccatattttctctaatcataatgaaaataactaatatttatatggtaccctattaatcataactactctttactaagctatagtacatgctttacatctatgatatctgagtcccaaaataactctgcagtacagatattgtctctgttttataggtgaagaaactgaggctgagttttacagttattcccaaagtcataccaggaaacacagggaacagtaaccatggtagaataaagaaggagaagggatgaaagaatgacatatgaataatgtggtttttgcacatgttgtcttgtagaagacctgtatgttagatgtgattgtcatcttcatttattagttggggtctccaaggctcagagaggagaaatgagttgccacaaattagagctaataaatggcagagccaggccaagaaccaggacactcgagagtgtccttcctggtatgtttcaccacctcttagtagcggtaagggatggtaaacttcaatgggtagctaccttgggttcaaaaggtgccattgtgcctccccatcttagcttctccctctcctctgtgtatctttaytaggaggagaagtgacagggagagactctggaggagcaagatggtagggttgtttgtgcatcttgataccttcctcctatacacagatatagtacttaaacacatcattggattgggattgggaacagatgcacagacatctggagcacagggtggttggcttaggagaggaagacagaggataaattgggaaaagagggggctgggagtgctttccactgtggcctggaaagtttacaggtttgtcccggacaaaaagatacagttagagagattaggcatgcggggaatggagacctaagaccctgagaccattgttttggactatttcatgagctcatttaatgtttacagggcaggtacctaatctgaaaaaataatccttgacacagtaagtaggcagaggtatgatggcattttagaaatgttaatgatttttaaaggtgagatacttttatctcatgggcwtgtctttttttctttcccttcctcccttttgtcaagtttcatcagatgtacacatgcatgtggatatgcaagtgagtattcagtctaaaaactccccaaatgatagctgaataccataggatgagtaagtcactagagaaatccttattaaggaagggaaacatttttctaaaggtgacataacctgctaagatttctttggctctcaatgaagggagtgtttaacctcatacagagcagtttcaattccagactctgcctagaggcctactaccattgtcagcagagtagaggaggcccattacaaactctttgccaaacaacatagttgcataccctcaaagctccctttagttaaacaaatactttgccaaatttttgaaagtaaatttttctttatttttggctgctcaaattcttggacaaggtatcattctccattaatctctgcaggtggaagggagatagtattataatttactatattcttgttcaggggactcctctccatcacttctagttttagggaaggacaaatgattatttattcwgatacattaattaygtaaggtagaaagtgattaagtcccataggagagatcaggaaaaattactgtcaaagttcaaggcaaagaggatagttcaagttgggggtatcataaaaagaatgtcatttcaatagcctgtaagsctgtggtgagcttgatggggttttaatggcaggatgttccttctaagcaaatggacagagtcagatatacagagaatgtatcaaagtgatagaaaatagcctagcyttgtggcctgttgattcatggcgatacagaaatgcagagaggtgccaaatgttgcgctggcctggatggttagttttgcgtgcttagtacgtttcttccctttgctctttaggaggtggtccctccattactctggccataggtccaaatgacgctgccaacttctcacataactttgccttgctgagtgcagtgggatgggaaccccacccagactaggctgatcacagcaatcctcctgcctgggtcacaatgattggcctgggttgggcamatgatttaagcatagccaatcggaatccttccttgggattattcaaactggaggttggtgggtgatgtcttctttcttggatggcagtgtcttctttcttgggtggcaatgctggatagattggagtgaaaaccgttagctggaagaaaccagcctgtagtaggaggaaatactgcaaacatgtaaagagaagtagatgagtgagagggtcctgcctgtgttctgggcccttgttgttgcccaggttcctgcctctcaaggcttggatgcttaattcttttagttttgtgagccaccctcacatgccttccatacatctccctccctccctcttttatttttgttttagcaaagtcaggtaaatatttctcccacttttaactattaatctccaacttgctgtttaagatgcagcttgagtgtactttttaccaggaggcattctctgaattcccttggggttcagcattgtatctcctgtgtcactctgccttgcgtacgtttttaggaaaggccctctcgttactgtatcacagctgttattaaacctctatamcctaagacactgaattccttgaaggcggccagcccattatcacatctccagcacttggatcccagaaagtaggcagtgaatattgaaagtgcctcrtggcacaaatttacccacactacacccagatagtctttatctacaattgatctgatcatcttcatggggtcccactctataggcagtggggcaggggaggggaaaggatatattttagcctaatatagaaaacttggtctgatacaataatgtaaatagtcatttttggtgactgatgggtatctttacgtaaaatattcagtgtctcaaatttcttccctctcctactcttccttgtcaagctgttgttgaatgtgatttcctggtgacagtggaggttaatggggggtggaggtggagggatggaaagtcccaatccttcaatctacactgcacctcctgggtcctcctaggttctgctgtggcttgactggcctaggctcttccctgaggyatgagtgctttattactgggtgttctggcatctgtgataaaggtcagcagctgggattgtggtgctagtcaggacctggtgattctccttctggcttcaccctgacttggccccaccctggctcttaccctacagaaaccttggactctcttcccctggctgctgacctagatgcttcccccagaaacgtctgccatctggtctcttccttcgcactatggtgggcttcatggcaggccacaggtgctcaattcaggccacttcgtgttcttctcagagggcttcgggatttatgggatcccattctcaccatgcaggcacctgagagtggcccagggaagctgagcctggycctgctgcttgacctttttcttcctgcaagtgtgcttggtaatggttgtcctcatgatggtgaggggtagcctgcaaagtgatctactgcagagtcccagatggaagcaggaaaaacccaccgaccctcagagtagcccatagcttatttcacactgttcttcagaggcagggaaatcacttgtctcatctacctggtcagtgtcatccctgacaatcgagagtcctggttatgaatgttgacaaatcccacatccagctctcattcatccctacctacccggtagtatctcggagttgctcaggataatgaaacaggattcaggaattaagtagggcttctcaaccagaagaaacagaacaatttggaggaatgccaggtagtacttggctttcatcattcattcagccattcttccgtttattcattcattcagaatgtttctattgaggacacataaaaaataagggaaaaaacatacatttccatggagaattctctattttgctagcatagttttttgtctatagaactcaattacttttgaggatatttaggggagccgaaacacatatggctctagggataggcactggagaatagagctcctcatgaatttgaaaggaagaaaatcatttttgtgtgccagtgtctttccattagattataggggatctgacttattcgtagagttctttgtgatgatgacatatggggcatcttcctcattagtttgtttatatttttggagtcacttgaagtggtcttgtcagagtccgccgcttcatttgaggtcttttggttttatcatggtgtttttatatattaggttcttcccctctcggtttgccartttttccttgatgtggactaatttgctttaggccttggagaactgcatcaagaaggaaggggcttgttgattaaatctaatcatgccgaagtccacacaccacacatgactgaatatctgcttgattgcttgagggaagcaagggaagaaaaaaagttatttatacattcaagagtcctttttccaaacataaatgtagggagtcttgaaggctactttgtgctactacaatgcggagtgaggacttggaaagattggtttttgttctcagaggcctgcagtttccccatcttctcctgacttccccctatgtctctcccctattataagggaaaaggcttgttttcttcttcaataatgttgattagttccttcaaaacagtagaataggactctttttaaggatctggttttagagacccaaagtgtacttgttatttacgagggggtttaaactgtgcttttccggggggaaggaggagctggagaaacagctctcactcccagcacctctggaatccactggctttgtccccagctgtttctgtggctaacaggactgccctgagaggcccgacctccttccagggaccacttttctttctaaaggatcccaggaaggttaggtaagttatgagggtgaattgggtatttggattgagactctagtktggtgaacagaggttccctgggttctctcagatattcttgctacatattaaaatctacagagttactttagcttacatatgacccacaggaaattcctgggctgaggataattttggaatttggatgtatcctctctgtaacctcaggtccaactcagaagagtatggccaagactaatatcaggaaaaatcctaagagaaccttagaagaggaatgggcgaggagatgaatgytagtttacctctggaaatgtcctgcccaccccattttttttagagacagagtctcacccaggctggagtgcagtgacaagaacatagctcactgcagcttctaactgctgagctcaagtgatcctcctgcctcagcctcctgagtagcttgcgtatacagacatgcaccaccacatgcagctaatttgtttcattttttttgtagaaacaaggtcttgctgtgttgtccaggctggtctcaaactcctgggcttaagcattcctcctaccttggcctcccaaagtgctgggattataggcatgagccactgcacccagctcagaaatgttcactttcattctgagggtagtttttctttctttcttctgggtaacactaagaccattggtgaaaaggactttctataaacttcagaacttggtgaaggtccctttgaatgaggaaatttgggagattgtatatgcagcagcygggctttgctctctgtcaggaccgtgtttgygttctggttcaaccacttaataacctgggcaggttaatcactttccctgggccttagctttcttgtctacaaaacaaatatagtaatgactcatgcagttatggagagtaagtttggcagatggttaaaaacaattctgtatgctcttgggtaaaacgtttccagttaatacatttatacatatattatcagatatggtcgacttactgataacctaccattttgcataaaattacacagctttacttaagaggcacattttaaaaatatgactttttcagattcttattttaggtctaaggatggttattcttaaaaatctagaaattacagatagtaaagagttgaaaataaaaactgcttatattttgtcacctagaaatagcagttgacatcttagtttatcttttaggtctttgagtcttgagtatcttgaaagttgttgtactcttaaacaaaatgagataatgtatctactgttctgtgaatgttttctcagcaagactcagcaaactgccaggggtgaataggacagggccaggaagtgggcgaacatacctaggtacaagtcacactgtaacacattaatgaaacttcttaatggaaaaataccagacattgctcaaataccattttctttggttcaaaataggatacttggtaaccctaattattacataaaggactttgaactacatagcagagtgtctgcagagagccaccattgattagctgtgtgcccttgggaagttacttaaatagcactgcagtttcctcatctgtcaaatggaattgttttggggatgaaatgtgttaataaatattaatcatacagtgcctggttcagagtaagcaccatagttatgttagctacaatagtagtagtgtctggtataattacccagtgtgtagcaggtgttccagagatgctgactgtgatagcagttcatattttacatctaattcctactttttaatgtttttcttcctgatatcttcttcccagtacctttactttgcatatctgcctgatcatcccattattttgttagcaaaggggtagcctatctgatattttaagtaaaggattaaacagtaatactcttgggctactgctaccagaaggcataagaggtgcatggtattgtggtgttttacacaatctgtttgtagctgagaccctagtcgggaagttacttatcctaccaggaagagcaaaataaaactctcattcccagagtgtgacagatgacataggacaaaatacagagataatagaaagagctcagagaagaaggaaagcctcctggctgggtcaggggacctcctggggaatagacaatactcactggggtttgaagactttttttttttttttgagatggagtctcagtctgttgcccaggctggagtgcggtagcatgatctcggctcactgcaacctctgcctcccaggtcaagcgattctcctgcctcagctgcctgagtagctgggattacagcatgcgccatcacgcccggctaatttttgtacttttaatagagacagggttttgccgtgttgtccagggtggtcttgaactcctgacctcaggtgattcacccaccttggcctcccaaagtgctgggattataggtgtgagccactgcgccagacctgaagatgtttttttaagagtcgctgatagaggctgagggctccatcctgggcccagcaggttgcacagtacctggtgatcagtagacactcagtaagtgttgaaaaaaagaatgaatgaatgggtgaataagtgaatgaaagaagacagtgacactcccatcacaacgtgtagcaaggagagcctatcacaagaaaacctcagaatctgagaaaacattactagatctgaagagaattttctgttcttgatgataaattatttatctcttcagtgaatattcattatccactgcctgcctgtatggttctaggtactggggagatggtgaacaaaactgtctttgcagttgctgttctcatggagcatatgttttattggaaggaaacagatgacatacaacaagcaaataaatccctactatgctaggtgatggtaaggggcatgagtgaaaataaagcaagggttggcggttgccatttcatataagatgatcagggagarcctctttggtaagatgacactggggcagagatgagaagaaagtgagaaagcaaggcatctgcatatccaggggaagagccctgctggaaggtggagcagcaagtgcaagtggcctgaggcaaaaacagcaaggaggcttgtggggctggagtagagtagtgggcagggcttccgagaggctgggagagagtggaggaggggcaggcaacgggaggcactgtaggtcatggaaaactctggccttcactcagaatgagatgggaagccattggagaacgttgcagaggcatgacgtgactcgatttcctttgtctatcctgtggcgaaaaggctatggagggccaagagtaggagcagagagactactgttgtaacagtttaggaagaagaccgtggtggcttgcctggtgttgcagtggaggtgatgagaaaggtcagattctgaatccagttgtgaaagaaagaaaacagtcaagggtgactccaaggaaagacagagttgccattttttgggaggagaagctgggtgttggggtgggaatcaagagttcagctttggacctgttgtgcttgaaatgactgctagaacaactaggaggagatattgaggggatagtgtgactcaggggagtggtctggacatctggactggagttgaaaatgtgagagtcatcatcatatgatggtgtgtgatgccatgctgtcagataaccaagggaagagtggagagagtggagtttgaggactgaccctaaagtagtacaacctgccaacatccagaagatgaggaggaacctgctatagggcctgagaagaaaaggccagcaaggtgggaggagaacctagagagcctggtgtcctggaggataaggacaggaaatgatcaactgtattaaatactgctgtaggtcacagaaggtgcgactgagagctgactataggttctgtcatttgaaggtctttggtgaccatgatgggcactgtttcagcagagtgttaggaattgaactctaaagtaaggctcaccctttttatggtggttagttattctcagtgaacgtttctgctgttcataaaggtctagagttaaaacaaaatacaatgaatgaatgaaaccaatctactcagccacagttaagagatacttgtactgagaggccttcacctgactttcgcgctctggcatccagagtgggccaaaccaggtcagcagcaggtttgcagaaaactgccttagctgggtttgtttatgtctgggcgtgggtctcttacataaccagtcaagtaggccacattttgctttagctacaaggctcttagcttcttaagggagaggtggattttgttggaaatcagttgaagaagccctaggctgggccgtgtcattaactgtttcctgctagacttgaagtagttgtcaatgtcagaagggaggcatctgcaactgcctctccctctcccccttactagttccaattccccttctttctatgggtggaatctatttactttcaattgtctcccctgtgtcacctgattagagcatttagtacaggaaggatgggctgatgaaaattttgacctcacggagcccttgtggagtcacctagatcacattacaaagcagtgagaataggagagaggagagctggggatccccttggagttgctgtttatcctccaggcactttgcagtgagaagctggcccgagtccacttcatcatgttaggacatcttagtttctgaaatcttgcctttgttcttgagaaatgctgtctctgattgtctaactttatcctgcagttataatccctcccatttcatgagagctcatccttcagtccttggaggtaaatcctataggcagtttgatggcttttctttctcttcacattttatgtttttcagttaaccatgtccaggatagatttttcaaaatttcttaacaccagctaagtctgatataaaagtcacaacattttaaatgtgcttcgtgaagcaaatggaatgttttgtgcatgccagtggccttgggttgtttttgaatgtgtaacattatagcaggggttgaaattatttttaaaaagaatcagaactaaaattatgcaacctcatttactttttaaatatttaggaagcataactaataaagaatttatagggtgcttactatgtcagagtctgctctaatcacttaaaatattaactcatttaattttcagaataattctatgagatggatatattattgccttattttacagatcaggaaatgcaagcacagagagcttaagtaacttgccccagtcacacagctaataggtggtggagtagagacttgaacccaggcagttcagggctcatgcttttaacyactgcaacacacgagtgtttttcactaatttaaaatctgcagccatttttctaaaatgggagttgagctttggctacttttatattgtctttgaaatatatgcttaccaaatattaaaaattatcaacaaaactataatgttaatttttagctaagaaaaacttcctataagacagcattaatttaaaacaagtagctggttcttattgcaaattatttctatatgctcattgaaaaagcagtccatttttggggtcaataactttttcacttaatttgttactggagtagttacatatagaagtgataaaatcatatttcttgaaaatattgaaaagatacctttaaaaaaagaaactatttttggggactttctgacctaacccaaaaagcctgctagacaaatttgaaaagggctgtaacacttaaaaaaatgaaactattatagcttttcctttgaataggctgaaacatggtagagcaattagccacttcaatatacgtagctgatgtttacttgaaagtgtcctttaaggcttattttcctttcacgatcagtcttctgctggttttaagcccattatttgcagtggctagtgttgaagttaataaaggagtggtggtcctgttagtctgcatcattttcttgtttgtgagtctgtgttcacttctagatcctattgtcttgaggcatcctttgacaagcagaggctatgtatgcctcagaaaaatactcaaaaggatgtttgtgccaatgttattaatgattgcagcaagtgattaaatctacatgtcaggttctaggtgacagaagtagagaggagattatgctggattatgctcttgcacacctatgtccttcacaagacttactgtctcggtggagccattacccgagtgacaggaagatgacatgggctaagccaccttttcttcctttcctttcctttttcctttctcctttcctttcttttttcctttttccttttgtttctccyttcctttcctttttcctttcctttccttttcctttctttctctttctctttctttctctctswctctytctctttctttctctctgtctttctctttctttctctcttcctctctttctgwccttccttcctttccttcctttcctttcttccttcctttccttcttttcctttttcctttttcttctttgagacagggtgttacttattctgtcgtccaggctggagtgtagtggcgctatcacagctcactgcagcctccacctcccaggctcaagcaatcctctcacttcagcttcctgagtagctgggactacaggtgtgcaccaccacacccatctgatttttgtatttttagtggagacagggtttagtcatgttgcccaggctggtcttgaactcctgggctcaagtgattcacctgcctcagtttcacaaattgctgggattacaggtgtgtgagccaccgtacctggcataggccactttttgaaagtatatggtgaattcttctaggaatagtccatcttggagatgtccacaaacacaaagatgacattgaatcatagagtcatgcaggtattttctttcratcattctgttgattgaaggagaaagtctcagtgtggtacccttgcatctttaacatttcttgaatccttcagaatctccctttrcaacaaagagtcagaatctaatttcattgttttgtttgcatgatttcagtacatataattcccttcttcttttttttgagatggaatctcactctgtcgccaaggctggagtgcagtggcgcaatctcggctcactgcaacctccatctctgggttcaagcaattctcctgcctcagccttccgagtagctgggactacaggcgtgtgccaccatgcccrgctaattttttataatttttagtagagacagggtttcatcatgttagccaggatggtctcgatctcctgaccttgtgatctgcctacctcagcctcccaaagtgctgagattacaggcgtgagccaccgcgcctggccttcccttctacttttgacaggaataatattggctttctatgtacagtggggataagatttttcttaatcttaggtattttttaaattaattttatttaaagaaaaaaggcgagtccatttaaagatgggtactaaagaatataggtgaatatatccatgaaacaatataggtgatatgtaaatatggcaaaattgtgaatttggtagaagaatgagaaaagcttgggaagtgttgttctaatatctaatatggctgattttgtagagacccacaatctcttctttgaaattcttgggaccagatttgttttggaattccgaattttcagatctttttggcctggtgttcatactgatatgatatgactcccataggagacactggggcaatgctatcatcaagtgtattaatatttctgcagcaaaatgtatgacattgacaccaagtagagcaagtaaagaatatgcatggtccaatgtgggctcaggtcagattgtgccacagaatatgtttttgaaccaaacttatggggaaaattctgattttcagagctttctggatttcagaattgcagttaagacaatgtagactggccgggcgtggtggctcatgcctgtaatcccagcactttgggaggccgaggcggctggatcaygaggtcagraggtcgagaccatcctggctaacacggtgaaaccccgtctctactgaaaaatacaaaaaattaactgggtgtggtggcgggcacctgtagtcctagcaacttaggaggctgaggcaggagaatggcgtgaacctgggaggtggagcttgcagtgagccgagattgcgccactgcactccagcctggtgacagagcgaaactccatctcaaaaaaagaaaaaaaaaaaaaaaaagaaaatgtttttctttaacatcgtatgtttcctccagaagcttaatgaatctcacacttcagtgttctgtgtggagaagagatagatttagaagcagaatctgaagccagggccatttgacttgtgaaactacaattcatacaactttggaacttttatgatgtcctcattaccttccaagaaagaatggattttttttttgctcatggtacttcagcccaacagttattaatctttttttatttcctgattcacccccatgggcttatcaggttttatgttatgacatagataagacaggcagtgggacatgtgacatttctaatggactaacagcagtactattcctatgtacctattcaagaaaatttacggggatgttagtgaggatggcatttactataggtataacattgactctgccctgtgaaagtcatttaaacatactgaaaatctgttattaccataacacactatgattagtattaataaccttgcacttcacactgaacatgsttaaaaattgctatccataataattacaaatttaatagtaattctgaccaataatatttattgagcactttttaccaggcatgtgtcaagtctttacatgtctgaacgcacttaatcctcataaccacactatgaggaaagcataatagtaatctgcttttatggatgaggaaactttgtgaagatatctagagggctagtaaactagccaaggtcacaagacacaaggcgttctagctcgaatgtgttttattgcctttgactcttcattctctacaaacacagtaacagcttaactctctgggactcaattttaggcaacctcatctatttggaacaaagctgagacatgaaagcaagcataaacatttccgtaaccaaaatagaagtaaaattctccacgtgtgagattctgcatgttagcaagcagtaccgagccagaactgctaggctgtgtactctcttgggtcctttgatagagggtcattgaatctgagcatgtcagtggaaactgaggatcacagtacagtcactaatacttctaagttattaataaagggaaattaagtttagttatcaataaagggaaatgtatagtttttgtttgtttgttttgagacggagtttcactcttgttgcctagwctggagtgcaatggcacggtctcggctcaccgcaacgtccacctcccaggttcaagtgyttctcctttgtcagcctcctgagtagctgggattacaggcatgcgccgccatgcccagctaattttgtatttttagtagagatggggtttctccatgttggtcaggctggtctcgagctcccaacctcaggtgatctgcccgccttggcttcccaaagtgctgggattacaggcgtgagacaccatgtccggcctgaagtttagttactaataaagggaaatgaagtttaatttaaaaatrtagtagaaatcaaaagcaaagatttaattgattttacaaaggcctctaatgatggggaaaataacgcttgaagtgggcaaatatttatctatcyagaacttttcatcctacgtaaaaattctagatagctgaggtttggatatagatgaaaaattacttgcatgtagatcttaaaatctagccaaaagccctcttaaaaaatgcacttgactttttttcttatggtctaagaaggtaaagcttgactgtaaaataagccccttctcctttatttgccctgttttcatttttgtactctagatcgctccttcgatatcctaaaaaaatccaagccgccctcgacattgcttgctgcaggccggctttcagacatgctgaatggaggtgatgaagtctacgctaactgtatggtgattgatcaggtaaggcccaactgacattacaggatgatttctacctctctccaaaacctgggtttgtaagaaatagattcagcattgttgtgttcctttgacaattttagcctaagagcagcaaagaggatgctgttgtggggtctcattgtatgagcatttaagcatttaacttaggtgcttacttcagaacacaagacaccttactcaacccagaggcactgtcagggaggggtcttgagatactgccaaatgggaagagtgtgagagctcttcttcggggcccaagtaggaaatgacaactgtgcaaccaatgtctcctctacagcttttcaaaaaacagtatgtatatgacctgattatgcaatatttgtattcaaatccagcaaatgtaatgagcaggtgcttggtcccagcaccataggaaactgtcacataaattacttgcttaatcgatacaacgcatctattaacatgtagtaagattgtagagctttcatattaatacagaatggtatcatattataaagaagctggaatcctttggaactttccacccagtccctgatagagacttttgagttaaatctcacagaagcagatggtttgaatgtgctggcatcttcttgtcttttgttcttttctctagctcagtgatcttcaaattttagtatttataaaaattatagatctgaagatttctacacactaatatatggaggatttaagggattttcaagggtagttttgaygacacaaagtctgccttataaactgactttaaaacttaatccctatataagatccaccctatctactcactgagcagtaagacatttaacccttttatgttgttagtatgcatgtattttaccctatttatagatatattctgtgatctaaacttttttttttccatctagagctcaatttcagcccttcagtagcacatctctgcattttccttttgtgttacaaagcactgttatatcaaatgcagcacagattgggatggtagtcataatgacagagaaaccaataaatcagaatggacttcagctgtaaataactggtatagttgttttggtataaactaactgaaggtcagtcctagttatagaaatctagaatgggtcatggagtgtaggacacagtgggagttctgaggagattttcaagacacaggatgtgttagtcccttcccacactgctatgaagaaatacctgagactgggtaatttctaaagaaaagaggtttaattgactcacacttctgcatggctgaggaggcctcaggaaacttaaaataatggcggaagatacctcttcacagggcagcaggagagaaaatgagtgctgagtgaagagggaagccccttataaaaccatcaaatctcgtgagaactcactgtcatgagaacagcatggggaaaaccaccccccatgattcaattatctccacctggtcctgcccttgacacatgggaattattataattcaaagtgagatttggatggggacacagtgccaaaccataccacagggtaattggacttggtgtgttctagccatgttctagtatttatttatttttttccagctttattaaggtataatgaacaaatagaaattatatatatttaaagaatacaatgtaatgttttgatacatgtacatattatgagataattaccacaatcaagctaattaagcacatatatcatctcacatatttatttttgtagtgagaatacttaagatctacagcaaatttcaagtacaaagtgcattattaactatagtcaccatgttgtacattaggtctcaagaacttattcattgtgtaactgaaagtttgtacccttcgactaacacttcaccatttcccccaccctccaacccctagtaagcactcttctactcactgtttctatgagtttgacatttttacattccacatataagtcagatcatgcagtatttgtttttctgtgtttggcttattttacttagcataatgtcttccagattcatccatgttgtcacaaatggcaggattttttttcttttctagggctgaataatattcctgtgtgtgtgtgtgtgtgtgtgtgtgtgcatgtgtgtgtttgtgtgtgcaggtatatggaatctgtcacatttcagtcaatggtggaatccatatgcaaaggtgatcccataagattataataccatatttttactgtactttttctatatttagatatataagtacttaccattgtgtcccagttgcctacagtattctgtatagtaacatgctgtatagatttgtagcttaggagaaataggctataccatatagcctaggtgtgtagaaggctatactagcaggtttgtgttagtacactctatgatggttgcacaatagcaagataaactaaggatgcatttctcagaacatatctacatacttaagtgaggaatgactgtacttatccttggagtctccaaagtgatagtcttttgtatgctagtgagatgactggtggctggcagcccctaggtagtttcaggatgtgggctggtcaccggaaaggccaaggcagggttacaggattgggattttcagctccacctaccagcatccacggaaggaggaggggctgaaggttaaattgatcactaattactaataatttaaccaatcatgcctgcataatgaagcttccataaaaacccaaaaggacgggccrggcacggtggctcacgcctgtaatcccagcactttgggaggccgagacgggcggatcacgaggttaggagattgagaccatcctggctaacatggtgaaacctgtctctactaaaaatacaaaaaattagcagggcrtggtggcgggtgcctgtagtcccagctactcgggaggctgaggcaggagaatggcgtgaacccgggaggcggagcttgcagtgagccgagattgtgccactgcactccagcctgggtgacagagcaagactctgtctcaaaaaaaaaaaaaaacccaaaaggactgggttcaagagattctggatagctgaatacatgggggttcctggagggtggtgcacctgtggagggtgtggaaactctgtgccccttccggagttccttgccctaagcatctcttccatctgactgttctctgtatcttttgtaatattcactataataaaccaggaaatgtaagtgtttccctgagttctgtgagctgctctagcaaattgattgaacctgaggaggggctgtgggaaccccattttatagctggttgataaaacaatctggggcttgtggttgtcattggaagtagtggggagtcttgtgggactgagccctgtgggaccagactccatctccaggtcgatagtgccagaattgaattgaactgaattagaggaaattcagtggtggattgcttccttgctgcatgtcgggrgaaaaccccacacatttagtcacagaagagttctgtgttgattgttgagtaagagaatagaaaaaaagactgtttttatccctatattttcagaaaatcatatgtgccacattttctttattcatctgttgttggacacttaggttgattccatctcttggctactgtgaatagtgctgcagtgaacatgggagtgcagacatctctttgggatagtgattctgtttcctttggatatatactcagtggtgggattgctggatcatatggtagttgtattttaaatttttttaggaactttcatactgttttccactgtggctgtgctgatttacattcccaacagtgtataagaattcccctttctccacatccttgtcagcttttttttttttttttgtctttttggtaatagccattctaacaggtgtgaggtggtatctcattgtagttttgttcatttttctgatgattagtgaygttgagcacttttgcatatacctattggccatttgtgtgtgtcattttttgggaaaatgtctatttaggtactttatttttaaatctggttatttgtgggtttgtttgtttgtttgtttttgctattgagttgcgtgagttccttacatattttgggtattaactccgtatcagatgcatggtttgtaaatatcttctccaaytctataagttgctgttttattttgctgtttcctttgctgtgcagagattttttggtttggtgtagtcacacttatttattttgcttttcttgcttgtgcttttggtgtcacatccaaaaaataattgccaagaccaatgtcaaggagtttttcctctgtgcttcctcctaggagttttatggtctcaggttttatgttaaagcctttattgcattttgagttgatatttgtatatgtggtaagatagggatccagtttcattttttttgcatgtagctatccagttttcctagtatcattattgaaggatctgtcttttctctgttgtgtatttttagcacatttgttgaagattaattgactgtatttatgtgtgggtttatttctggactttctattctgttccatgtgcccatgtgtctgtttttatgtcagtaccataatgttttgattaccatatctttgtaatataattttaagttaggcagtgtgatgcttctgactttgttcttcttgctaaagattgcttgagctcttctgggtcttttgggattccattcaaatttcaggatttttttttctatttctgtgaaaaattgccattataattttgatagagattaaatagaatctgtagttcactttgggtagtatggatattttgacaacatgagttcttccaatccatgaacacaggatatctttcatatgaattcttctaatccatgaacataggatatctttccatttatctgtgttgcttcaatttctttcatttatgttttatagttttcagtgcatatatttttgtcatgttttgattttaatagatttattctgctgccatattttcttagctgtttaaataaaatacttcttgagcccttattttttttgttctgagccttagtgaatactgtaactatagtatttccatttacctcaagtaactaaaattgtaaattactcaatattatgtggggaaaactatatatattatgcttttatatgttctcagatacattaaaaatgcaaaatttaccaaaccaaagatttggtaaataaaaggttaggatataattttctttcgttctctttctttctttcttccttccttccttcctttctttctttcgttttgttttttttttttttgagacagagtcttcctctgtcatccaggtgggagtgcaatggtgccatcttggctcactgcaatctccaccccccaggctcaagcaattcttgtgccttagcctccagagtagctgggattacaggtgtgcaccatgacacccggctaattttggtatttttagaagagacagtttcgccatgttggccaggctggtcttgaaatcttggcctcaaatgatctgcccaccttggcctcccaagtactgggattacaggcatgagccactacacccggccaagatataatttttattctggaatattctgggtgaaagaagtattgctttaatgatgtgaagccaaaaagaaaaaaaagtgaagcatgcatttagagagaactcaaacaagttaattcaacaaactgcaacatagcagattgccaagttgtgcattgtaaactgagaaataaaactaaatctgcaacaaaatcacaaagtccattatattagcatagtactttttttttatagcccctatatctatttgaatagcaaggacaatgtaaggaatacaaattctgcatatttaaaatgctttctggcaatatctgaaaataatcttatctaattttctttatcttcctcaacctggcaaggaaacctaaaaacattactagcttatattaatgtttcccattaattttcaaggttatcaaccttcctgttgagaaaattcacatgatgaaagttactttgaaaatttctgtcatataaactacttwgaaaaacacatttgtttcataatttcagtacagagaatccctgtataccctttactcaaattcctcaaatggtaatattttactacattttacrttgtcattccctgagtgggtggttatgtgtgcatgcaaatagttaaattatgtctataaatgtttcttaaccatgtaagaataaatgaaaaatatggtgttcctttacctcttaatctttcatggtgtattttcctaaaaacatggatagtttcttacgtaagcacagwacagttaccaaaatcataaaattatcatcgatacaatgctattagctatctccagaccttgttcaattttagcaagttgtcccaataatgttccctgtggcaaaagaaaattccattacatgtgttgcatatagttgttgtgtctctgtagtctcctttaatctgggacagttcctcagtctttgtgttttatggcactgatattttaaaagaatacagaccagtatttttgttcttgtgttttgctaagagtgtagtgtctttcagttttggtttatctgatatttcctcataattggattcaggttaggcatgtttggcaggaatactacggaagtgatgatgggtgcttctcagtgagttgtatcagaaggcataggacrtcaatctgtcccattactggtgattttattaatatctttcatctgccaagttcctttttcagtaaaattactgtttttaaaaaattattaagtaccatgtcaggagatattttaagcccttgtaaatatcctgttgctcattagactttcacccattaattaagcattcattaatggtttttgctttaataaattatgatgatgctcgatgatttaggattctaacatttccccttttgcttctttttccccttcactgctctatctctaaatggtgttactgtcttcmtttttactgtcctcactccagacttgatgccttttgatgaccgccacctcaaatcatgagtgcttaaaagtacgcctttcttagagcaagtgctttcatcagctaggactctttttcatgcrtgtgggttgagctttctctttctggggaggatttttaagtaagtcttaggccctccagaagttccgtcctttctctgccrttcagagtttcccgactccccttaccctccgcagagtcttatagcaggagcacgaggscttacctgctggatttgctgttgattttattatttacaggtaatttgaaatttgggcattttctttcttctaatgatgctatgtacgtgcactttatgtagctttatttgttctttttgtttggtgttgctttttgtgagactcagctttatgtgaccactattaccttggtacccagattcctatgagctactttttgaatgaagctgtatagtctttagttttctcctcaagtatttaaaacatttccccctcattttgagtcagtggttcataaaatgttagaggcataatcagcttctggttttgtaataaaggaacaaccttataaaatactcagttggtcttcctttatgtgaattataggatagctgccatgtgaacaaaaacatataaaataattctctgtttacataaaacaagagtctcactctgtaacccaggctagagtgcactggcgcaatcgctactcattgcaaygtctgcctcccattcaggccattctcctgcttcagtctctgagtagctgggattacaggcgcccgccaccacaccctggctaatttttgtatttttagtagagatggggtttcaccatgttggccaggctagtcttgaactcctgacctcaagtgatctgccagcctcggcctcctaccacgcctggccagaagtttttaaattgggaaaattttattaattcttagctaggccaatcttacctgcttttactcaggaaatgtttttctttcaacttccaggttggtgatttggatatcagctatattaatatagagggaatcactgccactaccagccctgaatccagaggttgcactctgtggcctcagagcagcaaacacacccttcctacagaaaccagtcccagtgtgtacccacttagtgaaaatgtcgaagggacagcacacactgaagcccagcagtccttcatgtcaccatcaagttcgtgtgcttccaacttgaatctttcttttggttggcatggatttgaaaaggaacaaagtcatctaaagaaaagaaggtaagagtctatattgtagaggaaaactgtagaacatcaaagaaccttataggtagacttcaaaaattctagttttaaactttttattgtctctaccacttttatttgcccatcaaaatgtccccttttaggktcctatattcactgatttgaaagtaagacacttaagaaaactgactaaaatatgataaaggaaaaccacgatgagataccagtttatactcacttgactggcaaaaattaaaaaatctaacaatcccatgttttggtgagaatgcataacatggaaattcctgcataaagatgataggagagaaaattgtgtaacttgggaaaataatttgacattatcttgtaaagtcaaatatgcattttcctctcgtgtactaggagacctatatggagtattattatagcagcaggaaataacccaaatgtggaataaataacttatatatagttacacaatagaatactgtacagtaatgaaaatgaattagctacaattacatctgcatgcataataacatagaccttagaagcatgaaggaacaaaaaaagccccaaaatacttgttagatttcatttttatagaatgcaaattaaaaaatatattattatagggcacctacatatgtgcataagctataaagaaaaacaagaggcctggcgtggtggctcacgcctgtaattccagcactttgggaggccaaggcaggcagaatgcttgaactcaggagctcaagaccagcatgggcaacatggtaaaaccccatctctaccaaaaatacaaaaattatctgggcatggtggcacgcacatgtggtcctgatacttggcaggttggggtgggaggatcgcttgaacctgggaggcagaagttgcagtgagccaagatggcaccactgaactccaacctgggtgacagagtgagacctgtctcaaaaagaagaaaaaaaaaaaaaaagagagaaaaagaaaaacaaaataatgaaggggaaaaaattcctaaattcaaaatagttgttacatctagggaaggaaatagggaaatgggaatggaatgaatcataacagagtttccatggtagatggccagtatccaagtttcaaggtgggtgggctcatgagtgtttgttttatttaacatatgtttgtattttatattttaacataaaatttatcttatatttattttactttcagttaccttatattttcttgcatatataaaaactcattgaaatgatagtttcattgcatctgatatgattacatatattagtgtgtgtgcacacatgtgtgtccatatctgtatatctgtatctgtctatctgattgtctattttcttttgggaacaggccaatttccactaatttcattttatcctgttgatcacactttccttagggagtagcttttttttcccccatatcctacccatgtgattatatgttcattttcacrtataaaatgaatcaaagtgaacataaaatgcacacacatatgtgactatgtatataaatatttctctgtgaatgaacatgcacataggtgaatgagtattcagcagggagttaatatagaggggagagaaaggtagaggaaccagcaatcagtaggtgtccatcactgagatacaccacaacatgcaatttgaggttgtaaaactttagcacatattggtaccaagggttatgtgtgatgtgtaaataataaaagacttgctttagatttatactttgtgaattatggttttgtagatgctgggtagtcactactataatttgaagtgataggctaatttgaactgtccacacgtctgcttgggacaagagactgccagtccacacaagattctatacagttttgcaaaaataaattgagctatgtgtgataaatgcattctagtggatctttaagatctgtcaagtggccaggtatggtggctcacacctgcaatccccgtactttgggaggccgaggcaggtggatcacctgaggtcaggagtttgagaccagcctaggcggccaacacggtgaaactcccgctctagtaaaaatacaaaaattagctgggcatggtggcacacatctctaatcccatctactcaggggaggggctgaggcaggctcattgcctgaatccgggaggcacagatttcagtgagcagagatggcactactgcactccagcctgggggacggagtgagactctgtctttaaaaaaaaaaaaaaaaaaagtctgtcaggtgtgtgagcccccagatctcaagagataaataagttctttagaagtcttctaggaatatagcatggaaaagacacaaaatagtctgtctgttttattgatacttatgcagatacttgcagagtatcgaaattatactttctgatcatggtcttgtcttggaaagtttaacatttcactgctacagatagaatttttcctctgtagaatataatttagacaaaatatctgttttgagtacaggtaattagaagcttctgtgaagatgtcactgctcaggggaaagggaggaagccaggagaggaaggagaagccattctacagaaaagctttctggctggttccacgagctgacttcatctcctttgccctccctctcctctgaaaaatgtaggaatgaagggagagaagtcgcaatccctggaaagccctggggtggctgtgggtcccttccttcagtggatgtcatggtaggaagcacagttgataacaaactcaaagtgaaatgcacttaatttgttaataagcagataatagccctagaggctggaaacctctaatgaaggagaaatttgggggcacacagtaaaaactggagttaatataaggacatagctgactgggacctgagtcctaagttttctagggtttaaaagaatattttggtgaaactaaaatatgtatactatgtaaccattatgttatattatttaaatgtaataactgttttgagaagccacaaagggaagataagtaataaaaacattaatttaaaaatactatacagcaaaaaattaagcagcagacaagtgtttgtttcattctaaagcttgtatttttcaaaccttttaaaaaaactacagagcaagaaatgcatgtcacaccatgaacgtcccctatctcccataaaatttaagtgaagtcttataaaatgatttgtgcaacatattctgatattttctattctatatattttttaaaaaactctagttacaacctaatgaattgatttcttatcccactactgggaattagaaaaataatatcgtaaaacaagaacctagaggttatcctgaagaatattgcctgtgccaccaatatcttaggttaatagcttaaataaaagtagtagccccatttgaatgaatagaaacaatgttttatagtatgcaaaataaaatactgatacttctaggatgtattcatagtgatgatgaaatgctgtctgtaactggaaaggcttgtgttaaaatcggatattattgcgggctgccaatcatttgaagaactattttccactagtacagagatcacaagttgaaagacaagtgctgaggtacaagacatgggcaagcttcagcccgccttgaaatctccttccgtctcagattgttgtactaggaaaccacgtagcaacttgaaatacctgtaattattagattagttcaaaaactaatctgtgtttgcattagaggcatagtagaataagaccaggactcataccatgtattcagttaacttactgtgtccattaaatagcctatttttttttaaataacctaaacaggttaattcaaagtttcattttctggttcttgtatttcaaaataaaaaaaaaagcctatgttttttttttttttaaataacctaaacaggttaattcaaagtttcattttctggttcttgtatttcaaaatcaagacagtttcattgttttgttattaaaattataactccagaactgtaacaaccaaaaaaaaaaaaaaaaaaccacaaaacacacatttgaaatgcttcgtgcattaacatgcacccaggaaagctgttggcctccaagtttgagtcgtttaaaacgtaatgttatggaatagacctgggatgtagagggtcaaattctttccttttaatttcatggtttattaaagttaaatgaggaaaaaagttgttgtcaagcagcattactacctggttctaaggtagagttttcaaaggaatcattttttttttttttttttttttttgagacggagtcttgctcttttgcccaggctggagtgcagtggtgtgatcttggctcactgcaagctctgcctcctgggttcacgccattttcctgcctyagcatcccaagtagctgggattacaggtgcctgccacaacagccggctaattttttgtatttttagtagagatgtagtttcaccgtgttagccaggatggtctcgatctctgacctcatgatccgcccaccttggcctcccaaagtgttgggattacaggcgtgagccactgcgcccagcctcagaatcatctttttttaacctctaaaaatgatcatttagtatgacatgtttgggacattgcacgactcacttctgaactgtgtcttgacatggtcctggggcggatgggtgggaccttcacacatctctccttggtgtgcctctgccctcccgagcttcccagctgagggacaggggagagaatgacacttctgcagcttagtcacatgcaaatcccccccagaagcttccctgcaaacagcccagtgactctgtttccaccagcatttaaaatatttgatgggttaccatttgggacttgcgatatcaataattatatttacaaaacagaagtggtgaggttagtactaactcaaaccagcttttgtttcttcaggcatttgaaatgtcttttgccccagtcgtggtggctcactccagcaatcccagcactttgggagactgaggtgggtggatccattgagcccaggagtttgagaccagcctgggcaacatggcaaaaaacacaaaaatcacaaaaattggccgggcgtggtggcgcacgcctgtagtcccagctactctgaaggctgaggtgggagcattgtttgagcctgggagacagaggttgtagtgaaccaagattgtgtcactgcactccagcctaggcaacaagaacaaaactgtctcaaaaaaaaaaaaaaaaaaaaaaagaaagaaagaaagaaaatgaaagaaagaaatggcttttgctaggtaggaatgttcattyggggtaacataaaattttgtttaaaaagagatttggagggaggagaaaaaggctaattaaatactagttggaaattaaatgaatacctattgcaycccccccgccccagtgaaagaatctggattcagagaagtagaaaccaatgacgctctgtgtccttccttgcttctttacttacttgctggctttgtgctttagttctagccttgatgccttggacgccgacagtgaaggggaagggcattctgagccatcccacatctgttacactccagggtctcagagctcctcaagaactgggattcctagtggggatgaattggactcttttgagactaacactgaaccggattttaatatctccagggctgaatcccttcctctatcaagtaatctacagtygaaggtattcttattgctattaatttggtatattgcaagtgtggagaatatgttgtctgcatttacccatctgtatctgaaagrcatattatattttattcatacatatgaactattttttttgagacccatgtgatatctgattgagtctgtctttttaatctttcccactctgttttaatttttataatctttactcaaaatggctgatttacattttcattaattcaccatgagtacataccatctttctttcacatacttggaaaattttatcattttacaatgatttctcccatcatctcttaagcaaagggagaaaaaccratagtattaaatgagtttaagtgatcaaacttgttttgctcacgtaaataattgtatggccctgatgatgaggtaaatgatgttaataaggtagaagtgatatttattgagcatttctggctgcttgaactaatccggaatatcacagattttgtcaacttttccataggagccaggttttatcttgttggctatttcacattggagtttcatttaggtgtgcttgtttttttgttatttatttacttatttatttattaaaaaactaaatacattgctctgaatgtaagaaagcccttttgcgtttgaacagattttttttccctgtttgatttgttattttctacttgttttcttcttaagtttacttattactataaaacaatgtgtgctatggcaaaacttctctttctaacgtatggttgttatgataataccttmtttttgtagcatgccctacaatatacaaaatatgttttatgtatgtacaaaatatataattgcctcataactcacctattacataagtagtgcttttatttaattttattttttgagtagatgagattctggaagggttggagttctgtccagctttgtgtcaccagcttggtgatagactcagaactcaattctgggtcttttgagcacagatcctgtatcctttaccctctgctctaagacctgcagagctgccgtaatcttttgcatctgaaggtcatgtgatatttctggataatgagaartttgtrtggttgttatgtagatacttcttagttttgcatgttgagtggaactgtgaaaagttcatcattacttggatgaaaaataatccagtctcttgaaacagtttcatgttgctcatttttaggaagaatctgaaccataaatatatctgccttgcctctgtaattaaccagtataactttttgccaaagttttggacaattttcaaagttctattgtcatgacaaatggttaccacgtatacatgactctgaagagggcccttagtggccagctcactgtttagggttataggacaacttgggttggccttcttgacgtctaggcccggtaggtgctccctaataagataggagccaaagcccaagggccctttgaagcaaggttaggcttccatttttcaactttcctccaggctccttaactaaactaatgaagttagggtaaccatgtgtttttccttagaggaaacaaaagagaccagtgctcctgaaggtcagtttctgatggtttaattttagtaaagagttttgcattattttcttttagccttaaccttaagtgatatcttaaaaatgcatgggcaggatcagtcctaagggctttataggatagaagttgggtactataaatggcttcartggagttctattgcatattcacttaaattttctggaacataagaaaactatgttttaatgatcttgccatcttgcattttcatgtatgttgccaatataataataggaataataagtaattgggacaacaggaacaaaaccggcaagtcattttaaagtagtaatattaaggatgtataaattagtgatatccaaacatccaccccagaaagtgctagatggaaggtctatcaaaaattgagtacagattggaaggatttgtatattaactggatatatttttccctaaaygttgcagctaacattataaacttaaatcatggtttggaagtctaaaaatctcttataattgtaagtggctattccactatcctctagtaatccttaaatatagaaatctcagttaatatagaattttgttrgagggctacagtaaaataacaaaataactgacacctcaggtaaaaataataaactcattgttgaatatacaaagaaaaagtcatttgtcttaagttttcatttttagccaagttggctaggatatcatagttgcattctatagtatatacaggaactattccccaagctgaaggttgctgaagtattaaaatggcaataacattttaaaaattgtgagaggaaaacagaaacacataatgagatcatatcagaaatgttcaggttgaatctcttttcaaaggtgcaaatttagtaacatttgaggtggtgaatatatrttttcagaccatgtataaatttttaaacactttattataatctcttttaggaatcactgctttctggagttcgctcacgttcttattcttgctcrtcacccaaaatttctttaggaaaaactcgtttggtgcgtgaattaacagtatgcagttcaagtgaaggtaagcatcatttaacatttggctttgaaaacactctattccagaacagatttttcagttagtataagtacataaaatattcaagaacagcagacaagaattttccrttctgttttcataactggtttttctaagcctgacaaaattcttttcttattggataacagccaaatttgattttgatcagatttgattttgatgaaattacaaatacatgcacacctctctgttactttattctttgaataaaatgttttcctcaaggatagtgtaaattagaattgattccagttatattattatgagggccttagaggattttatttgagtaaattataaaaattacttttgtctcatatatacattgctaacataatccaactcctcagagccagagtgttgcagaatggattttcttctttctttgtttagaaagggactttggagagttgaaataacatatttgtaacatgattaaatatatctcaacatttttttggtggcaatgtaggcaattagaaatataacttttaggcaataaacttttaatttaaatgtaggatacatacaaaaaggagtgcaaatcataaatatgcatcttgaattttcaagtgaattcagatctataaatggaaaaattatgtacaacttagagctccccttgtatcctctctaasccactcctcccattttcacctgcccccattttgaaatgtaattatttcatactttctgtaattaatatgtaataattrtattaaaaagcatatttgaaagtattcatgccaatgcataatacatagcattataatgaaatttttgtcaatgtcttagagaatatctttattgtctattatccttaagggacttaaaagattcagaaagcaagagatgaacttaagtactctgaagtactactcaaatattttcttaagataaaatatttaaaataggatttattttattccctctcttttttcttattcttgcttattaaattgttattttgcatttttatgccatgcagaacaatactgaaaacataatcttggtgcttgaaacagctatcctagaataatgacatatatgctagatgttcaataaatatttgttgartgagtatgagaaaaagatagataaaacacaaaagaaatgctaccatgatttttgttttcctttttctgggatgtactgttagaagagaagagagcaagactgataatacatgtcagtttttatttttggatggggagatgaagaaaagttacaagagaaagaaaggatacaactaccttgagagggcaggataaakaagatggattgaatttgttctggatttttgttttttacttcatgggttctttctaggtctccaggtctccccagccttagtttaggttggtgtatttttaatagctcgacaccttttcactgatagtcccagctgatgaattaacctcacattgttactatttggaaaacatgtttaagytttctgtgcttcaaattatggctttgcctttagatctgtggtccttgatctatgaagtcagatayctctagagtttgaaattattgaccacacaattaagaggaaacttattgttcacaagggaaaatagccctaatttacttattctttaatgatcaaggaagggtgtctttaccttacatgcaagcctgaaacctttgcatatgagttagaataaaaagctgatctcaactgctttggttttcagtaaacgaaaccttatctttagacggtatatttaaagacaaggctacttgartgaagtttgatactatccagaaggtaacagttagaaccaggcaatttaggttgagtctactcactaaatatatgaaaattccagtggatagacttatatggctgcaaacatttggattgataccatttaggtcagtcaataccataggactatgaaaaataaattaaccactaatgaagaaggaataattttatctgtgtttatgtaatcaaagcacaaatgtgaaagcttgcctaatgcaaagatatattctaatgtttcattgtttagtcggcttggattaatcaaaagtaaattgaggtttgtgttgccataaatcctttcttgatgagttttgaatagtcctaaaaattttcaggtctatttgaacagagtccaagtctccttatgtcccagagggaagctcccatatgagagctgtaatgcagatatacaaacctaggatgctttcggtcctttttattattatttgtgatgttctgtcttccttgtcacttccaaagagttacttactgtaatttctcatgcgtcttttttttttttttgagccaagagtacgatgatggcaactttatttttgatgtttgtatacataaaacaaaatccagttttataattccctttggtctattatagatttaggcagaaaggaacattgccaatattaaaatgataactacagtctcaccaagggggacaaaggggttcagcatttaagaatttgaggaatgacgtaaacatacttttgaaaacgttgtgagctgatggatggaatttaattggattttgaacagttggtggcttattctcttggtacttcagcctatttaccataagaatagtgagttctgcctatgacttaatttgaggaacacttgataatggctataaaataaaggcttcaaattcttcaaagtagatttcctattacatacaagatagtattaggtgcaacatttgatattacccatttcaggggatatgtatttgttttcctccttatgtatcatttccctttgcaacctagttatgcctcttcactgttctggattgtgagagtgaaggatttgtccctgccctgtagatggtgtgctccacagtgactgccccctccttcaggctctctcactgtctaaatcagtgtctctactccacccctgtagtaagtatttcaactctggaaacaagatggctccaagctgcttgcatgaacctcccttctggccccctccacaagtccaatgaaaaaaatggtcctccctttcccatgagccacagagcacatctctgaacttgctgctgctaggattttatgaggacattgcagctatatgaaaattaactcttcttatgctgtccttcaagacttcatytgagctttgtttaaaagcagttatttattggttctgtatgttagggcattagtgttaygaagaatagggatgactctagtgaaaagtatccaaaaagatagagctaattttctgcacttctgaaaatgtttgctgtcccttgctgatgctaacttagttcatgaagtcattaaatgttggcatattttggccatgtttctccctaccctctttaaattacrgaaagtgatttaaaaaaatccagagyaatgccttacttatataaggtaactcattttctcattattttctagctggtagtgtgtataatgatacaatatggttgagtatgcatttcagactaacatatgactgcyagtttgtgtgccttagttttcattttattgttctgtgtcttgtagagcaaaragcttacagcttatcggagccaccaagagaaaacaggtacttttaactattccaattttcctgaggaactgcatgatccttctttggaaatgtccacacatcatttttgctatctgttcactagttcatgagaggtttccatgtaacargcctgcctaagaccctttgctccctctgggwtctgtatcaggatagatctgccagccctcccctttcagtccttggctgtgcaggcctcaggattggggacagcatgttctgtctgggtatcttcaaagccaaataccctcaaggggagcagtgtgaggggaccacctgttttagaaagacaacatgttttctccagctctattccaccatgacaaggggacttactttagtaacagaaccctgggtggtcaatgatagaaagtgcctaaacatccctactgtctctctatggatttttgcctagtagcccttcagctggaaacaaagaataaacaatgcagaagacttttaagcatgatcagtttcctggttgagatgcagatttaacctaagcttctctttctcctagaaggtaaaactgttgttggagtatagcttgggaagcagaccagtgtgcaagcatgattgttggtttctgttggtgttgaataactaactgcccatgagtcacactgtgaaatagccccagggttgtatgcaaaacaagtgccagaatggcacacatgtttgactttaagagaccatctgaaaagagtgaaatggtttaattttgtttgagattaatactaaaactttgaaacgttttaaacgttttagtatacggatcaagatggggtgtttcgttttaaatcctggaatcaaagtattaataagaaaaagcctcctttggatcatttctattttttttttgaaaccagaatagaaactttcaaatgatacaaaagaggaagattaagaatgcccttgaaagataggatgatgatcaagttgacttcgtgacaatggcaatgaggatgatgatagcaaaagcagtaattactgacaaatattgarcatttgtatgtgccttgtactgttttaagcagtttacatttattatctcatttaagcaatttacttcctcattctggaatttgatcttcatcttggtcatcattttgattaacagtcatctttttaacaactggaaaaataatggattgttatcaagaattttttaaattaaaaatataaaaaatattcatttgtcattaggagagagatttaagaccgaaggagccaatgttatacttggctaaatagtagcctataaaatattttcactttgatggcatctktatgaagtttctttttatctggttcttcgttctctgtcactcttgtttttgttttctrttcctttctattctttaatctttcttggtccacatcctgaaagcatcttactctctcagtcatatgccttggtgtatctagtagagtggatctttcatctcacccactctattcctgctatcttatcttgttggatatgccaataagatcccaagccatacctaatgctttgctttggtcatgttacaggtatttacctgagatgatgccttctttgatattctcttatttgtattaatcacttagtttctagaaaaggggacatccatgtaaaaaatgagctcactctataccttgcaggctcatttcagcagacactctgttctaatttcttaaagattatatggcatgacttgattattttactgccaccatctgtcttaaatctattgtatgtatttcctccttctcctcctctttcttcaaatctgaggatctgagtgttaacagaagttccactgtgtcaattttcaatctgcatagcaggaacttctttcagccctttaggcccggtgcggtggctcatgcctgtaatcccagcattttgggaggcagaggcgggcggatcatctgaggtcaggagtttgagaccagcctagtcaacatgaggaaaccctgtttctactaaaatatacaaaaattagccaggtgtggtggcaggcgcctgcaatcacagctactcaggaggctgaggcagaagaatggcttgaacctggaacgcggaggttgcaatgagccgagatcgtgccacagcatcctagtctgggcgacagagccagactccatctcaaaaaaaaacaaaaacccaaaaacaacaacaacaacaaaaaaacactttagatgccaattctttaaatagattaagggttaaaatattaagaatccatattcttaatatgttttaaatgtctatttacctattgaaaaggcagtaccattaaaggctctgagaagggtttgtaaaactttattgtgagtgatgctatcggtcatcaaactaataatagagattagacgttcttgttctgggatgttaaaaataacttaatctttccagattcttacaaatgtaaaagctatttaaattctattatgaaattatttgaaggttttctcttctcaattattttctaaagtgcctgattttgatataggtaaatatcacrtaattaaattagatatgaaatgaagcaaccaaccttctacatttgcccagaggttatacagtattacccatcttcataatctgatagtggattatgactatgatattcacatttctaccaggttgggtgatggtttaagttttcatatttcataattaataatattttwaaaaaagcatttttatgtttacactgttayatctcaggtcttatcaacctcagcttaaaaagttgaagtatcggctgggcgyggtggctcacgtttttaatcccagcactttgggaggccgaggtgggtgaatcaccagaggtyaggagttccagaccagcctggccaacatggcaaaaccccatctctactaaaaatatgaaaatcagctgggcctggtggtgggcgcctgtaattccagctactcaggaggctgaggcaggtgaatcacttgaacctgggagcctgaggttgcagtgagccaagatcacgccattgcactccagcctaggcaacgagagcaaaactccatctcaaaaaraaaaaaaagttaaagtgtcgtgttgtagaagtatgaaggatatatgataaattgtgcatttgtaagtttttaatcaatgtggaaactgtcgttttttatatagtcttctgtaacargggagttgggagtagagttgggtaaccaataattaattttcttttatttgcaatagtttagttgtgttcctgctgggaagtacaaaaggggcttcttgacctcaaaatccacagtgacctaaccattctttaattccgatattaggtctcctcatcactcttctcttctcttagacgttggatagcatttggtggggtcaaaaaaggccttctaagagaggagtcttttcaaactctcaaatgtattttttcccccaattttgaaagtgagccttttgaatattatggcacaaattttgcaaattaggatgtgtaagacaccagaggtttatgggaaatttcggattctattaaccagtcagttatcctaggtaaaaatgactagaggtagcatggaagtagaaaggaaattaaaagggtctgagattctttcactactctgttggcatagggtatgtttaattctattcacttccttttccttctgccttttaaaatgttttctctaagcagcaaacccaatttcatttactgtgcaggctttaagtaacaggacataacactgttctgactatacctttagatctacatggtcaagaggcagctcttaagccatgtattttttttttctaaatgcattaataggtttgagctctaaaacctaatatagagcttaaataacttaaagttttattataatatgtaccatattaaagtgtggaaggggtcttggaaataatttagtctaagcctgatattaattacataagaacaatcaaagtcctagaaagttgtcattgaaagcaatattttcacaaaatataatgatatatattttggtgtaaatcagtgattttattgcttttaaatacttcccagagataaatgtgttagttatcagtatggaaaggtgagaattttagggggtaggagagactttagttaggaaataatcactatggcaatcatctacagaagtgttacctggtttgacatgatatttaggttgatttttaatttattctttcctcagtaataatagaaatataagattatcagaggaagctctagggggaattgtaactttcatagtctgcatatgtttttttctagagaataattgtattgtggattagaagaaaataaacggtgttcagggtattcatgggttgggtacagttacctctaccttgcttcttattttatggagtatccatagcctctctcctccacaacctagagagtctcagattgtactgagtgggagaggctgcaccgagtggcagtcagtctgtttctcaggccgtatcaacagaggaaacacgtgtctactgagtattatctctgcgttccaaaaataaataaaatccagttgcatattgttggttatttggcktctctgtgctctggggaattcttrctagcatagtaaacaggaagttgagtgttttcagggtaaaattataagtctaaggtttatttcctcaatattttaktatgaaaattttcaagtacmcagaaaagttgagagaattmtctagtgtatacccacttccaccacctatgttctataattgttgacattgtgagattgttgctctaatcacatgtctgttcacttatgctatagggtgtatttttaatgaattgtttttctctttagaacagccactaaaacctgaaaaaatacatacacatacatatatrtgtacacacacacacacacacacacayacacacacacgtatatgctattcttcctaagtcatatgagccatgataacagattctgtttttgtagaattcaggaagaagaatgggataaatacatcatacctgccaaatcagagtctgaaaaatataaagtgagtcgaactttcagtttcctcatgaataggatgactagccctcggaataaatcaaaggtaattaaagtgattcacttattttctataaaatatagacattttagtttctcagcagttagtataatttccactttccctttgaaatcacttaccttagattttatttacacatatttcttatggaatattgctaaagcccagaatatmacatttaggtgttatggtgtccctctgtgtgcagtccttatattctgatggaaaatgtagagactttgctcagatgatttctataagaaagttggctcacagcgttttccttttctcatttttccccactttcctactgctgctgctgcatctgaagacaaaaagcaaggatgccaaagataaagagaagctgaatcgacatcagtttgccccaggaacattctytggggttctgcagtgtttggtttgtgataaaacactcctggggaaagagtcactgcagtgttctagtaagttctcaggtctatgtgcgctgtctttgttttcatctcctgacagtaaccttgggaagaggctcattgctcaatacatttacataaaccttttcagtgccacacatatgactgaaccgtttaccaagcaaggactgatactggttagagtcagtgtgttttgtccataactgatagcctgtctgaaccccagatttgtatgcctcactgtctccactgggatgtctaaagagcgtctcagatgttacatctccccattctgtgctcacctaaaagctgatgctctcggcctttaatggcaacttgatcattccaaccagatgttcatgccaaaacttttggagtacatctttatacctcccattttctcacatcccacatccaatccatcaacaatcctcttggctctattttcagaaaacatataaaaccaggcacttgtcacccctaccactgatatcattctggtctaaagccaccatttctacagcattccaactgacttccttgtgcttttacccctaaagtctgttctcaaagcattagccagagtgagctggtaaaggcatatatcactgcgttcaaaaaaatctcccaatggcttcctatacctcaagtatagactgaagtccttaagtgcttacaatgacagcaagttcccatgtgatctgtcctccccctcccttactccctctgctccagtcacactggcatctttgctgtttttcgaacatggcagtcatgctcctgccttagggccttctctggctgttccttctgattgcaacactctttcctcagatacccacacggatcactcagacaacagcttctcaggcagcctttcctgatctcccagtgcctggctcatccttgccctcctcctggcattttttcccattataatatttaccaccatctaacttactatacagtttgcatatgggggctagatttttgtctgttgaatttgttctctgctatatgcagagtggctagaacaataccttgtacattgcaggggcttagtaagtatttgttgaatgaaagaataattcagagaaaaagtagtgaggcgcaggcaggtggaatagatttcatggtatttgttgatcgccagaattgtgggaatatttggaaggtgggatgggagcacaaagggaacagaggagcaggggaagtttacctctgaagctcctcataaactttgttgaaaatgattgaattaaaaaatttagatgtatctacagctggacatctgatcaaaatacaatccacatatgacattacaggcagattgaattttcttctcacagttgacattgtgtttaattatgctgactttattgcatgtttgaattttgctttccttgaaaacttgatttctttcttttcctggatctgaagtagcatcaggctgctcagatgtggtttaacttcctacatttttagagatttgctccaagtatcgtttatgggttgtttctggcctgcccacacttcagcggtcagttcattcgtgtgatgggcatgtgtttcctaggttgttgttccacccttgtgggtggacttgtggacttgagcccttcgatgcatccctggccacacccaagacctttccctcccctgttttaagacagactcaagttgggtaatcttcacccactgcttttaagcctgtctctgccatttcttcattaaccatctgcattttgacctctgtgcatactgcttaacagaagttctgcttttgatggaaactgagagtcactttctagtcaagtctgagtctttcctcattgttcagactcactggtttcctgtttccaggtcgacatctctcctttcagggatgtttccttcttttccgtggcacactactcttctgttttaccatctgggttgtctccttttccctaatactgggtacgcgcagaaattagttcttgggcacttgttcatttttccttgattgtttctaagtatagtcatccaatcttatgtccaaaatatcatatttagacccgttactcctgtattaatatcttctttcctcgctttgtatttccatattcagttgcccagaggctgagtacccatgtaatttatggccactttggagaattatggtaaaaactacaggtataaactaagactgtggcaggcacaggggctcgtagggagaccatatgtgggaatcatcactcagagatttcatcgtcttcgaaacccagtgtgtctaaaaccgayctcaaagtccacgcccagcaggacatacttggcctggcatcacaagcttcaaccctggctgctttaattccactgccctcttgtccctcctgtcaatgtcactcagtcactcttttctttcccttctcactgttgccactctgggagattctcatcaccgccttctagaatactgggagggaattgtgctagtttcttcctttccaggtatgttcatctacaagttatgatcagtacttttcccacagtaatctttgtaaaacaccactttcatcagcccacataaacttaaggacctctcttgtgtttactgggctaagtccaagctcttcccatgggcatttggttccctcatctggaactgctcattagacccctaggccccccttcagcctcagtttacagtctgaggccccaccagttccgttgccctttcctcccactgcgtgtgatttcctgcctctgctattttgcctgtgatcatctccttcctctcagtttcccccactcctctgcatagatcctggttttttacctgctctttggaggtcttccctgaccactgtggtccaaactcctgcctatcactttcatatccatttaaaattggattatttacagtctccttgagttttaactattaaaagaaacaaagttattttagggccctaatcacacgatgactcccgtgtaggtcccgagtcactcatgcagagctggcgaccagtaaagcctagggagccagggctcactgaaagggaaacttttgtagtaaagaatatgttggttcattgagttgagtggatgtgatggaaattgctgaaaatatctaggatacatttagctttaaaaacagtcatttcttaaaaaaggaatagtatttatagaagttataaggtttaagcagaaactttttataatattaccacttagagaaaaagactattaatattttaatggagttccttataaccataaaaaactatgggagccttgctctgttgcccaggctggagtccagtggtgcaatctcagcttactgcaaccaccgcctcccaggctcaagcgattctcctgcctcagcctcctgagtcgctgggactataggcacatgccacaacacccagctatatgtgagattttaatgctgtttcatttgatgctgacatcaaatgtatttaactatttgtttttgaacatttaattttttcctaattttttaaacaaataatttggcartgagcattcctttgcacatatcattgtccacatatttggtgattgcctaagattaaattctagaatcagtatgagtaggtcaaagtgtgtatttgatttcctcttttacccacaactttktttagaagtaatttcaaaatttacagttactttttggcggggggagagggtggtttaaactttgcttattcatattaaggtttttacatggagcaataccaatatgatacatacagtctctgctgttttggttaaataatctttttccatgggtgcatttttgtttttaattgtgaaggttaatattcctaatcttaaaaacaagatatgatataaaacaacacatagtattgtgtaagtattcaaaattcttgggtaattttcttcttgttaaagcctgagttgctaattttccacaaaattatatttctataaaattrcccttgcttataaataagtttcttggctattatgttgatgttacattatctgttacacataaatttatatatcataccttcattgcagatttaaccttaatcaacataaaattatccttttaacttcattagatgccttttgcatttagttttactttgtctaaacttaatactcctcctgctttccatttgtttgtatttctttcaactatttttgtgttttcgatttgaggtgcatgtctttaatttagctagaagtaatctgtaatgtagctgaaggatgttgttttataacagggtttttaacattttacatttaattttactgctaccaacatatcttttataggtccttgctcttttccttgatgtctagtttagctatttagaccatgtgttgtttgcttttgtcttctccagggatttggcaagatactctcttttaatgtcaactaatagtagctttaaggctgtggaaggctaataatttaatatctttttatttcccttatgtttactctcccccggcccagcctctgttaatacactgaattaattattattcttttcctaagattattatgtttaatctttcaagtataattttctatttcaaaaaaaagttgacacttttattcagctctatctctacctacagttttttagatgtggttctttgtttagcttgttttactgctcacttttgtttctttaaaaaaaaaaaaaactacagtgaatccttcttgaactcctaattttgattctgtcctcaaaaggctaaaataggagtgatctgttgatctgaaacttcatgtaccaagggacctatttttttttttcacacaagaaaaacaacttagttaaataaattcttggaccaaagtcttttcccttcattgctttgccaacattgckgcaacagatgtgagcatttattattaaagtggaaaagtctagggccaacctgaccctattcctttgttgataacccttgtcttctgccttatgcttgaggacttttcattttttaatcatatggatattatgagaatatgtctatagagtaggtgtcatttaattatttttcttaggaaacagtgagaacttttgatgtgtccttttgggygctttttcagctttatagaattcttgtctatggtggctttgactgtcactgcttctgatctaatttttctgatctcttccttgggtaagtatgatttctgctatctatgttcgttgtatgacatctattttataattatacgcttcctcttctccatattctggagggagtctttcaagtgtaatttcatagctcggctttgatgtctgtgccacacagattcttctcattgtctcttttccttccttgcggtccttgcctgtctcatgaagctccattttcctctcctcctgcaggccaartctcacatcctattctccctccatgcactttcattctattttactgaggcccccgtcttctgtctcttatcaagaacaattttcaagtatctaaagtttctttcctatttctggatctagtattcmgtggttgcttcttctggtgggttgttggtgtaactttgttctgtggtatcttagggtatctacattttccctatyatttactcactctgcaatgaggagagggctgtctgaatctgatgcttatcagccgggccaatgcatagattagccttgggccctgcttgctggccactggcgtgttgactgaaatgcctcttcagacctgcagcctgaggacagttgtagggcgcagcttcctgcccagttcttgttgggtcactggcatttatgcagtgtggctttgatggaccaacatgggatcttccactcccacagaaggattcattctgcatacatttctgatgcacccaggctcctcggtctatgctacagtgtgtgtgggrtggtgatgtacaggtgggaggggaaaggacccaaagacaacagcttggcagcaaccagtgcccacatagtgcagctttccatgaggacagcctcagtgtctgtgttcatgggcagaaaggggcagggaaagtattcccttacattcttccagtgagatgacattgttttatgacatgtgcccattgtttatgatataaaacaatgsgcacagggctaacatttctcatttaattagactacctgaaacttgtggttagtaggaattcttgccaagacctcacaatacatttttttcagcattgttaagagtttgttttctttcttctggttgtggtaggcattttacccagtgtgggagtggggagttactaccagccaggtgtcagaaatcccatgcaatgtaatgcatgtaataggaagtgagttctcagggagacacagaagcattgcagaagtgtatatcattcataacttcagatttagtaattgataagatcctgtgtataagrggagaaatatctccaaagagattaaaataatagcattctgcttgtgcttgagtggtgaggatacatgtgatttaaatatttgtctttccttytttagttttccagatatttgtaatgtttatgtgtttttttataatgaccagtgaaagcatgatgtagtcttattaatttcagactaattaagtaagatggatgcttttgtatcttttycctttatttcagactgtaatgcaaatgtgcacaaaggttgtaaagatgctgcgcctgcatgcaccaaggtaattgctcagtgatctgtgaatatatatgtrgcatggttgcttcatagtatctatttgagcttttactcttttttrttaccatctagatttatttctaaagcgatcatgatagcgataacataacatatgctcaaagtgtatagttatttgcttaactgtacactgttagaaatagaaggaaagctcaagtccagatatttgtgttatatgctgtggctaggttaggctttctgttgagacctgcttggtttaccagtgcaagccctgggtacctgcaaatgaagatcagagtagtaagtcacaaatgtctgcaagcctcacagtcactggaagacctgtgactacacagatttctgggccccaattccagaatttctgattccatagatctgaggtagggcctgagaatgtgcatttctaacaagtttgcaggtgatgatattgctgctggtcctgagacctcagtttgagaaccactggactagaagaatgttctctgtagttgggaatgggctkgagtagatgaaggtgtctgtgattctattcctttcttttccactcagtagtcatgtcacagatgcatgtgagtgaacatgatgatccttcagggggaaatttgcagttgcaaacctctgtgtcaataggaacacataytgcgtcagatcacagagttgagggctgttttgaaggtgacatttcagtgctacaggtggttgtctcctatagtcaggagggatagcaggaggtagaaagaaacaagaaggagaaaggcagcattgataggaactttcagcctgggtctggacacatgagctggagacctctggtttctgttcccctgaggcttttaatgaagcmaggagtgttcaggaggcgcatgttcacaaggccccttcattataacttgcacattttattgtcacatttgactcttcatygcatttaatgtcttttgctttgaattcctcttggaaataaaataacaaaaatgatatagataagaattctgttctgtgtaactatgtggatattcttatagtctaatgatactttgatcttactttatgtgtttctaatattctttaccagaaattccaagagaaatataacaagaacaaaccacagaccatccttggaagtaagtgatgtagaaaacgacaagaacttttaaaaatttaatacatactatayatttttccattataaaaatatctccttttgttttctcatttatccagttatttcttctttcataacatatgcttggcatgatttttagttctataaagtcgtcaagaaggctatcaacttctaggtcaacctaagaacttttgtgttgtgtgtaccatatgatcttttatattagagagggctataaggagaaggtattaacgtgttgcttcaattctaagatgctgtctagtggaatatgctctgctgatgtattaataatccttcaaggaaaagagaaatactacatgaaatgtaccttactttgttttcctagcagtagcgtagtatagcaatattgcagtaatatatttgtctatacagatacacaccacattcttcttaagaatcgccatgtttgatggaaaaagtcttcaratttggagtctgtagattcttatcagtttctgttgtccattattatarttacctggtgtttaattagctgtgcttgaggctgtgatctcattagctcctttagaatgaccgtgaaatttcaaggcatactggagtttggtttgcatattttaaaatttggtggctctgtttttcctgaagtgtatattgctgaaatttaagcagtttctctttaaaataattggtgccctctgacagttctttacattgcatacaagaaccaatcaygccaatgtctcctaaatttgaaaatctcttgctttattgtgagagattttgtgacgccttctgcctaaagttgtgttgcttgacatgtggcaggaattttaagtgcatggtaacttttcatttccatgtaacaaagtgtgactgatattttaaaaccactttaatcgggacaattatgcatgcaaatttgtggcaacatgctattgggtgtaatgttatattaggttaagttggtgcargtagtaacaactgtcacatcactctcttgccttgaccccaaaagtctctttgatgatgtcagttataaggggcttctcattttcatagggttaaatgtgaaaataaatagtatcttagaattgatgaaataccacatattactcctcttcacatgggagtcataagaacaaatttaacttatgcacgtgtaaaatgctttgtaatgtctgggatcttccttttgcttgagaatgtatatgctacacagctataatatgggaccgaaatgtcttctgagtcatttatagtacacatcaaatgtaaatgcatctgtgcccagaatattttagaactgaccagaaaaacacagaagccctatttagttttccatgtgtgagagagaatagcccagcttggcttgcaggcttcatttgcctgagatccttataccatgaagaataggctctccagcatcattccattccattgacgtgttctctgtgtgtggatgcttgtttatacacacaatatgcattcagtaacagtactaataacaccttgcaactatttaaagctggctgtaaggagtacaagcagtgatttatgggaaacctggcgcagtatttccccattccattgtcttgtttgtttgtgcaatcccaaacacccacagtctccaagtggagatgcggaagcaggcctgcagcatgggtgtcaggagggtgtaaaatgaaagggacactaggagcaagtgtcaggatctagcagggagactggttttaaggcagagcatgcatcagattacaagtagtcattgcagggtttagctttctggcttttaagtgactacttttacttgtaattactgacctggaaaccacatgaagcatctgttctgatttccagattcttcatttagagacatcccacagcctggtctctccttgcacccttcttcctccgtgcctgttggattgccgactggaaggagggagactgtgggacaggtccatccattgtccagaagtgttccaggyaccaccttggaaaggtaaggctgagtgtgyttttacatattaatggctcagagagcttctggggctaactttgctcccctccctctctcctagcttcaggaggtcagccacatccttggagtctgagagtgacmataacagctgcagaagcaggtctcattctgatgagctgctacagtccatgggctcttctccctctacagagtctttcataatggaaggtgaggagaagacacacttccatttatttgtgtttttgttagcatttgccaaaatgacactgtctgaaggaaataagattgaagcattttttttttctttttcaaagaagtctgtttcagggtgtctctttggtataggttctactttttaaamgaatgaaaatttagccccagaggagaaaaccagagagtgaccaaggaaatatgaygtaaattttaaatagacatattactaaaagaatgtcacaagcataacgaagagaaatgaatgaaatatattgtgtgcttattattaaaaatgttttatagctattgatgaattataataggatcctatatcaaaaacatactttagttagttaagactggtcttctttggatctctgagatacttaccccatctgttgcctcctaggggaataaaaacattttgttttgtgayggagtctcactctgttgcccaggctggagtgcagtggtatgatctcggctcaytgcaacctcgagctcccaggttcaagcgattctcctgccacagcctcccaagtagctaggagtacaggtgcgcatcaccacccccagctaatttttgtattgttcgtagagatggggtttcaccacattggccaggctggtcttgaactcctgacctcaggtgatccaactgcctcggcctcccaaagtgccgggattacaggcatgagccactgtgcccagccattaaagcattttttaaagcatattttatagagcaggacttaatctagggaattagtttttgtatacaagcagcaccagtaagaaggaaaaccaaatggaaggagagtagtgacaaragagaggagtggattctgccccaggaacctgttttattttaatcttaagtctttaaattcattgtcatctcatttgtactgctttgagctggaacctctctaatgagtgccatttgggtaaatagggtttagttttcctgaggagtgtgtgtgtggggtgggrggggggtggggaagggcatgtatgtatgtgtggtttgtttgtaatttcatcagaaaaatctgcactcatttgtgactcaagtacttagacgctgctttgtgtcttagcaagtcaagggcaaatcaaatggatgagtacataattcagattttagtaaacagtacaaaataacgcggggcagaagaaattggtgtgttccagattctgtagacacattatggactctgtaggttaccaaaaataaaactaaaatagagcaggccaaaacaagcaaaagaatcttcaaatgtcttttttcctccatatgaacactctttttaaatatttgaytctttgctgtcatgaaagctgtcttaatttggaccatttcatcagtccagttttaagatgtttcagtctggctgggcacggtggctcaggcctgtaatcccagcactttgggaggctgaggcgggtggatcacttgaggtcaggagttcaagaccagcctggccaacatggtgaaaccccatctctaccaaaaatataaaaactaagctaggtgtggtggcacatgcctgtaattcttgctacttgggaggctgaggcaggagaatwgcttgaacccgggaggcggaggttgcagtgagacgagatcgcgccattgcactccagcctgggcgacagagagaaactgtctcaaaaaaaaaaaagatgtttcactccatgttaatatgttttggtttagtagtttccatgttcatagcagatttatttagggtgaggaatccatagacaaatatacgaaggtatatttgtgctgcattattgtacttctggcttttcttttctaaacacacattagatgttgtggattcttctctgtggagtgacctcagcagtgatgcccaggagtttgaagcagaatcttggagtcttgtggtggatccctcattttgtaataggcaggagaaggatgtcatcaaaagacaggatgtcatttttggtaagcgtttcaaatatgctctttgggttgaagcagtgcggttcagagaaaagaacatggaatttgcaactgtgcagagttgggtaaaatcccagttctatcattttctatttacctgatcgcagacaaattatttagatcacctagaccttaktttctccatctgtaaaatgaggataatattaaaagtaatagcaaaaaccacaatyggttttgcaataacctaataatactcaggttttaaatattgttttgagactgcaatgaggcataatatgtacctggcacagagcaaatgttatttcccatattcctttcamgtttacttaggtttggcctatactcttacctcttctgtgtaagaattgcagtgaaccttcacatattttaatgtagggctattgcatatggccttccagtttggctgcatacaccagccattcacagagaccaggtgcagtgtgagtagctgcacctgggttagggcagggtttgactacrtgctgccatcctgagtacagaattcagctgtggtgagattgtattttgtcatgctatttgggatgaaggcattctggattggagaaagttaaattatagacttggaaaaaatgaaacttcaaaaaatttcaactacaaagtagattccaaaatgtggttccaaagataccctactttaaagataacactgggtcttttcactaatcctgtgtatgcaaacatgggccccaaagtccacgggcagtgaggataccttgtcatctgcatcaggtggtggttatggacatcagatgagatggtgtatgagtgtgcttagaactctgtcaaaagctgtgtaggtgcaagttactttggaaaggaagatgctgtccctcttagtatttcttaagcaatttatattctactgtcaattttcttcatctacctctcaattctcaatttcatattattaaaagtawtctaacccattgggttgaattattacatggtcttttgtgtcagaaaggcttgcattccagggmaaattctttaccttctcttcctcactgtttctctttaaaagataaggaaaatcattcctattttctgggtcataatgtattaatgggttaaaagattaaatgaaatgatacaggtaagtgcttagcatagagtaggcactaaaaacataggaaataataattcaaagttggtagatttccaattaaagaaatttttatttttgacaaaatattaaagctatatttagacttgctgactctccatggctgatatttaaggttctttcccaaaacttgcrgtaagtttggaaatactcattaatgtacaactagtacgtttggtgcacctgtaaattgtgagttgttattttctctcctgatgcgttttaaaaattgaggtataattcacctgctcaaaattcactcctttacaagtacacaatctagtagtttttagtatattcacgaagttgtgtagccatcaggtcctgtctaatttcagaacatcttcatcacttcaaaaatcctgtacatgttactagtcactccccatttaccccttccgccagcctctggsaaacactagtctactttctgtctctacagatttgtctattctagacattttatgtgaatagtacaatatgtggtcttttgcggctggcttttgtcacctagcatactgtttttaaggttcatcctagttgtaatatgtatgggtacaccattcctttttatggatgatgaatatcctattttgttttcctaatcatcarttgatggacattttgggtttttccacttttggggtcatagagtagtagctttacgtttaatcacttgagaaactgccagactgttttccaaagcagctataccattttgcattcccaccagcaatgtatgagggttccagtttctccacatcctcaccaatacctgtttgttgcttttttattataactagcctaatatgtgtgaagtgatgtgtcattttggttttgattttcatttccccaatagctaatggagttgagcatcttttcatgttcttattggccatttgtatatcyttttggagaaacatctgttcaaatcctttgaccatttttgaattggttatttatttatttatattgttgagttataagatttttaaaaatatactagatacaagttccttatcagataaattatttacaaatattttctcccattctgtgcgttttcttttcactttcttgatgatgtcctttgattgattgtgatgcattgttttcctctggagaaagtggaattttggagacagattctgccatagaaaggacctatggttatctgcattgaagaactttctttagttccattcatttcaccaaattaattgtgctcctgctcaatgcaaaaatcaaataaagaaaggaagaaagaaagccaacaaactaagttgtatttcatagggcattcagggtggaataagacctagttcctagctgaaggtatctaaagatgctagctagttatattattgagtttcagatacrttagattcttgtatattggacttgacatatatgtcctctttaatatctggataaaagaaaatggtttaatattttagagtgaatgaaatgtttaatgttgacttttatattggaatattcttgatattcctaaacatttcttttttatttgcgtaacatatagtgttgagttactaatttagtttaatagcgaaacttgctttttaaagcttgtttaaggcttatgtgtgctcacacatttcagagctaatgcaaacagagatgcatcacatccagaccctgttcatcatgtctgagatcttcaggaaaggcatgaaagaggagctgcagctggaccacagcaccgtggataaaattttcccctgtttagatgagttgcttgaaatccacaggcatttcttctacagtatgaaggaacgaaggcaggaatcctgtgctggcagcgacaggaattttgtgatcgaccgaattggagatattttggtacaacaggtaagaagagcttaaagtccttgacctttatgacgtaagtgggatttgaatcaaaatctgccctttcatcaacaagagtaaaaaaaatgatattttgaaacattcatagtgacattctgaggatgtgtttaccatcgttagattgtaactcccagtaaggcagggattcttggctatttgattactgctatatttcagcacctggaacagtgcatgatattataaatatttattgaatgaatgggccacttaaggaaaaaaaaatcaggaattcacctgaatgtcacgttttacagtggtctgcaacacttggaaaggcagggagctccatctgcagttgctttagcatggctttccctgggtagatgctagaatgccatcttctccaaatgtactgttttttgaagctgtttcatcctatcatttacagcgatggagttcagctgttggtctgtatgcagaaaatgggggagttatgytgagtggtattccatgctattgatatatcactgtttactcattcacttgttgaaggatatcttcttgtttccagtttttagctcttataaataaagctgctatgaacactcaggtgcagattttggtgcaaacctaagctttcatttttctgggataaatgcccaggaatgcaatttctgggttgtatgggagttgtatgttcagttttgtaagaaactgctaactgttttccagagtggttgtaccattttacattctcatcaacactgtacaagtaatccagtttctctacatcctcaccagcatctgatattgacactatttttaattttggctattttaagaggtataaagtaatatctcattatggttcaagttgcacttccctcatggctaatgatattaaatatcttttcatgtgcttatttgccatctatatatccctttcagtgaaatttctgtttatgtcttttgctgattttctaattggattgtttgttttcttattgatgaatattaaggtttgtttacatattctagacattggttcttgtcatatatgtgattgacaaactttctctaaatctgtaacttgtcttctcattttctaattttgatgaagtctagtttatttttccttttaagaattgtgctattagtttcaagtttttttatttatttttatttttttgttattattatactttaagttttagggtacatgtgcacaatgtgcaggttagttacatatgtatacatgtgccatgctggtgtgctgcaccctttaactcgtcatttagcattaggtatatctcctaatgctatccctcccccctccccctccccccaccccacaacagtccccagagtgtgatgatccccttccagtgtccatgtgttcttattgttyaattcccatctatgagtgagaacatgcggtgtttggttttttgtccttgcgatagtttgctgagaatgatgatttccaatttcatccatgtccctacaaaggacatgaactcatcattttttatggctgcatagtattccatggtgtatatgtgccacattttcttaatccagtctatcatcgttggacatttgggttggttccaagtctttgstattgtgaataatgccacaataaacatacgtgtgcatgtgtctttatagcagcatgatttatagtcctttgggtatatayccagtgatgggatggctgggtcagatggtatttgtagttctagatccctgaggaatcgccacactgacttccacaatggttgaactagtttacagtcccaccaacagtgtaaaagtgttyccatttctccacatcctctccagcacctgttgtttcctgactttttaatgatygccattctaactggtgtgagatggtatctcattgtggttttgatttgcatttctctgatggccagtgatgatgagcattttttcatgtgtcttttggctgcataaatatcttcttttgagaagtgtctgttcatatccttcacccactttttgatggggttgtttgtttttttcttgtaaatttgtttgagttcattgtagattctggatattagccctttgtcagatgagtaggttgcaaaaattttctcccattttgtaggttgcctgttcactctgatggtagtttcttttgctgtgcggaagctctttagtttaattagatcccatttgtcaattttrgcttttgttgccattgcttttggtgttttagacatgaagtccttgcccatgcctatgtcctgaatggtattgcctaggttttcttctagggtttttatggttttaggtctaacatgtaagtctttaatccatcttgaattaatttttgtataaggtgtaaggaaggaatccagtttcagctttctacatatggctagccagttttcccagcaccatttattaaatagggaatcctttccccattgcttgtttttctcaggtttgtcaaagatcagatagttgtagatatgcggcgttatttctgagggctctgttctattccattgatctatatctctgttttggtaccagtaccatgctgttttggttactgtagccttgtagtatagtttgcagtcaggtagtgtgatgcctccacctttgttcttttggcttaggattgacttggcgatgcgggctcttttttggttccatatgaactttmaagtagttttttccaattctgtgaagaaagtcattgctagcttgatggggatggcattgaatctrtaaattaccttgggcagtatggccattttcacgatattgattcttcctacccatgagcatrgaatgktcttccatttgtttgtatcctcttttatttcattgagcagtggtttgtagttctccttgaagaggtgcttcacgtcccttgtaagttggattcctaagtattttattctctttgaagcaattgtgaatgggagttcactcatgatttggctctctgtttgtctgttattggtgtataagaatgcttgtgatttttgtacattgattttgtatcctgagactttgctgaagttgcttatcagcttaaggagattttgggctgagacaatggggttttctagatatacaatcatgtcatctgcaaacagggacaatttgacttcctcttttcctaattgaataccctttatttccttctcctgcctaattgccctggccagaacttccaacactatgttgaataggagtggtgagagagggcatccctgtcttgtgccagttttcaaagggaatgcttccagtttttgcacattcagtatgatattggctgtgggtttgtcatagatagctcttattattttgagatacgtcccatcaatacctaatttattgagagtttttagcatgaagggttgttgaattttgtcaaaggccttttctgcatctattgagataatcgtgtggtttttgtctttggttctgtttatatgctggattacatttattgatttgcgtatattgaaccagccttgcatcccagggatgaagcccacttgatcatggtgcataagctttttgatgtgctgctggattcggtttgccagtattttattgaggayttttgcatcagtgttcatcawggatattggtctaaaattctcttttttggttgtgtctctgccaggctttggtatcaggatgatgctggcctcataaaatgagttagggaggattccctctttttctattgattggaatagtttcagaaggaatggtaccagttcctccttgtacctctggtagaatttggctgtgaatccatctggtcctggactctttttggttggtaagctattgattattgccmcaatttcagctcctgttattggtctattcagagattcaacttcttcctggtttagtcttggragagtgtatgtgtcgaggaatttatccatttctcctagattttctagtttatttgcatagaggtgtttgtagtattctctggtggtagtttgtatttctgtgggatcggtggtgatatcccctttatcattttttattgcgtctatttgattcttctctcttttcttctttattagtcttgctagcggtctatcaattttgttgatcctttcaaaaaaccagctcctggattcattaattttttgaagggttttttgcgtctctatttccttcagttctgctctgattttagttatttcttgccttctgctagcttttgaatgtgtttgctcttgcttttctagttcttttaattgtgatgttagggtgtcaattttagatctttcctgctttctcttgtgggcatttagtgctataaatttccctctacacactgctttgaatgtgtcccagagattctggtatgttgtgtctttgttcttgttggtttcaaagaacatctttatttctgccttcatttcgttatgtacccagtagtcattcaggagcaggttgttcagtttccatgtagttgagtggttttgagtgagtttcttaatcctgagttctagtttgattgcactgtggtctgagagacagtttgttataatttctgttcttttacattttctgaggagagctttacttccaactgtgtggccaattttggaataggtgtggtgtggtgtgctgaaaaaaatatatattctgttgatttggggtggagagttctgtagatgtctattaggtccacttggtgcagagctgagttcaattcctgggtatccttgttaactttctgtctggttgatctgtctaatgctgacagtggggtgttaaagtctcccattattattgtgtgggagtctaagtctctttgtaggtcactcaagacttgctttatgaatctgggtgctcctgtattgggtgcatgtatatttaggatagttagctcttcttgttgaattgatccctttaccattatgtaatggccttctttgtctcttttgatctttgttggtttaaagtctgttttatcygagattaggattgcaacccctgcctttttttgttttccatttgcttggtagatcttcctccatccttttattttgagcctatgtgtgtctctgcacgtgagatgggtttcctgaatacagcacactgatgagtcttgactctttatccaatttgccagtctgtgtcttttaattggagcatttagtccatttacatttaaagttaatactgttatgtgtgaatttgatcctgtcattatgatgttagctggttatttgcctcgttagttgatgcagtctcttcctagtctcgatggtctttacattttggcatgattttgcagcggctggtaccggttgttcctttccatgtttagtgcttccttcaggagctcttttagggcaggcctggtggtgacaaaatctctcagcatttgcttgtctgtaaagtattttatttctccttcacttatgaagcttagtttggctggatatgaaattctaggttgaaaattcttttctttaagaatgttgaatattggcccccastctcttctggcttgtagagtttctgccgagagatccgctgttagtctgatgggcttccctttgtgggtaacccgacctttctctctggctgcccttaacattttttccttcatttcaactttggtgaatctgacaattatgtgtcttggagttggtcttctcgaggagtacctttgtggcgttctctgtatttcctgaatctcartgttggcctgccttgctagattggggaagttctcctggataatatcctgcagagtgttttccaacttggttccattctccccgtcactttcaggtacaccaagcagacgcagatttggtcttttcacatagtcccatatttcttggaggctttgttcrtttctttttattcttttttctctaaacttcccttcttgcttcatttcattcatttcatcttccatcactgatacccttccttccagctgatcgcatcggctcctgaggcttctgcattcttcatgtagttctcgagccttggctttcagctccatcagctcctttaaacacttctctgtattggttattctagttatacattcgtctaaatttttttcaaagttttcaacttctttgcctttggtttgaatttcctcctgtggctcagagtagtttgatcatctggagccttcttctctcaactcgtcaaagtcattctccgtccagctttgttccgttgctggtgaggaactgcattcctttggaggaggagaggcgctctgctttttagagtttccagtttttctgctctgttttttctccatctttgtggttttatctacttttggtctttgatgatggtgatgtacagatgggtttttggtgtggacgtcctttctgtttgttagttttccttctaacggacaggaccttcagctgcaggtctgttggagtttgctagaggtccactccagaccctgtttgcctgggtatcagcagcrgtgtctgcagaaatgtggatttttgtgaaccgcgaatgctgctgtctgatagttcctctggaagttttgtctcagaggagtacctggccatgtgaggtgtcagtctgcccctactggggggtgcctcccagttaggctgctcgggggtcaggggtcagggacccacttgaggaggcagtytgccygttctcagatctccagctgtgtgctgggagaaccactgctgtcttcaaagctgtcagacaaggacatttaagtctgcagagttactgctgtctttttgtttgtctgtgccctgcccccagcggtggagcctacagaggcaggcaggcctccttgagctgtggtgggctctacccacttggagcttcccygctgctttgtttacctaagcgagcctgggcawtggygggcgcccctcccccagcctcgctgcagacttgcagtttgwtctcagactgctgtgctagcaatcagcgagactccgtgggtgtaggaccctccgagccaggtgtgggatataatatcctggtgcgccgtttcctaagcccgtcggaaaagcgcagtattctggtgggagtgacccaattttccaggtgccgtctgtcacccctttccttgaccaggaaagggaactccctgaccccttgcacttcccaagtgaggcaatgcctcgccctgcttcrgctcacgcatggtgtgctgcacccactgtcctgcgcccactgtctggcactccctagtgagatgaacccggtacctcagatggaaatgcagaaatcacccgtcttctgcgttgctcacgctaggagctgtagaccggagctgttcctattcggccatcttgtrgtttcaagtttaaggattctttgtctagccctaggtctcaaacatkttctcctatttttaaaaaaggatttacagtttttgctgggcatggtggctcacgcctgtaagcccagcactttgggaggccgaggtggatggatcacttgagctcaagagtttgagaccagcctgagcatcatgatgaatccctgtctctacaaaaaatacaaaaattagcttggcgtggtgrtatgcacttgtagtcccagctatttgtgggctgaggtgggcagatcgcytgagcctgggaggttgaggttgcagtgagccgagwtccttctcctgcactccagcctgggtgggcatcagaagtggcaccctgcctcaaaaaaaaaagttgtacagtttgttgttttacatttaagtgtgtgttgtactttgagtgtttttttgtgcaggttatgagacttagtaggttaagttcaggttttttttttttttgtctatrgctgtscaattgctccagtgccattcgttgaaaaggctatttttcctctaattgcttttgcatttttgtcaaaaatcatgtgggcatctgggttaccattttgtttcactgatctatggatctatctttccatagtcttagtaactgtagctatataatcttagaagaatgagtccttccactttattattttttccaaaattgttctagctrttctagttcctttcctttttcatatatattctagaatagtcttatttatatttttaaaaagcatactgggattttgttaagaattgtactaaaactgtatatcagtttgaagaaaattgacatytttactattttgagtcttctaatccatgaacatcatatagcacttcatttatttagatttttgtcatctttcactggcattgtatagtttttactatgagtcatatatgtgttttgttagatttgtacccaggtratttttttgaatgattgtaagtggtttaagaattatcatttgaggcttattggccccacacattcatataagcaaagatgaaaagaccagaggtcgtgatgtaaattttaagtacttttaagagggtgggtgtgttccggtttccattacaatgctcttcaaggggacgtgtgcatgtaaggccatcacagtctaaaaaaatggcattcaagtcattcaactagttctcttcacagcaccttatgattctaagttgatttctatgtggattttctacagatgtttttctacaggtaaggcttattgaaacatccagcccacatctctacttttcttcattagctaataaacaggcattctggttattcactggtgtctttcatcttggctaatgatagcctgcccttgatctatttgtaatgtgtgaacaaaaaatcaaattccctactaaggactcagtctatggacatggtcattagccagtgtaaatgccaaatgggtgatttttttgggggggaggttagccaawgtaaatgtcaaatgagtgattttttttggggggccagaccttcctgaaggcccctaaatgttgccatatacttttctttcaatctataaaagtattaaaactataaattgaaattataaatttgtattataactaagatgagaataaaatagatcaaatgtttttcatttggctatttgataattatattagttcaatataatatcacattatgttgaccyttaccactcaacaactttcttttattttaatttaaaaaatgtctgaggagataartgattgtgttcagaaattccatgatatttattttttatttgcaaatactattttgaaatagatgaaaattgcatattttttgtgtgtttagaacttactaaatttacaaaccattatttaaatgttattcttccagttttcagaagaaaatgcaagtaaaatgaagaaaatatatggagaattctgttgccatcataaagaagctgttaacctctttaaagaactccagcagaataaaaagtttcagaattttattaaggcaagtattttaaarctttattacaaagtgataaatcagcatggagaaatagtttatgcttgtttcttaatgatttaaacaaatttcttagctaatgatgcttttcaggggaagaagaagggaggtggaakgtttgtgacaaaggtggaaagtctctttttctgtattagtaaaatattgcccccaaatcatttccttttgtatatttgtgaggtcatgtcttccaaccttctgagaatatttgtaacatactgggaagctgtttcatgccaagttatatatcagaaaaatcaaagtgaaaataaacacagaatctactccacttctgaattagcttgaagcagattcatgacatcatataatttcatctgtaatakttttctccagatgaaaaagttaaaaattatgacattattatacaaataaagtaacaatagtttttgatatcttaaaatttcactgattatctcataaaattggattacttaaatcagaatctgaccaaggttcacttattgtatgaggtggttatatctcttaaatctcttttcatttgaatgttatcccaccccttttttcttcttctgatttatttgttgaagaaatttgtcttataaagtttcctggattctaaatttttatctgccatgttaagaatgctaccagattctcttcccttttttaccacataaatgtgtgttgaggacttgaatactatgaggaatactttgatatttttagaaaaaaagttgtcctgattagagggaactctaagagttataatgaataataacaaatgtggaggaagacctgttgggaaaacaaatggtaaactgcaaactgatgttcaaagttgactttgatttatgattatttttcaaaaattttgctattcataaatcgaggcacttagaagtattggaacttcttttgaaattaactacaaatacatcagtaacttgaaacttcttaaaatcatggagagttggggtactgaaatttatgacaaagtatgcaatttaaattagtgataatgcatcgttttaattgatagcaatgaatgttaagtctgcataaaattgtactgttgcagattctttgtattgttacattcacacctgaaaagtaaatacaggtagaatttgtgtacataaaagtatatattttttaagctccgaaatagtaatcttttggctcgacgccgaggaattccagaatgcattctgttggtcactcagcgtattacaaaataycctgtcttggtggaaaggatattgcagtacacaaagggtaagttgtgacttctgggataaaaatttgcccctcttattagttttaaacacagttgaggtgttctaaacagccatcagtgtttgtggtctctgattcataaagagtttcacgacggagaaactgttaaagccttagaatttggattagtttttagaaattatcttttataatgcagcatgggtaaatagtctgaatttctacaggtagcccaaaccaagctggcttcttcttactttgaacctgcctttcttctctttattttccccaccactgggctttcttaatacctcctcttcctcattttcctattaccttcacaacagtctgatgaaacatgctattgatcctatcacaaaatgtcaactctcccaagcaatctgttattaagttgagagggattataagaaggatctatttttgaccctgtcaattcatcaagttccagggagtaacatatgggcatcttttaagaagctatgaatgcacatggctggtctgtaagctccttgtgggatctataagacctgtgtctgtctggtttacagctgaatcttcaatgtctagtgcartggctggtacagaatagatgatcaataaataaaaacatatcaatgcaatgaatgaataaataaaatggtctaatcctcaagctaacatattgatcttgagtaaagattattattagggtggtagtgtgttatgttaaaaagggcttgggtttggaattttgtacacttgtgttgcattgtatatactcagctctgccactcattcattgggcaaattattaactgagcctcagttatctccactacgaaatgacatgaaacattacctttcagttccagttgccttaataaacatcaactaggtggtctttatcaccaaatatcaatgctgctccagaaactccttcagagtattttcataagataatctagagacaagagcaggtagccagtattttaaagaataacaactgaaatcaataattatttgctcttggtatgagcatggctgatttgtccgttagcacagcacttgggtaccatgaaaatattttcttttcccatcagaagaagaaaattcattttttcttctgatggtaaaagaaattaaaatatttaattttaaataaaatggtcaaagaaaattgtttaattataatagtaatatattcatatttatgctaatgcagttataaaatataattttgaatgttaattttatggaggaagggatcaaggaatataaatgaatctgaggctcattcacataaccctgtggctctgtttctgaaagcattgctggctttgccccacagctggcttaagttttaagaaacttggcatggagattattgattacctatgtctaagaaggtggaaggaaggcctaagttagtatataacacatttcctgccctagggagaaggtcagacccatccctagaactcagacatcttactgtcagcggaaggactatgtgtcagctgaagcacatttaatcatgcaaacctttcataataaaatattttaacatttttttggtgggggggtggtacagagtggtattataggatttaattttttttttttttttcttcgagacagagtctcactctgtctcgtaggctggagtggagtggtacagtcttggttccctgcaacctctacctcccaggctcaaactctcctcccacctaagcctcttgagtagctgggacaaaaggcacatgccactatgcctggctaatttttgtatcttttttggtagaaacagggttttgccatgttgcccaggctaggaatttaagtttaatccaacatttttcttatgggatttttattgtttagatgatacatttaactatattttaaaactaaagaagaagttttcttccttagtactctggtttattgtatagtatttttgtttgtttgtttctttttcccacgcagaaagaactgaggaacataaagacttacgcaaagcgctttgcttaattaaagacatgattgcaacagtggatttaaaagtcaatgaatatgagaaaaaccaaaaatggcttgagatcctaaataagattgaaaacaaaacatacacgaagctcaaaaatggacatgtgtttaggaagcaggcactgatgagtgaagaaaggactctgttatatgatggccttgtttactggaaaactgcyacaggtcgtttcaaaggtactgtggctctaccagaccaatttctcccttcwtacacattattcatttaacagaggacagattttcaaaagaaaaacagttcagaattgcaggcacacatgcgcaaaccctgggtcagttgaaagattgatttgtgaatttcaataggcaaatttggccaatgatacaaatctttggtgggagtttgctgcccaagctaaaacctttatacatgttttatgaatttgcaagtttgtgatgtctgaaatcaaatgaactgagagttctgctaattgttgacacagaaaaattattctggtaactgtggtgtgttgaaagcaaggcagtacacctacacacctagggtctgttgcatgtcaacacagcctagggctgtcagacaatggaggggagaaataaaaagaactctgaatgtcatctttgttactgactaatagaatatatccacacacctgctgacgtggtttaagcttttcctcagtgctactgtttgctaactggcatgaacttgactctgttcaggagtctaaagcagataattccattttttaaggactcattatgtagctatcacactgcctaatccaggctttctcaccctggccacacactagaatcacctctggagctggaaaacattacgaatgctcatgtctcctcccagagattctgatttttatcactgtgaggatgaaaccaaagcccatgggatgtttaaaggctccccaagtgagactactctgcagccagggctaagaaccactgtttctaacagttcatcttaataacatccataggtaggcagtgagaggaagaggttgttaaattctagctactcaaaaattattacccattggaggatgatcaagtttggatggaggttgcaactaatatctgaaatgggatttgttgatcaacaactagcaatgttgtattgaaaaaaatattaaccacaacctgtagattctattgctcgaagtcatttgctgtttatccatttaatagaatcagtttggtaactttgtgttagactattcagtgggtgcaatgaagrtgagttcttgtgaacaatgtgtaagggaagtatggaatcttaaaccttgctcagatctagatgaaacaaaatagcaggcctatataatttgaggtagaagctgcccttttacatttttaattcagcacttttcctgccgaaggtaagagtttgctccattttattaaagcttccttttttaatggatatttttcttctgttttgaaagtgactacattaaactttgctggagatttacctatacctacagccacacacaaacatgcacacttaaagacagctttctattaagttattaatagcatatatctttggctatcataatacaggtatttttataaaactttcatacttagactaaatcttagtcttttgatttttattcagtttatttgaactgtggtttgcttcattaatactagtaatgttttttctttaaagatatcctagctctacttctaactgatgtgctgctctttttacaagaaaaagaccagaaatacatctttgcagccgttgtaagtatatgactgtgtgatgtatttaaaaaataggtttaaccacacattttcttgaaaaatacctaaaattcctagtgaaatataatagtcacagggaagtatatgcttctgttatgtttccattattacttgtgattgcagtgtttagagacaagcatctcattaggttaaattagcatagtaagtgttgcgtcatcacaaccagggctggtactcagctggttcagcagtgtagccaactgtgagaatattgcagtccttcagtagtggttggtgaacaggcattgccctgagcctcccaaatgtccccacgccatctagctatcttggtctttcctccagactcctctcttccccgccccttcggcccccaaaccccttcccttagatccagcaactaaaatgtgaatgctgggcacagccaatctcttccagcacctggctttctccatgcccattggccctgctctcccacttactaaccccgtgactgccatcgtgtgccttctgccagacaagggataccatcctgatgcctaatgttgacagaagattctttcttatttttactatagtagcttctaaagacagtgtatgaaactatttttgtagtgtgttagagtaatctaattgctagcatatagataataagaaggcttgaagaagtctctatgttcccaatcaatttgaactgtattacaaatttcatgaaaacctattggtttgtccagcagcttctcaatgctgttacctgagatgcttgagattctcttaaagaacctgagaaataagtgggaaggtggggaccattttgtttaacctgtgggatggtgagggccatgtaggaacaggaaacaaattcacatctttatagaaaccaatgcttctttaaaaccaaagacctaaaagaaaagcaaattctgcttcttggatgatattaccggacagatgtcctgctgactgatcatgaagtagataatataaatacaactaccttgttttttaggacgaggtagcatatggattcagatcctgtaatgctcaacttagagcgcgcctggaaatatgattctttccctcttgtctcatatgacctcctgaggcattatctgtgctacccatagacaacatttaccattaagtgaggtattaggaatgcaatccaccaaatggcagaatgaagacagttacaacctagctcttcttggtggaatgtgtttggctatactgatactatttcttaaatgtgttaacctgacatgtaactgcattcataaatgacagctaagcccttggtggtatcagagagcaaaagagaaagcatcattttatccttgaagagtcaggtgcaccctactgttcatacactcctgagttacatctatctgacaatagcccatgtgtcacaaatatcttatagttaacactgtaggaaattgaagcatttggctagggatatacagatatctggatttcctagctcccatcctagaattttagaaagttttcctcaagctagtacaagtgagattctccactccttgtgccctttagaaaacacttcttccctaggtgcttgtcttgctgcatgttacagaaaacgtgatgaatttggaagtagccagaagataagcagttaaagtagcaagaggatggagtagtgggtccctacaagacagttttgctttgtttttgtttttataaaggactcagctggaaattggggcagagcccaaacctacaaaatgtgttaagaaaaagtagatgtgttcactaagtcttagaatactgagtctaggaggaatctcttgaacatcaaagaaggcaaattcaaaaggagcaaacaaccaagacagtgaacatgtggacctgcaggctgaagttccaaataggaagcagctttaaaatctctttatcacaatgcaatccctggataatagaatcagcacaaaatggatacggtgtaacaatacagctaagcatggcagctcctttcrtcttctcctacattagaggtcttcaactcctaatgcctgtaggcattgggcagaaatgtgattgagtgaatgtgatagggtcagaagcaatgagacaatagaaagttgtagggactgtagtgaaaagtgagtctgtgccctgtctcaaagatgtcagggattacttggctatagccagtgttttaaaatgagaatatgggcccaggattgctcatcttctgctttccccaagaacccagaaatgtaaagtttttaaaaagtgaaatcctctagtatttaaatgctgagaactgatttttaaactttgtttgttaaatgccgtggcacaaataaaacatctctgcaagctgggttagccctttgcattactagtgtttgacatctacctccaaggcagacatggtacttccattcctggagagttaatttgaatgtttgttcatctccagtgtttgtgcgtggttagtatgaatascgatggacaggttcccatgccccctggtctgatggtgatcgaatgaatgctactttccttgcacttacctgttcttcactttgaaaagatcttaccctgccacctcccctcccctgcaacactaaccaactggttcaaataattgcactcttgctcatgtcttaagcaagtaaacctactctgcctttttacatacagaggctgtttaccttgtcagctgaggaagctataaagtacattgcacattgcatcagggaaacagataagggagtaggtccataatagaataagccagattaacaatgctccaaggatctccctaattagagagggcagtattccaacaactctgccatggggctgcttttgcttccattttcagaggctgagcacaggctgtatagactagtggtcttgtcccattatatttttactctcatgctactctgagaagcgtggggtgaggaggtactctgggtcaccatggcacacagcctctgatatggccaagctgtatgatgctgggaaagccgacaagccagcaccaaggagtcagcagtgagggaacagtggcatgttctggataaaggcgtcgctcagtccatgatggtgaagcaaaaccacacactgcaaccagctctgtaaacactggtggaagccacagaccaaagaagaattcttcatattatcccccaaactgttcatcttgaagtcattcttttggccattctttcaactacatctacctaccaagcatcatcagtgtgctgttcctctttgaatccccagtgtttagaaaaagacattggaggatcacagtagatgttggtagaagaggtggtttaatcatggcgtacatgccaaattttagactttcttcctattaccctgtggtggacttatgtgaaactagtcctaccaacatttattgagtgcctactctatgcttggctatgtgctaggtgcatgaagatgaatgagacccattcccacccaccaagggctcatctgcttggtgagaagaggcaagaacttgtagaccattttgttgctgtgacccacatgacagtagcaaaaaggattggttacgcctggggaatcaaaggtcttgccacttattcgtatcttttgtagtcacttttatagtccatgggctgggcttctgagtttctgggcttctgttccgtcaccttattgaaagagtattgcaagtctaatggactttttagggcctccctccttctcagtctctttgacatttgacatagtttcctatctcatgctctcttagaaaaacttctcctgccttgactatggcattttgatatttttcttctctgattgttctgtcttttaaaaagttcagtttttaaacaaccaattccttttttttttctttttttgagatggagtcttgctctgttgcccaggctggagtgcgctcactgcaacctctgcctcccaggttcaagcaattctcatgcctcagcctcccaagcagctgagactacaggcgcacaccascacatctggctaatttttgtgtttttagtatagatggggtttcaccacattggccaggctggtcttgaactgctgacctcaagtgattcacctgcctcggcctcccaaagtgctgggattacaggagggagccgttgggcccggcctaaaccaccaattcttaaggatgagcatgcctataattcctctttttccatcctctcttttccataccgtckccattggagattgtatcaacttctacagctcttttgaaaagattggaagtggagaaaggtttacctagtactcttgcttcctttagctcatgttttacggagccttactttagctaggatgctgtttcatctgctcaccttcctattttatgtaggatcagaagccatcagttatttcccttcaaaagcttattgctagagaagttgctaatgaggagagaggaatgtttctgatcagtgcttcatctgctggtcctgagatgtatgaaattcacaccaattccaaggaggaacgcaataactggatgagacggatccagcaggctgtagaaaggtaacatttccttccgtccataatctatggaacagagttgttcaactggggaaaatattctaaccatgtcttcctgcatgaaaactttgcctctgccagaatggtctgccccctgccccctgcacctgcctgcgatagccccccatctgcagctttctcctccacgcctccctgcatgtaatgcctgcacctccctctgcctgtgtgcaccctgccgggcgttgatgcagctcgggcctcccctcctccatgaggaccccttcagtcctggtgatctctttcttgcctgaaattctttaacacctgctcactaaagcatttacttgatgcttcttatatactgccttgtagctattatcttttttatgtacatatgtgtgtgtttatttaattagattggaagctcctcgagggcagggttcatgtcttatgtttctctgtgtgcctagtgctgagaaatcattcaataaatgtttctgaattggtggatctaagtattctaagtyaatttattcctcattacttgtgcaaggacagtttttataattgggagcacaagggtgggggtgatcattctcaacagtagtttgattagttagatcctgaagttatataaaatttctctacctctactgcaccccatctgccctggcaccccacttctatcctttacaattcttatactttattcccattatgggtgtgtgtggtgagtgtatgtttgtgttcactggaatatttgagtcatcccacaccaccgattttgagagccatgtaatgttatgcaagattctttgtattctcaagaaaaccaagtctctggccaggggggatgatgcattccctttatgctgaaattttctcctttatgaataaatctattgccaagttcccatgtttttctaatgaatctacagatacttgcatttggtttcagttgtgtctcttgactattgtcttttaaagttgtcctgaagaaaaagggggaaggacaagtgaatctgatgaagacaagaggaaagctgaagccagagtggccaaaattcagcaatgtcaaggtacagtgcaggcacttctggctccctggtcrtggtgttctcctgggtgttgggaaagcctgagtgtcatgaacaggaggttataactacatgattcatcctgtgcacctgaggcccacctggaccaccctcccgagaaacttacactagaaatgctcaaataagatgacattctcttcacttccaccttagtgattaaaatggatgtaaaaaatgcacataacatatatgaaacaacagctgtgggcagtgtggtgcagatgaatgttggaattatttgtctcatggtttaattttaggtctcagcactgtcatgtcaatgactttggacaaggaacccaacagatcttgtccccagtttgcaagtgtgtgaaagaaggagattagactagctcagtgattctcwactctggttggacactggaatcagttgagaggtctttaaaaatacggatgcctgggcctcaccctccaccgattgaatccgaatctgtggcaggtgggatgtagactttggggttttcagctctcccaaggtgactttgaagcacagaggggactgagaattcctggattcaatgctagttaaggtccctttgagctttaagaattctgtaacatgttgaaatctgaggacaatgatgcatgcaaagatgggcaaagaaattggatgtttagaaacaaaaacttaaaccagtatgtttggtttagcctgtgccgttccaggcatttgtattgttcactcatcatggacagggccgcctcaattttcattcctaagcttaatgtttagtcttaatagaaaacagcctgaacaaacaaagaatagctttgcaaattttctggaagtaggggactgagaaaggaaccttatttacagaaaagacaatggaagctgagaaagttgttaagtcacttgctggaggccacagtcactaagtggcatggtcaggactgagacctgcatctgccccactcatcaacctgggttttctcttggaggtcwtactgcttgctaattagcaacatctttttcgtggactttcacattagtggttgtrttcatgttagtgataatcttctatgstaaatactatttcatagaaatactcactaaccaagaccaacaaatttgtgcgtatttggaggagaagctgcatatctatgctgaacttggagaactgagcggatttgaggacgtccatctagagccccacctccttattaaacctgacccaggcgagcctccccaggcagcctcattactggcagcagcactgaaagaaggtaaactgctgtgagaagggtttgggtcgacacgttcagaaaatgtttattgaacacctgctaagtgccatgcactgtggtcttggtgctgaggatacagcagaacaagacaaggtccttactcggctggaacttatatttctagaaatagccaaatataaagaaagaaatatgtcaggttgtatcaagtgctatgaagaaaaataagcaggataagggagagagagggtgatggagttgggatcrctctgttttagatagggtggccagggaaggcctctttgatataatgatatgtaagtggacatgaaggaagaaagctaagtggtatcttgagggagagtcttcyaggcgtagggaatggccggcacaaaggtcctggtgcatggaagtgccaggctcgcctgaggagcaggcagggggacagcacaggctgagggaagggagggtggggtgagcagtgcaggcgatgagtccagggttcactaggtctcaggttgcatggcgggagagaaggacttggaatttcatcctgagtgggatgggaagcattagagaattttgagtggaggagggacttgacttgtggtttgaaaggtacctcctgactgctgtgtggagaatagacttaagagggtgaagtgcagatgttggtaataacaatgggagatggtggccgaggttgggtgaagggcaaggtcattggagatgagaaagtccagaggatgagaggccagggtggtggaaggactaagtttatagaattgaaaatactgagaattttgacaggattagcgctagtgggagggggagaacttgtgctgtgtgstaactcattcagggaaggcaaacgagtggctgaaggtctatagaggaaaggcaacaatgagcggtagtgagtggttgtaacctgagggcagcggcttcaaggcagaaaggagttgaagggagagatggagataatggtctgaagtgacagtgggacaaagggcttgggagataaaccagccacctcctgagagagtagcaggaaatgctgttgtacagaagaagggctggtaaattacagaccacggactacacacatcccacaacctgctttcgtaagtttagttttaccggaacttagccacatctgcttgtttatgtgttgcctctggctactttttcctacagtggcagagatgagcagttttgacagactgtttagtccacaaaacctaaactattaactggctctttgcagaaaatgtttgccagcctctggtttagaatttcagaatattagctctggaagagaatttagaaatcttagaatcagccatctttatttcccagttgaggaaactgaggtcttgagaagggcatagaggtctgaagtagggttcactgatagaacccctcatccatctgtttatcagatatccattgagcatctatcttgtactgttgctggtgctagggaggcagtaatgcttttgtaaaacttttagtgaggaaagacagacaatacttacggaaaaaagagaactttggatagttatctatcccaaagataatgggattgtggtaagatgaaggctttacttcagagagattagcctaaagacctctttttgagatgaggattgagaaatgagaagccagctgtctcaaaagcttggggaggatcatcttgggcagagagaaggaagtgcaaagcccctgaggctgcagtgagcttcacgtgtttaaggaaagaagggaggccagagtagcagatgtcagcgggggtcaccgttagatgaggtggtgtgggccaggcagactgggatcagatcattgtaggctgtgtttaaataattttagaagaggatgttattccaaatatgatggaaagcactggaagcttttaatcatgggtgtggcatgatcttatttatgtcttaaaacactggctgctgaatggacaagagattaggagacaaatctgcctggagacctgttaggatgtgatcacagaagttaagatgagccttggtctagaccagtgccattgacaatgggagcagagagaagaggccgaggcaagatatattttagaaataaagtcaagaagaaacttccaagtgggttgacaagaagcagtgacctccctcattgtctttgataaaggcttgatgaaataaatcgcccactctcagtatcagccagtggctttaactttctcccccaccaaaactttcactaacgctgggttgtacgcccatctgcttccattcccctggcacaccgtgacagaggtgccggggcagcggcggacccagctgcttagaacccagagcaatggaggtgctgcgtgagccgcagttggataatccaccctgggtcactgaccatccagccccatttgcagccgaaagatggagcaggagttcttatcagagtgagggagttatcttccgacaaaaagccagttcagtagtgcaccttgaatcgtcttcctgggacttcactctgctggacagcttttcctccttcctttcttttcttctgtctcttcctcttgaaacccatccatccttccaggtcctgctcagttttcacctcctgtaaaaacatattccgaatcctaatagatratagaatgctcttcctcctccatgctgcagtagcatttataatgctctaataatgctgatggagatgagtgctgatcacatgcttctgtatggtctagtgggttgtgtatgtctctttcctcctccaatctgtaaactcccctcttagttgtcaaatgcccaatatcccctagaacaggtgcttatttaaaatacagatcctgttttctcctccagagaatcaaatccagtaagtctggagccaaagactgggaatctgtatttctaaagataagtgtagggaaatactcttttgaggaatagctaatatttctgggcaacaggttttaaaattttaatgcctggtatatttatactaactgaatgacaggaagtttttaggcataccagtttactgaaagttgcatttgagatattttaatataatggtttatagttttctattgagttaattctctgtcrtaaaatgatgctaaaagtattggtctagattgaagatctgcaaacttttcctataaagggccagatactaagtattttgggttttgtaaatcacacagtctctggggtgtgtgtgtgtggtgtgcgcgygtgcgtaggcacatgcccatgttttgacaacctttaaaaatgtaaaaatcatttttagcccctgggtcctataaaaacagggacaggccaaatgcgatttgccaattcctggtctagattaaatatatacctatctttgttttttagatttatttttgtttttctccatcttagctgagagcctacaagttgcagtgaaggcctcacagatgggcgccgtgagtcaatcatgtgaggacagttgtggagactctgtcttggcggacacactcagttctcatgatgtaccaggatcaccgactgcctgtaagtgaaaatgcaggccttggcaatgagcctgagcacagtccctggagcttacagtggtcacgtaaagtaaaggcaatgactgtctctggttgaaggggacttgatatatttttttaarttagaaaaaaactgagaataaatatgctagcctaaatgaatatcataggcatataataatgacactggggtttcaagtatgaggatctaaagagtagttggtgggttatactgctctgtttgccggccaaatatcggaccttccccaacccctaccctgcctcatttttgatatgatttattcattacagttttgaaagaactttttaacttttcaggttttttaaaaaaggagtccctgcggtcaattacagaacaagcccttaaacctaatctcatgtgcatcaactgagaaaacaactcagaaaaccagaaatatacacacggctccctccgtctccctcctttctctctccctctctctttctctctctctcacacacacgaagtttggtggtatggttaaagcagaagtgccagaaaattcttgatctgtgccatcctacactttagttcatgtcagaattcatttatgaaaacattgtttcaaaacattttaaatataaaaaaaaatagaatgtagagatttggtttaggtaatttccccgaacctagctatcctgttatatgtatagttgtaggctacttagttccataaaggtttctaagataagagcataaagagtatacttttcatcctgtgcaggtggtaacaaccttacttccacaaggtcttatgtgcgtaagataaaatggataaaatgtcttcagtagttagagatcagaagattaaattgaactcaagattggaagattaaattgaactcagaacttctttaacaacatcccttgattaattaagatatatagatgcagtatagctttttaattctatacttcttttttttttcttttttaaacatcagcaccactaattatcttcctctctcaagttctgctttatctaatcctgagtttctagtttcagaatgcgcacgtatgtttttcattttgacacagcccagattcatcaggggagttgtactgccctgggtgatttccttttaaaagaagaacctcattatgccattgaggagtctctgtctaaaaatacgtgcagggatctgctgagggatctgctgctctcagcctcgccccagggacagctggagaggctcccctctgcagctgcccgagcccgcggtcgtgccttccctcccttcaggccaggcagtgaaggtctccttgtctgtatccacatctctcatgactggggagagtttcaaagggacacccgtggcatttgccagaaccattgagaggctctttagaggggtctgatgtcgggattcaggtagaggaagtaccgaagctggctggtggggtcctgtaccccaaggcctcttcagttctgggtcagactggaacatggtgctatgagagtttgattctctttataaagttgttcaaggcacaaggctagttctaaatgaaggtctacaactgtgactgaatgggtcggttctgcaaatgacttggagaactgggctcttcttcatcaggcttatgtcagcctgaggttataagccaagcagacagctctattttcagtcttcagtatacatgatgagtatcttctacttctaggaaagttctgttcactggagaccctctggcccaccctgaaattggatacagggacagggacctgatctgtgttttattcttctgccttgtcatcagcttctttcccatttgattttcctaatttctatgagggagtgagaaacagagtggtgaattctttagtgatgcctttggccactctttaagagttaggaatagcacccaatagtagaaccatttttcaaatgacagagaaacctataaaatgtccctcattgtaagtgaataagtgctgatcagcttgaacaaaatggacttgtttttagctgatctcatctgaagccgtttccgtttagacaaaaacttctttgtattagaagaggtctttgaaatcctagaggactctcattttccaaagacataagtatttttattaaagaaaaaagcatttcctatattggaaataaagttttaaaaagacacaataaaaattatacaaacaaacagtgtcayaaagtgaatatcgattttgtcagggtctggattggacatggttctaataaaacactgttttgggctttgaaaattctagttttaatcagtgcaaggtgggcacagtttaagttttaactgagttcacatgggtaaagaaataaaatcctgccaacagagatttaatggatgaagtgaaatctgtatttggtacttaaaaatatttcgggactagtttctatgttttcatagtttaaatacatagtatttgtaaatctaaagcataacaagaaatgtgagaaaaacaacacatttagaaattgttaaaaaataagttattcagagatagggacaggttcttggtttgtatgactatgagaccgtgaagtattagccatctccgccttcctagaaagatgtctccctcctgcttcggactcctccttcctcctaaaccttgtttatcgtctgctgctcttgcactggccacaagagagactttttacagacttragtctgccaagagaccttgcttttgttctayagcacctgttttaaatttcacccttcccaggaggcattttcctattaagtgagagtgagatgtagattctaccctctgtaacacaaacgacacacgaacacttcagtgcaagaaagaaaartacaaagatggtgatactttgtgcggttcgtcagttgctgtctgttagygtgtaagccccatgtgggcagggaccacatgcwttgctctgcgctcatccaagcacctcatctaagaatactcaatatgtattattttgtggtgtttcctattttgaaatatgtgttggccgtgtacagaagaacccggtgggctggccgatgtttgacgctgtcctttttgtttctgtctcgatggcgtgcttccagcattagtcacaggagggagagaaggaagaggctgttcggatgtggatcccgggatccagggtgtggtaaccgacttggccgtctctgatgcaggggagaaggtattgtgaactgatttgttagtaaacggcagcggttactgtgtataataaaatagcctcaggttctggtctgtcmcggcagtcagtgggrsaaaggtgcttttctgaattgttctcaattgatttaaatattcatatttaaactttctaacttatttcttcttcaaatgtgcttgcactgcctgtgtcatgtaggtgtaaacaaagcaacgattgaaaagttattaaaaagattaaaaactctcctgtgtatatgtgtgtctgtgctctctgacttctggtctttctgccstgcaaacctttgcttctcacccactatgtctggcagctctggcacccgggggcccttttgcaaccagatggcgccaaagtaattgaaacaccttttactttggaatattcttgcttctttcaccttccttgaccctcctctccttgcagagttgatttcctgtcaccacccacatttcacctactttttttgtggttaatttttaattaatctgaccagtttttgcttggggcacagcgattcccaaagggaatcctcttttttgacttactgctrtakacatagrtattaactctctctttaagaattaaatacataaaacttcctattaatgtctactgaaagtgagatgtcagaaatagggaaggaataaaatatgattctgggaggtggctagttggcctcttcctgcttgtcagggctccagagtttagctttatctaaaattgaattaggtacattamtaggtgccaatatgtgtcaatgtgaaaaaatggcaaatgtcagatcttctcacatatacaacatattttacatattatatactttttgtgtatattacataagactgagaaatcaagtcaaggacttttaaaatccagagaaaagacagctgtgactgagtgttcttttttaaacttcagaggccaaaatgagcataggaatgtaatattttactccttctgattgtaagctttctaatgtattgcttcttaaaatgttcctgcttttcatcacttttaagtgtgaagtttgtggtgtccaactgtgttaatagaaaagagagagtgaattggacagtaataatttaatcttgaacgcaaagttgggtggctcctacccctaaagtctccctcttccactccaattcagctacaggtagataattgaggttaagtgtctgggttcttctttggattaagctatctgcaaaattttttgcttaataaggcattttgaaarattaatacattaataaacccaggtaaagggcaggatcacttgaaatcaaacttttaaaaggtgtataatggatattttgtcattagcttcctctacaaggtaaggttrgaacaaatttctgaaagaatattaaaaaatgaaatctgactcaaatgcagaaataatggataaatcgccaactgcagttttaaacatttaccacaaggtggcagaacaactccattaaaaacgcgaaatttcctgtcttgtgtcaaacctagtggcttttgggcataagtaaccgcrggtagcacagtccaactcatttctatggttctaatttttatagactataaaaactctgtgccatatggtcttactacagaagcagtggagtgtggatgggccacgacagagccagaagagcagcgagaacgccaaccatccctctagggcgggggttcttagagcctgttctctcccatagggtttggcacagatctaatgtctttaagcttcatctccattttcagcctctgtcttttctctatcagaggkgctgcttacgagtgaaatctttaattggcagtccaagggaagcggaggtctggctagctcatcctggcatcatcagcctaaactaattgaatttaacaagttcaaaattacccgaggacatgaccatggctggctgctttttatggcttaaaattagatgagacagtaggcccttgaggacagggcatctgatggtctcccatagcgtaaggtgtgaagtttacagtgggtgatcgatatttatttattgaatggcgtgccatcgagttcaactgggagtcattcacttgttgagtgtccgtgctatgtcaagcatcattcttataatatggagcacatggacaaagtctcgctactcactggtttgcatcctagggagagaaggccgacaataaatgaataaacaagtgttcaattatggaggctgcaaaccatcactatccacgtgtgcccttaatgtgtgctgtggaagagacaaagaacaaggcatagaccctctccctaaagaacagacggtctcctgtggctggttcgtggcctctgctgctagtacttctactatggcagtcactggtctggtgatctctgactgtggtgggatctagagcagcccagctacgcgcgccactatggccaysgtctgagtctggtttcttttcccaactgctgtatatgttgatatcgtgaatctcaaacattgagaaaaggagttaaggccagacatgatattctttctttaactttcaatctgtcctctagaatataagaggtcagcctgacccaaaagacaacttcagtctgggcacagagaactcaattcacattgtggtttgcacaaggtaaatgttgttacttgagttttcagggtgtccttactgtcatcccttgttgttttaaggggtgwttgggtgaaaattgccatccatctcaaacatcgactttgcgtgaaggacgctcttgttgtcaagtgtttgtttgattctataggcttttatttctgggaggaaactgagtcagtatagataaggtaatcaagtttagagatagcaaagtgatttacccaaggtcatacattttgggacactgcagggcagcttttcagaagtagaatggttattcattttcttgttttttatgtattttaggtggaatgtagaaattttccaggttcttcacaatcagaggtgagctgctgcacataccttaaatgtatcaccagcctttatttgtggataatgaaagctttttcaagaatttgacacttacaattttgtttttcagattatacaagccatacagaatttaacccgtctcttatacagccttcaggtaactatcctcctcyaatctttgaccttgtgaatggttctcttaatgcaattctctttgatgattcccagactttaaaaatgagaacaagtgagaggtagggaatgatcttaaaagaatgacaaccttctaagtgtgatgtgttggactcacatggttttgtaatcagaggcaacaccatgactacattttataccattcttctctgaaatcataaaacagttcatatctttaaaaaatattgatgaatatgatctggcttgacatttacaatgaaactcttaggtgagtgtagcatgacttcacattttctgatgaaaacctaaattcacacytaaaattctttgacttctccatgtggccatcagcctttagagcagttaagtaatccatatgttgctttactcttttgtttgttcatccactcaacatttattaatttattaatgttgaggggatgaacacacagtgcctgtctctgtgctgactgtgctgagggctgagcacacaaaggcaaattagccacacagcctgctctcaaatagcttactgcctttcaaggaagagcagacataaaaaagaaatcatgcttgcatttaggattaaatggttggatgatcccttaggctggggtccccaaaccccagggtgcagagtgttacctgtctgggctgcacagcaggaggtgagctgggggcaagcgagcagtaccacctgaactccgcctcctgtgagatcagtggcagcattagattcttataggagcgtgaaccctattgtgaactgtgcatgcaatctagggatctaggttgccccctccttatgagaatctaatgcttgatgatctgaggtggtacgctttcatcctgaaaccattctcaccacatcccagcccatccattaaaaaaaaaaaaaaaactgtcttccacaaaacaggtccctgatgtcaaaaaggttggagaccactaccttagaccatgcaaagaaagaggctcagtgtgtccgatggcttaatttactcrttaaaatgtatctcgaaaggatatacatgcaatgtttggattgttgaaaaatttgtagaaaaatttgagaatacaagtaaatgaaagaaaatgatttctgattctacaaagagaattaaaattatcatgttggtgtataaggctccagattttagaattgttctctgtgcactcttctgtaacatgtaactttctctgtcatcaactattattctattgcatactttttaatgattatatattaaattcaactctgtggggtttattcaatcccttattgtttacacttttgtattattaacaacactgtagaggacatccttgtgtactcatctctttgaatacatctgactatttccttagggtaaatgagaagaattattttgtttaggttttcaatagactttgccaaaataatcaaatcaaccaccattctctctttttcttccatttgaagatggattagggtatctgattattttatttgtacttctttgattactactgagacaaaacatttttccctcactggtttattattcattcatgcttcatatcttsttgaatttaaaagaaaataaaatgaagcctaagttttcagcagaaaatataaaggcatgctgcattcgatgttttgttatttagacttcgactctatcaagacttctttctcttatgaccttttattcttgctctaggaccaacatctgaattgttaaagccttggattacatttgartatatgacagtgctcatcttatttatttttctatgcatatttatatatccttccacaagagcttttatttttttatttatttatttttttgagacagggtctggctctgttacccaggctggagtgcagtggcacgatctcaactcactgcaacctctgtctcccaggctgaagccattctgccacctcagcctcccaaggagctgagactataggcgtgtgccaccaagcctggctagtttttctatttcaccatgttgcccaggctgcagtctaactcctgggctcaaagtgatctacctgccttggcctcccaaagttctgggattacaggcatgagtcactgcacccagccccacaagagctcttaaacaagtttcttatctcttgccaacatcattaagttaaaatttcattatatttttgaaataaattggagagaatcaacacctttaccataatcacttacttgtcttataaaagaacatyggtcagtcatctcttattctatgatttgctggagagctttgtaattgtcttcatatggtatgatatgcgtgtatatgtatttttttcactaagtttattcatatgtctctttgctgctattgtgaataattttttttttcattttgtgtccccagtggttgttgctaatataaataaaggtattgattttggggtacttatattgtaactggtaaactcattgaactttatttttcattttaatagtttttccattgatattttgaagtattccaggtagaaaataaaaattagaaaataatgatattatggctatttgtcaataattacatgaatttcattttcttggcttactgcttaggctaggacttttgaaaatgtgttaaatcacagtggtaatagcaagctctttgtcttgttcaagatttagtgagaatgcttttagtgtcttaggttagatgtgaggttctggagttgatgttcttagcaatcaatgtatcatgtaagacaactaatctttcttttaaatgtcagctgggaagggatacagtttgagcaccagccattaacttgggggatgaaaacattgagcatcctggctagtgttgccggatgaaaacactcacaaggtcatgtgtcttcttttcaaccctgaatgcagccctgtgtagattcaaggttcggaaaagctggatcacctgaatgacctaatttttgcaacacattaggttaaaccaacatgggaaatatcaaagtctacagtgaattattttaatctgagctggtccaaggccatgggctttgaaagatttctgttcatggcacagtcgtcttttttgaagctgaatgtcttatatgtgactgragtttttacataaacaattttgaatcaggtggaatgaaatttgatccctatatcaggaaaatagrgttagaaatgaggcatagacagggctaaaaggaaaagacacagatattctagcaaagtaaagttaagagagtgaattgggaatttccctaaacttgaaaagcaagtgctgttctctgtcctaaatataaatgtaaactttaagtgtgaagattattcatttagctttaaatgaatatttaaatttagatgaatatccgatcttcagattccagctctatgcaagggaaaagaatggccttatcccaaatgttagatagacatgaagaatacctcacagaagcacttaattactgtagctgtaactcttacgtgagagttattgtctgtggtagttttgacatataaagtatgggatttttgtttgtcttaccatactggtccctaaagatttattagaattaagtggtgatgtatagtctacaattttctttagccagatcaacagagtcctgagtggcttattgtgtgctaattatttcatatttaaagatcatagtaattaatacctattctggatgataatcattgttttatttataacaactcccaaaagccactaaatattcatgtgtctgaaattttaaagattagtttccaaatttaaaaatatgaatttttgttcaaaaggccccagtgaatacatttttgagtcgtattccaagacaagtatgaatttaaaatataccttagttctttaactttcaaaagtataggaaactgctgagctgacaaagaacatatggtcaaatccccatcttcccaacatctgttatatggacagtttaaaaaattcttaggaaggaaaaatgtgaatttatccctaggagagaaatgatttctcatatggggtcaaaacatacacacatactcagtatgtgtccattttcaatttgtcccttctgtactgctttgcactctaaatgggaacttttaaaattaaaagcttccaagggcattcacagagatctctttggttttgtggaatccttccaaatcttggtaattatttcctgtgatgttgccaaacttttcataggcagataccgtaactcaaaatgtttttttaatctggttggtaatgtcctctgggctttagagtatctattttcccttaatcatttcagcctcctgttagcgatctattaaacaaataaatttcagcttagttttttgtgcatgaccttcctgctataatacaaagatataacagtaatgagactagctttagccacttacatatctcctaaaaatggtattaactgctattcttaggcattatgttataaaaacattatttacctaaagtctccaaatagttgtttttyatttttatgtcttcataatgcaatgtagctcaagtaatttctggtttgggactcaaaggaaggatactactaggtttatgtggattcttaagttctcatgaatgattgactagggagagacctcagcaagagagtgagatgtaggacaggaatgcacagccttgtgaatttatgtgccgagttcgtattcagaagactcgcttaactatcacccaaccaccagcagcaaactaccttcccacaggagaggatgatattgcttttgggctttgtttcttttctctataaattcacaggtcctacccctaggacagatgtagacacacctctctggaacgccaaaaaccttgcctttggaggtaacttagaaaaaggccagaaatattaagagaagtgaattcgggcctgcgttttgtgtttcgaggtagttccaaccgaaagggtaaacaataaccatggaaccttgtgttcagtgatttttcctctgtctgctctgacaggccgccttgamcattcaggacagccacattgagatccacaggctggttctccagcagcaggagggcctgtctctcggccactctatcctccgaggcggccccttgcaggaccagaagtctcgcgacgcggacaggcagcatgaggagctggccaatgtgcaccagcttcagcaccagctccagcaggagcagcggcgctggctgcgcaggtgtgagcagcagcagcrggcgcaggcgaccagggagagctggctgcaggagcgggagcgggagtgccagtcgcaggaggagmtgctgctgcggagccggggcgagctgkacctccagctccaggagtaccagcacagcctggagcggctgagggagggccagcgcctggtggagagggagcaggcgaggatgcgggcccagcagagcctgctgggccactggaagcacggccggcagaggagcctgcccgcggtgctccttccgggtggccccgaggtatggaccttctgcggtgctgtgaggcagcctctcaaagacaggggtgggcctgggggctcctaggacactaaccaaacatctgtcattttggatttgtgtaagaagacctcatgaggatttttcaatttgtaggtagccaaagctggaagctttcagagataacgcatatccattttgacttaaaatatggacagtgcgggccaggcgcggtggctcatgcctgtaatcccagaactttgggaggccgaggcgggaagatcacctgaggttgggagttcgagaccagcctggccaacatggtgaaaccccgtgtytactaaaaatacaaaaattagctgggcttggtggcgggcctctgtaatcccagctactcaggaggctgaggcaggagaatcacttgaacccatgaggcggaggttgcagtgagccgagatcacgccattgcactccagcctgggtgacaaaagtaaaacaccatctcaaaaaaaaaaaaaaaaaaaaaaaaaaaaggacaatgtgagggcccaagtcctatgggatcactgcactctgcctgagatgcccttaccctaaggaacaaacayagaatcaagttgtcctagaaaggccagggtgggtttgtcctggaggcacactcactgcgagcgtgctctttttccagtatttgaaggactctctttatatgatctgtcttaagagttctattagatgtagcttttagaagatcaattaactatgaatatatactataggcactgaatttagcaagtatagtactattctgttatgctgagcttcttctctctttgtaaatttgatatagtaaattcaaaatccatttcactaataagagttatttatttgygtcttttctaatcatgcttgagaatcctattcgtcccagaaatttattttcctgtgttatgtgcatgtatgtttttttaytgatagtgcctaaagttgtagaagttgataagcttacaagatctctgttgcaatctgtttttccttttaagttggctaaattatgtttattgcaaactcctcatgtatatatggatatgttttcaacttttttatttagcaaaagtaaaaactgctgctttctctgattaaaataaagtggaaacactttaatgtcatagagtgccactttttttgttgttgttgttaaagatatgccatgcatagcaaattgaagtttttggtactagctcattaaaagagtatgggagaggggagggagaaaagaagtggtaatcttgacctcrcttttactgaaatcttgattcctaagattctctcaggaataaatactttatgaaacttgtataagttagaaaaattattgtacttttcctctgtttctttacacaggtaatggaacttaatcgatctgagagtttatgtcatgaaaactcattcttcatcaatgaagctttagtacaaatgtcatttaacactttcaacaaactgaatccatcagttatccatcaggatgccacttaccctacaactcaatctcattctgacttggtgaggactagtgaacatcaagtagacctcaaggtggacccttctcagccttcgaatgtcagtcacaaactgtggacagccgctggttccggccatcagatacttcctttccawgaaagcagcaaggattcttgtaaaaatggtaattaacactttaaacatcatctgtatagtttgaacaagaagttgtccctctgaatggttggctcttgtgtagagtgaatcaaagtcctccctagcatgggaataaatcggtacygatgagctggagtttgtggcattcacttttctttggggaagtctggggacagcctttgcttgtaagttacctagacaagtgagaccatggtcatagggcttagagaatgctcacaacatgtgagaaccagacaggatttttagatgtgtgggttaaaataataatgtcctcttaaaagtaaagcaacttgatatttactccccactattgtggaccccactacatcctgaaacacctatgttgacactcagaaataataacagataccaacagggttggtagtgggactttatcagggcaatttcctgtaacgttagtgaaatcttctgtactgctattaaacacccaaaatgaaactgttaacatcatttgtcattgtaaaaaaaaaaaaaagtgttgtctctccataagtacctcataataacacaatttgctaatcccattaaagcatttgccaagtataaatgaaaggcagctcgtgttaccagctccacatgaatccgaatgatttaaatctatgtctrttataaattgttttctgggggatatgaggtagggaatgagaagaacttgaaacctctctaccgaaaaacagatggcatgcaatagaataaacaaatggctggccacatggatgtgaaataaatcacccacagcaaaatgtttcagaaacataaaacaagcagtagtatagaagtcttcagaactggatacagatttgtttctatgcttaatatatattcttagtttgtcagttggaggataatttttcagcaacaaaaaggtttgaaggtatttggcttctcccaattcaagagtaataattctgatactgcttataagttgatttattactgatccaaaagatgttgattcttaatagtggctaattctttacattacttaagtcaccgtggtaacattcttctttcttgtcagcatataggagagaatgaaatagttttttaaagtattatttcagatattctttaggtaaagaaaaaatatgatggaatcgttcagattaaataaaaggtcaagccaaattttgaaaaatgtaacttctttaatatattatcttacaactttactacaatagagagcagattgcagaattctttttctaagcacatgttgctttgctgtgttggttcattaatctgctatttacagtgcttcatgtggttttgtcagcayggttttacatactggctttggtataattccgaaactcagtttgagttaaaccacattcagcttttgtttaaaagaagcatgtctcttactttttgtgtatctcccatctttttctattgacttgtgcttcaaagtaaaactttttaaaccatttggcagcatacttgcagtagatagaaaatgtactaaggaaataaacagtgattatatacaaaaccagtctatccacatgtaaggaattagagccaaaggaaatgctgagaaatgtacttacgcttaagaaattgtatgtccagagtaggccaaggacgctcaggacattgacaggagagaagaaagtcaactgtggcttaaatctctcaggaacatcctggtttatataagtagggattacatcagaaatgctgtgtgtactgttcaccactggagttttgcagctagtcaaaaaaccttatttaktgtttacttcatgataagcaatttctacaggggagaaaagaaagtcagagaataggcggtgataagaaagtggattgaraataggatatatacacttaaaagagtggtcaaggctagatraaattattcaaaccctccagagctttcacagcttttatcattgacagtaacacaacatcagccactggtgatggccttagctaggctccgtgggcgcttgccacacatgatcttgggggacagtgactgcggggggccggacaggaagaagcaggctccagggtgtgctgggtggtaacagctgatgtgccagaaccaaggaccaggcagtgttgttgtcccctcttctgtgttttgctgctgaatctgggtgagtggccatcagtgaccactactgaggatctccatagttcactgtaatctggctaacataatttgcctataatgttgtgggctggtattttagctaaatgtgtacttaaccatgatttcattcaggcttcagtcactctttcattgttaggccataacgtctgccgttccaggtaacatcttaaagaatggtttgcccttttgcctagtctggtactgtggatagatgatcagctcagatcagtgaaaatgtgaatttctggaacagtaaggctgatgggaaaaattgtatataaaaacaattctccaatgtgtttagataccacctagataggaatttctgttggttttttcagtacagcctcagcagacatttttgtgctctaattgtgattggtttctgaattgctctacccccacccctgccaccagtaattatatgacacatcaaatttcaggcactgtgctaaggttttacatggggaaactcatttaatactcacaacaacccactgagatggttctgtcctttgagaggggcagctgggatacagaaaggtcaagtaacttgtccagatcacatagctagtaaattgaacctgggaattgaacctgggaagattggctttagagcccatgctgtcaatcattacactatacattctgaattgctttttttttttttttttttttttgagaaggagtctctctttgtcgcccaggctggagtgcagtggtaatatcttggctyactgcaacctccacctcccgagttcaggtgattctcctgcctcagcctcctgagtagctgggattacaggtgcccgccatcacacctggctgatttttgtattttcagtagagacggagtttcgccaagttgtccaggctggtctcgaactcctgacctcaagtaatccactggccttggcctcccaaagtgttgggattacaggcttaaggcaccacacccgggctaaattattaatttctagaaagctgttttgagctgtactttttttgagattgagagtctcactctgtcgcccaggttggagttcagtggygtgattttcaatcactgcaacctccacctcctgggctccatccacctcctggactcactgcaacctcccacttcagcctcctgagtagatgggactacagacttgcactatgcccagctaatttttggcttttttgtagagacggggtttccccatattgcccaggcgggtcttgaactcctggactgaagcgattggctgtttcagcctcccaaagtgctgggattataggcatgagccacagtgcccagccatgagttgtactttttaaagaagttggtttagatatagaactaatctaatccttttgtaatgcctagtgggatgttcatgattaaggaccaggtttttgtttttattgktttttttytctcccctccttccctttttaatagtaacatttggaaaatatttctaratgttttggattactgtggccaactcttgcatggggcctgaacattttcagtatcataaatactctttagctttacttttttctcataagggatattttcttaaaaatattttgtttctccaatgttgcctaataataaacccatgttatctgtaaatattttttaagatagaactttaaagaactttactttccagttttggaagttatttcatgaacaaaattcttggatgttcaaacattaaatccaaattgatattttatttgtagtggaagagatggttggyttaagaactttttctgtactcctctatgggacaccagccaagactacagaatatttgaatttccttaaacaatagtctctgtgggacaattgctatgtaatcggccctatgagatgctcaacagcattactctgaaaggcaaaaacaaagaaacaacaatwaaaaaacccaacattttattcttgtggctttttttctcctagctttaacattttagaactatatattgaatgcatctatatgttatttgcctttttcattaacagaggaaacatcttatggtataaaaatctgaaatcctaatctcccttttcagttgtatttttctgtatgcctcaatatttgcaggtttcccaaaagttctcttcagttcagttaaagcattatgattttgttatgcataggctaaaatgtaagtcaagccaaattttatgttaataatatagatactgggaaaaaagtaacttgattaagtttgagttctctttccttttactacatattagaatttggtgccaaggaaactattttcaaawttcaaagcattgtatttagaatacctcatcttgataatttttttttaaaagacagctgtgttaaactttgacaagttttttatgtaagggaagaaaatagaaaatttccaaatgaaaacctatgccatacttagtatttaaataagtcttaagaagtgagaggatgataatttctcatgttttaaaatatttcataattcagaaattgacaccttacttgtgtaatctatatggaaagaagctttgcccaaagaactttaggcaattttcctggaaattgaaactggtattagacaccataaacttctatgatgtgagtgtatttgaagagggggaatgtatttgttgactagggctgccataacaaagtamcacaggctagggggcttagacaacagaaatttatttcttcagttctggaggctagaattagrgatcaaggtgttggcagcrttggtttcttccgaggcctctctccttgacttgcggatgagatggccaccttcttcctgcgtcttcacctggtcttccccctgtgcctgtctgtgccccaatctctctttatatcagtgatattggattagggcccaccataatgacctcaattaactttattctttaaagctgtatctacaaatacattctgagctactgrgggttaggacctyaacatgtgaattttggggggacacagttcagctcttaacaggggacaaaatgatgatttttctccctaccatagttttaggtgtcatgaaagccttaatttaatattaaaaagcctgaattttatatataccaaagttgaactataacaacattgttagttttttgacttggtaagggaagtgaattgaactttgtaaagaaaataataattacatrataataaaattgtgatgaatatttatatctgtatattgatagatattgaagtctgttatcaagcctagttcaacacatagaaattaaggcaggaatattgaatccatttcctatttagtgaaactagagcagaaaatattgagtctataggtttatttcctacttatagttttatttccatgcctaggccttaactaaggggctttgggaattgtgagtgctctgattgggagggacattacgtgcctttatttgggattgattaaatgaaaacaaagctgaagggytgaagacattaattacaatatcaaattattattcagagatatatataggagtctgaggaaatcatctggcaactctttcttctagaatcgtgactatcacattargttatgtyttaaaggaaactataatattgcttgytcttggtaatctatatcatgacaaaaatataaagtactgggctcaagggcttaattttcatctttctcatcgacaagtggagatgattgactttagccttttgcagattttatacaaggaaaaggaaagatgacattcgcttgtagagcctggtgrgccaggagtgcttactgccaacttcctgattgcatatttctctgggggcaggttggctatgtgagccaactgggccagggccatcccgcctcagcacacagagcctaagacacagcaggagagcaaaaccagcaggtgggtggattcagaggcagccagccagccatgcgggtgtctgttcatctctaccctgggttccagtttaatttggacaagctgctgaagtgtgggagtccacatggtgtgaatgctccagagagcatcagaggttaggcctggccctggccatcctgagctttaaaaatgaaaaaaataatacatgcacacatatacacacacacacatggtctatgggctacatgtttgacctctctagtatgatgtggctttactctcaaagagactaaggcttgggtttggaggggaaatttgtataccaaacataactgaaggatgaggcttgctgccttcagtcacagtgactgatggggtaatgatccggcttcagcaaaggaaaggaagcatcactctctccatgtatcagaatctggggactgtcttctccccatccagctatgcagrwtttgtttttaaggtttgcttaaaatgtggaatgttcggctgagtaccattgatttatgtttgcctaagaagaatgtgaccatctgtcttagggggtggcacgcttttccttaaagggtcctatagtaaatattttagtttttgcaagccatcggatctttgttacaactagtcaactctgtcattgtagcttgcaaagcagccatagacaatatgtaaataataagtttagctgtgttccagtgaactttctaaaaacaggtggctgtagtttgcctaccccagaggctggtttccaaactttcttttcctccacttaagtgaggagtgacaattacactcctccttgtttggaatgttcacctttgggtgaattaatagtgcartattatatggcatttcatgccattcaaaagcagatttgaattcatgatctcatttgctctttataatgattttgtgaaatgatggttactgtctctgtaaagagacaacttttctctttcgctttttgttcagtctctgaaaacataaattcaggaagagatagctgaatatactagatggagtttaaggccagaggcttaaaacttggagaaacccttctccccaamtccagctccccaaattctgtgatggtattgaggagggccaccctctgactgtgcagctaatgagaagtaagatacatggataggaatttgttgctagaatcatgcttcccwtagctggctatgcatcagagtttgctgtggtgaacaaaaaaaaatacaggttcctctattcagagattgtgatttgaatcagggctyggctggagcctgcaaacttgtgtatstaacattcttcttagttgattctgaagcagccagcctgacgyatgtccccggattgctggcctgggatactggacttgatataagagaactttgcttcaaaccctggactctggctcctactgccgtgggatccytaagtcttagtttccccatctgtacaaatgggaaggaagtgttaacataattattttaaaaaatgcctggcctgtcccggggatccagtgagcatcagcttccttcctacattctggaaataatgtattccgattgtgattcaggggtcgcctgccaacaaartgaaagtgtttcctaaacgttgttagaaagccaatagtttaaaatataaaataattagctgtaaattgggaaatttttcactcagattggaaatacattagaataaaaagggtaactatctttccatatcaatctcagaggaggtgtttgtcagtggatcaccagaattgttttggggatgaagctctgatagcacagcgttttgcttcttccttttgttcctctgtctactggaacaagttacgtaagtcaaccacatttttagaaccagatataaacacccaaatgtcagatactctgacaacrtgactgaacatcacctccatttgggatggaaagcttcctatctacagaccatccaacacttgttggttacattatgyaaatatacccccaggaagacttctaattgtactttggtttcyggagtgggctctcctactagaaagaaaatgtcaaaagcagcctacaggaatattctagtgtaaactatttgtcattttaagtctaaagattctgttctagtttatcaccttaatctctttttgagtttggttatcctgaatcaatttgtacttgttagttctggagaaactgataaaagtcatggttcagcatcgccagaaagcatctcttgttagcacttataatttgaattatrtggggtaataatttatgtaaygtctgtcccactagagaggaagcttcatgtgggtagagcattacatatttctctcttgttaactgctctatcaccagcagcaagtagtgtttgatatatgatgaagatttgataaacatttatgaaatgaatggaggagtccaggtccacactcattagcagaaatgaaagcaaccatgagctgaagccacacagttgactcttttactgaggcaytgaaagaagttgaggtatcagagaaatggggtgtgtgatggtggttatcacaggcaggatagatgagtgtctccggctagctaactggatcaagtgtttgttttaaactttttgtaatatggtgcatgttagatagcattcttaaaatgttggggtaactgtaagattgtttgcctttaatatcttactggattcctagtagtagacttaaaaaattacaaacttttcttctgcctcattagtattggagtaaatttatcaatgtatagtactatatgtatcagtttggcataggtactttttgttcagttctagagatcatcttttttttattttactttaagttcttggatacgtgtgcagaacatgcaggtttgttgcataggtatacatgtgccatggtaatttgctgtacctatcaacccgtcatctaggttttttttttttttttttttttgagacggagtctcactctttcgcccaagctggactgcagtggcgctatcccggctcactgcaagctccgcctcttgggttcatgccattctcctgcctcagccgtcatctaggttttaagcccctcatgcatcaggtatttgccctaatggagagcatctctttacatgagttatttttccgttagaatattgtatacatatagcccccatatggccatgcataggagatgagaacttaaaaagttaaaatgtgtttcccataaaatgctttatggtaccctgagctttagaaatgaatccagtgctgtcgctgtaggaagatgacacatttacgatttaattgttatatcaataacaattagtcagcttatctgttcactggggtatttcttttttaaccataaagtagcttgaataccatgacatcaagcatgggtggccagttcaacatcaatgaaacactttcttaaactctttttttcttctgctaaatcctacttaacagttcagtgcatctccccaggcaaaaacaattagtatttgtttagttaaatatgctcctagaatgtgaaccaatttccctggcatggccttctagktatcagccttaaaatgttgcctgaaacatcaaatatttattatagcaaacttaaaatgaagtgtggttgaatcttaagaaatagatccctttgctttaccccakactgactgaaacatacttgtgttcttagtgggtcacttttcagacacagctaaggaggaagagttgttctgctcagacctttgaccagatgataaataagcctgggccttagttttgatctgtggagatgttaatttgccacgataaatcactgttgagtttccttgaataaggggccacagtatccattctctttctggataagatattaattcagtttaatttgaaatgttaatgcttggtttgaagatttacctaaggaaaaatgtaggcttccaaagggtgtagttatgcaggataggtttctgagccttttgctgaacaatttcatagtaaggctgttcaartttaattattttcacagtgactcttttccatactctttttgtacaagttttattacactatggctttttctttctaaaacataacatggtgaatgtttgtattaaatacagaatatttggatcatccactagaaattygggagactctgcttctctgatgaattgaggctgtttttaaggaatggtgctgtaaggctttggaagaaccgtttacaagcaaaacattggcagagttttaattttatttaatgacctgcttcctaccagtgatctcggcaccctgtgcaatgatttgcaatcaattaatcatacagaatgaatgttgtaacactgcaataagggcattgcactctaagagtctcataaatccaccagaaacaaaaaaacaggaattgcatgctcaaagacttcctcatgcaaaaccccagatgaaaaggtgattttatgttctgttttctaaagtgtcctcagaagccttaagactttcttgtggattctgagttttgaagtttccatttctcaaagactgtttggccctttactgggctgtcatcataggattctataagttttcgcctcattcggtttagtcactgatcatttagatggggaattcttgattctgaattaccaagagaagcccatggctttgtgttttcctctgaatttagggcagtcactttcaactgcaagaggccatattttggggagcctttgtagaaatgattcagaaaggagacatgtttccatcctgggaatacactgacatttgctagaggcagatggcagaagataggatagcgtgacatcagaagtcaaggagccttcacatacttggctttgccgaaagcttctggaatctgcgtgttcaggatcttaagcttgtgtgcttgtcatttcagatgtgcccttgcagttaactgtttaactatgatggatttttttttctaattttagcatagtaaatatagagctattaaacattcttaaaattatataagcctaaacccttggatgtgtgtatattgtgttgtctttattcattttcatatggttctgtttttggaatgttcttataacaagaacatggaagtttaatatatattccatctgactaaaactgaaccctctttaaagaaactaaaggttttcaaagctgttttacttccaatgagtagtttaaacttctagttcatgatggatttattcctatcaaaaagttgtactatttttgattacttgttaatgtatccagattggcatgttagacacaagtagagcacatcctgtatttttagatgcttgatgcttctgttcagcataagccctgaaaaataccaagttttgcaaatgcaaagtacttttcattggcatggaaattggagggaaaaaacacaatgaatattttggccaaaatrtgatggtctgttagtcagcatctggtaatgcggccatattttgcattcaggctccagtatgacaaagtgcagttgtacgttgacatctccccygggactgtggactggaaccacatctactttgaaaggtaatactgcaaggggrgtgcttagccttcttttagggtactccactcaactacctacataatttggtttttaaaatgttttggtttatgctaaacaagcagtctgagataaagcatggtaaaaaaaaatcaaatactaaatttgtctttatgagctccctttctctgahgagctggctatgagtccgttaccttcatgaatatggagcaaaaagcctaaatctgaactctgtcggctggaagcgaacaaagtactgggaaaaattacatcaaagtatgctactggtagaagttatcrttggtcttggcaagactacagagggtttttttcaaatgctgctgcccagtaaattaaaatattttctctttgtatttgtcaggtaagagatacagatatataggtaagatgaatatatttgtcaggttcaatctcttgcctactatgatagccagtcccttcaccccctctaccataggatagacacacaattgaattcttctttgtctaaaacaaggtgggcttaaggtaaaacatkgatcttctcaaacaaacttacaggacttctggtggtgactattttcagtttctttagagagactgttggctaactttgaggatgtatggttcaggaaagtttcrgaaaatatgttgcatgaagggataattaaatgactgagttaacactaacccagaaaaaaacactagggttgaaacaaaccctagcttcttctggtcaaaaatgatgttgcttagcaatagactctaaaatgctttatccaatttattttatttattgagacataatttacatagagtgaaatgcttagcaatatcatttttgaccagaatgaccaagarctgaatcagaccagacrtgttcctgtgaggaactgccattcwggatgaaaaaataatgaatccaacccccattgcctgcagccaagtttcggtaaatgttgactgaaaacacacttttccaatgtaatgagccttatgtacatttattgatacttcactattaagtgagggacctgagtgaagaaaagaatggatgaacacatcaagtgcactttatttatactgaacaatggagatgacaggctggcatagtgattaagatggaaggcttgggaatyatgcctaggttcagattccagctcagtcatttattatctatgaaattttaagcaggtgtttaaacttacttggtgtctcagtttcctcatctctacagttggatttctgatagtatctactttggaggtggtatgatgattacataaaacaatgtgtgtacaactcttagacctttgtgagcacttaataaacactactgttatcactgttactattatatcttgtggtgagaaaggagtacatgattaggaagtgcatttggtgcattcgagccactgggctgcttctaaagtggttgctctggggaccagagagacttgttatgcctcatttgggtatcacatgaatcagcacacctcaaaaattattccacagtttggatgttagtattaggtattatataagaatttcccataatcaaataatattgagaaatgctgatttttgggaaggcacaacttttcccaaacttctactgtgctcctgtgcactgtgaatctgcagaattggcccttcccaaaccctttcaaccacagcatcctcctttggaggccagcatcttgcaagactacttattccttgaaatacactgtggaaaaaacactgatgtcaggggatattgaaataaactcactgcatgcggcatacccttcaaagacatttttcctccctttggaacagttgaaattcaaatgacatatcctagcatgatttgccacatgggttgtgttttgaaacccaaatctaacacaacaaatttcagatagagctttgtttagcccccaggccagtttttggtcccgtggataagggttggtatccagacctcttagagcttttctgcatcagctttccagggcttattcaaaccctccatgtgctgkaagtccctcaccctttatgaggcacaggaggcgatacgcttgcatctcgatctctcagcctcggctcatgctgttctctcctttctcatcctgtgttccagccataggaattctgttcattgtgtggaaggctacgcacccccacatccccaaccttttgtacatgtgtttcctctatcgagaatattctctcctccaccttttactctcaacctgatgaccccatacttaatctttcaggacttggctccagggccacgtgcttccacagtattttctcacttgyttgctttatgcagtttatttattgagacataatttacatagggggaaatgctcagatactgtctactgtccagtcagttttgtgggaagaatatcaaggcacagagcactctgtcaccctagaaagttcccatatgcccctttccagtcaacccctccccttcaaagcagcgactcctctgcaatccatcaccatgggtgaatttcgctgattctagaatggaatggaatggaacactttgtgccttttggkgyctagcttttttcactcagcatattatttttgagaggcaaccatgttgttgcatgagcccatagttggttcccttgtattatgtttcattgatgaatattccaaagtttacttatcccttccttgttgatggacatctggcttatttctaatttttggccagtctgaataaagctgctrtaaacattcttgtacaggattttgtgaattatgtttatrtttctcttggattaatacttaggagaattgctrctaggataggtgtctgtttaactttcaagaaactgtgcaacagctttatactgtgaaatagtgattgtcctgactacaaacctccatggtgctgagaccaggttttgttcaacgtgattttcctggtgtccagcccagggcagggcacatgctagacattcagtgtttattgaagaatgaatgaataagaagttcaaatcagttttcattctgacatctctactactaactgagaaaaaatgaatgctctgtccatcaaggagatggaaattttattggctaaatgtgggctgattataggcaggcaaaaacaagagagacatagcttcctycttactgtgctcttggacttgcctctctcgtttcagggtggcagcatgtgcaggtaaaatcaggtgtgcaagytgacacaggccatagaagggtcctgatcaccagtatagctgagctcacctcctgcagttaaatctcccaacactcccattcaagaccctcccaaacctcctttttcatcyccccytaccctttggttcacctgcacaaatacatrtttcagccaaacttgacaactctccctactttgtgacatcttgcattctctcccctttgcaatggccacagactccacccagaaggcctgccacatgcagccacagccatctctttctgtggacaccctgggcagctttcaaggctcagttcatgtgctttctcctctctgaagtgttccttggccaccacatctggaagcttgctctctttggagagtctttgagatggtgtccacctgtggacaatgttcattagccacttagcaggatattctgcttttattctacttgtctgtgtatttctgctctgtgaggtaataggcttcttaagggacacrtatgtagtggccctcagcagtctgataggagctgaggctgctggccactaagtagctgatgctagtcttcatgatccttgctcttgatggccgattccattaaagaggagttaattacatggtaatgccatagctccttcttaagaggaggctttagtacaaacttgggaattcatgtcacctggtggacaattgaaaggcagctgctttcttggccaggtgcagtggctcatgcctataacctcaacactttgggaggctgatgtggaaggattgcttgagcccaggagttcaagaccagcttgggcaacatagcgagagcccatcactaaaaaaaaaaataaaaawaaaaaataaaaaacttagccaggcatggcggagtgcacctatagtcttagctacttggggggctgaggcaggaggatcacatgagcctgggaggctgcagtaagctgtggtcataccactgcactccagtttttgtgacaaaacaagactgtcttaaaaaaacctttctttaggatccagtgctagtcacaggtcagatgttgtcaggaagcacagatatcaaaagctagattattgctatatatcatttgtatgcacwaaacaatttaaagtcatctcccatagggaaagatggctccaaggagtaaaggaatagagcaatttatcatgagactgggtcttagtaggttgcccaggctggcctgagactcctgggttcaagtgrtccccctgcctcagcctcctcagtagctgggactataggcacgagccacaacayctggctttatgttctcttttgattgctgttttgrtactttaagggcctaatttttcttctgttttacaaactgcctaattttataattgtataattcctaaaaatgtttaagtttaatttctagaaatatggaagagggacctttattcttataacaaacttaaatgtaaaaagaacacctgagggtattcatatctgcactaaacgaaacacagtctatatgttaggttgtacttttaagattataatcatttacgagtgacaaacgcaaggctgtggctgtggttcggaaagatgtttcagggtttggtttcttagcagatgtcatttcaaacaaataagaattaaaaaaataatgtttytcatttttaaaaggaaaaaagttttatgttttcctgaatactgtgaatatcaatttctcaaaccagaataggtatgtaagttctttgacatctcataattttgtagttgataaagaggaaaaaacaatcatttgtagaccttagaagtacccccagcacttcgggargccgaggccagcagctcatttgaggtcaggmtttygagagcctgaccaacatggtaaaaccccgtctctactaaaaatacaaaaattagccaggcatggtggcaggtgcctttaatcccagctacgtgggaggctgaggcaggagaatggcttgaacccgggaggtggaggttgcagtgagctgagatcgcgccactgcactccagcctggrtgacatagtcctactctttctcaaaaaacaacaacagcaaaaaaattaaaaattaaaaagaattggttgccaatttttaagaagtctggtaataacataattattaagaagcaggtagaactaattagcttgggtgtgttaggtttaattgcttgccttcttctctggctcaaagaaaaacattgcatcttgtatgcttaagaattttaacagctgtttttccctctactgaaccagtaagaagtaaatgcagcattaaaattcctaggttgatttcctgccttactcagctggcagagaaatgaatttgatttttcttctctcagcaaaatgagaggcataactcttttagtgtgggtagggttgtgaggcaggccgctccccagaaagttggcttttttgccaaggtacttagaagtccctggtctctagagccttaagaggaattcagagtcatgaraatactacccyattcttgaggttgatgacctgtatgtcatttaattcagcgcgctcagaaaaagttctgacttctttttatttatttatttatttattttgagackgagtctcgctctgtcacccatgctggagtgtagcggtgtgatctcagctcactgcaagatccgcctcccaggttcatgccattctcctgcctcagcctcctgagaaaagttcctacttcttaacagagactccaagattgactatcttaatttgttttgattatttacaaattsactttgacatatttcttgtctacctgattgtattatggacaattttaaacatatacaaaattataatataatagccactcatgttctgatcactcaacttcagaaaatcaggaacttatgcctaattgtgtttcttctagactcctacccccaatacatactgtattattttgaagcggatcttaaacagtatctataagtatttattcatccataagcatttcagtatttgtctctaaaagataaggctctctttttaaaatcattatcrcacctaagaaaaagttaataattccataatatcaacatatagtcatatgtttagattgccagttgtttcacaaatgttatgtgtgtgtatacttttcacagtttatttttgactcaggatccaaataaaaccacacaattgtgtgcagtagtttaatacattctttaatatgaaagttttaatcgtgaatatttttaaagtatagaaattatgtattaggcatgcaattaacaaatgtttccattttgccatatttatttcagatcttygcctttttgcttttttagagaaataaaatgttacagatattgctaaaggcccttacccatatcttttcctttgtttttcctacttagggttagcaaatatcttaaagttggtggatatgatttccacagtatgtgtctgtgttaccgctacatttttataatgctacatatttatatctaaaaacaaaatatcataattttttgtttttaacgcttatatagctatttaaatatatatgtactttctgcaacttggtttttttcatattcatacatgcgacacaaattgctcattttaaactgctatatattatttcactttaatgaaaaaattttagtatatttattactaaggagcatttacgggatcttaccaattttttcctattagaagtgragagcagtaaacatctttttatgcacatctccttagtcacatgaatgagagtttatttcaagtataacacctagaagtggtaaggatgtcttcactgttgccagcgatgattgattttgctccaaagttgttgtacaatataactatcagcagcaagatatgagaactccagttcccccagatcttacccagctcatagcattgttaggcttctaaaatttgcccatatgctgggcatgaaatggtaacttgttctttcatacttttctgattaccaatgagatttaatatcatttcatttttattggctgtttaggttcctccttctgtgaatttcctgttcataaaagttttttctgactcacagcagattttggagtytcaaatgtgttcactcttaattatatagacaagttaattcttttggratagctttaatakattttgtactttgagtggttttcagagaaatcatgtttacaatgacacgtgaacactttaagattcgaaaaggacattcgtgagaactaagctctttctaggtggagaaaactcaactgcaagtgcagaaactactcaaaatgtgattgactatgctgttccatcctactgagactaaccatctgccttgttttttatttgcataccttctcccttactccttgctatgttttcctccaaagctcctatgcctctctcaacttatcagtgttattttacacatactcaatatagtcaacatctatccgcttcattttctttcctggaagttttgcctttagggtcctctgtacttctgttccaatatggacttgttgctctccaggcctgctctgcgtggtcacccagggccatcccttctctctcctgtgttgaaacctctgtgccctcagtctcatgcttcccctttatagtattttcctttatttggttggacatatctccaggccctccctaagaaaaagtctgattaaaggaaattttttccagattagctgaaatgtccttctcattttatttttgctactctgacacttgttttttaaataatttgtctgggcttagaattctagaatacaaaactattttcctccagcctgttgccaagggtttgactccactttccagggttgctattgagaagtctgatgcctttccgattctgggttctttgtttgtaacctgttcttactttctggataattttagaattgtcttttttgtccccttatctgaattttatcacatgtttcagtgaggtctttcgttaaagtcatttttactggttatttattagactctttcactttagaggtatatttccctcagttctgggagatattctattttttaaaaaaataattgcttctcttcagttttttcttactgtaactgttgctggttggaaattggaccttttatatcctctgatttttctgtttgtttcattttccatccatttccatttcttcacatttttgttctattttctgggggcttttttgttgttctttaactcctactattccattgattgtttaaaaaatactagctagcatactgaaaattttcaagatatttttcctgttacagctgctattttatggaatcttgttttgtggctgaaatgtctcttaaatagttctttgaagatagtaactatggtttttggaagttttcttcagctttctgtgttcctgagttgtgttgttttctccaagttagatttgtctctattttagactcctgctttcctatttcatagtttacctaccattttggattggcgtgggattgaatcaaataagagatgtatacaaaatatgtagaacaatgcctggcatttagtaagtactccatacattatgttgtttttgtaattttaaaggttttccacagcctggctgtttacatttatagatcaccttgaaataccttaaaaacaaacgtaaatggtgaagcttttggtgttaaaatgtaaaaggttagtgttctaagaaacttgaaatatttcagttcaagcatatgtgtaccttcatctatttttatcagtattgagaagtggcccaagtattatgttggaaataacagagaaactactaaagtttgtaaactactaaagtttgatatrtatcatkataaattagagaaaattctagtttttctcataataacagttctgtccctcacttcattctgacatactttttcatggmgtaaagagcttgaagttaccgcgttagcctaggaattgctaataatttacagcctgtttcatctgtgacacagcctataatttgggtaaatctatgggagtgaatgtcattctgagtgtcatggtgggaaaaagtcgagggctgactgctatctagttcaagtgcccaagtttacaaataaggaaatggaagttccaggtaaagttattacccaaggtcaaataatgctagtggccaaccaggagaagccctgcaatgtaatcctatcttgactacattttcagtttgtttttgctaagaagacaaggattaggctaaatttaattttaatatcctttctaaacataagaattccaaattagtgatttctcatgactctaattatattagaattttcaaattaagtattcactaattcatttattcatttgacaatatatgttgaaacctactactattatgacctgacatttacttcrgtagttttggactagttatactacttttatttcctawttctttttttttttttttttttttttttttgagacagagtttcgctctgtcgcccaggctggagtgcagtggcgcratctcgrctcactgcaagctscgcctcccgggttcacgccattctcctgcctcagcctcccgtgtagctgggactacaggcgcgcgccaccatgcccggctaattttttttgtatttttagtagagacggggtttcaccgtgttagcccggatggtctcgatctcctgacctcgtgatccgcccgtctcggcctcccaaagtgctgggattacaggcgtgagccaccgkgcccggcctatttcctatttcttacatattactttttaagctttaaatgaactcaaatttaaaagactggagaatagaaatccaaattccaagaaaacgttaactcatttcaaaggacagatacactgaagctataaaatgaaatatttcctgaattctgttttacataggagatgttattagattttctaggcaagagcaaagcccatacctgaatctatcttctttttaatgggtagctataagctcaaatgaaccttatccattttatagcgtaggttcacacaatttgtgtatctttctaaatagatataaatccatacatgccctagccaatgacttgtcatacagttgcattaaaattgatctaaacatagttggcatccagaagaggcttctaatttattgccccagtgttccatttatatcagatayatagaagctagactgttggaataacagaaccctttataatattgtagtccaaatatatggaagcctatagacttttaaaatgttatagaacttttcaaacctattcaaaagtagagagaattgtttagtgaaccccatctgcccacagccagtcttaattcagtgccttttctctcttctcttgcattgggctctcttaaagcaaatccgggacatcctatcatttcatccagaaatacttcaatacctttgtctaaaagataaggactcttttttttctgtaacataaccacaatatgatcatcacatctaaaaaaaaattaacagttgttacttaaaatcatgctgtcagtatttgaatttctctggattgtctcataaatgtttttttttttttycccctcagtttgtttgaattggaatccaaataatttcatatattgcatttggttggtgtgtctcttaagtctcttttaatctaaagttctgttgccrcctttaaaaarttttacaattgttaaaaagtctgggttgtgttttttgtttrtttttattttatyaaatgcctcttgagtcataaraactgtgttgtttatctgtggaaaagacaggttcaattattttctgaaatattccccacattctggattttcctgattgcattcccatcgcgtcatttgaaatattcttctgcccctatatttcctgtaaattggtaactgggaatacagatttgattagatgmaggctttattttttgacatgaaaataatatacatagatggtgttgtaaattgcatctcatcacgtggcacacaatgtctgtttctctttttgtgttattaaaattgatccttgggtccagatgttgtcagcttgatctgttgtaaagtttcacatcagcttttttcctaatgattttaatagccattgataattattgcctgggtgtaatatagatgttacatgcagaatttagaagcttctgaatttggaaaagctcacctatttccaccttctcactcctgatttgttctggcatcttgaccatttattgtctctttcttaatctttaatagacttctaattcttgaatgaactattctccagctatgttacatggaacacaacgctgtcgggtacactgtgagaaaaggctccctgagtttgggggatgctgcatactggtttttgctctgagagatttataatacacatgagcctattaaagttctgagggatctgttgattaacaaacttgatttacccggaatttcatcagtttatttgaccactacattcttttatcgtcaatatctattggcatcctgtttagagaaacatactttgaaatgcatctcaaggaagagggaaatgtagaattgtttgccccatactcccacggggcttgtgatgtgaaggccatggctccctaacagtggccttcttcttgagggaaggaagagcatgagagtgaatcaaagttcagacagcagagaggactgatgtactgtatcatatctcctgttaatataatctcatcttcattgtatggattgttttcatttctgtttcttctcagcattgcttatatagcccatattgactattccaaatatgttaagtactgattaaagttcaactcccacaatcacaacttaaaaaattgtaacacaatttgctcttacttcacaaatttrtacatgtgttatacatgccacatacatacacaaacacatgcccaccccacagcacacttcagttgttttatttcaggtgcagtattggcatatgaagaatagaaaagggaattataatactaatttagagtgtttgcttcagatataaactccagactggttgtcatgccaggggctcacatcctatttgtggctcactatggaaaaaaattgagttgcacaaaattattagggacacagaccaatttttatttgctctgaagatacctcaagctctgtatgataaatgttttccattagaagaaaaaatgttgtgcattaatgctcctgagaaaccatagggattgccagtaatgccatcaggaaatgattttttaaatgtttcagagggtaaatatgaatcaaccactaaacagggaatataacttatattacagagttggaacagtaatgataaagmcccccgcctttttttaagtagagttattctaggaaagtgtgaatttttgatttaggaacatgcacaagggatatagtaataagaagtacaagtcagacacatgattaaaataaacaagaatagagccaaggctcagaagatacgmagttctgttttgtgacctttgatggggaggatggaatgggataagacagggagagaactgaacagcgcgtcatcagtgctctcaatggcagactaaacatgctttgtgcagccctgggcttctgggtgcctggccatggggtgcactggtgagctaaattcagaccttgacagtggatgtttatgaggaaagagatactggtgcatttagatttaaataaaactttcatttaacaatgatcacgatcatgatgcttttctattcagcaggaaattcagaaaaaggcaaagcctacattaattacttttaaactgtaagacaacgcttttctacttgtcacagacctattctttatgacaagttactcttaagtttgctgttcgtaggagggmagatcaactgcggagtttgattatggacaatgtcttctgctcattagttaactttgcaaatactatcttttgaggattgtgtgtgggctcacttcaaatatatgttcttaggaagactgaagatatagtgctgggacaagtgtggcaattaccttaaaaacatgattttgaaatgctgcatactgcatttcaacgcttcatacctgcgtcagataatgaacttggttgtgtttctcaagtataaagcaattgaaaaatgcattttttgtacctcaggaatattatttggtgaatcactgagcccaaatacaactgtaaaatttcacacataacatgagaagtgtaagaggccttaatgatgatttcagttcaatccttcatgagctgaagcccagagaggggcaatgacttgcctgagattacattttaccttgtgatgtaaaagattttattcacatcacagtttaggaggcacttsgttcattttattatttttacttttatttttattttttgtagagacagggtctcactatgttgcccaggctggtctcaaactcctggcctgaagtgatcctcctgccttggctccgcaaagtgctgagattacaggcgtgaactaccatgcccagccactttgttcattttaaatatgacacatagttgcattttatgcactgagatgatagtctggtcttgaaaatagccaactagtcagttggctcaaaagaatgatgataatggtgagccaatggagggaaggctgatttctcttcactgttagaaatgtcagtattgggtaaacagagaaaagtgtgaaaaatgataaatgcaagttccaaccagcaggttgcacctaagggctaaatattgggagatttaggaaactttctctggatatcagtgctgtctgcaggtgtgtctcttgacagtctatttcctgtcccacatgcccacaaagaaaaggaatggtgccagccaaaatgtggatacctgtaattttttgaaaccatgttaggagactaacttagaccccccacggtggtcctcataatgtgagtatcgaagtttcctgcagaggctgaaattttagtttgtgaacaaaagctcagtaatgtagcagaaaaaactctcaatcaagatcycacttttctacttggtttagtcaggctttggggcttttatgtgttttagcttatttgctctaaaggttaataatgctcgctctgtttagtttccagagataatgttagggatcaaattatttcttttatgtcaagaggcaaaattgtgttgagatacttggctgaaatgtttttttgtagtttgagttttgtttcattataataatattcgtttttagttgaccaaattatgattgtattgctatttccttgcttattagaaatatgttattacatttttatgtccatcgatttacaggcaattcgatcacaaatgaaactgggtgattacttttatatagcaagaattctgctttctgagtcagtgaggtttaatattaacaaatgttttttcagtttagggttctatatgatgatcatattctctagggtaaaaagtgtggaaaaaggtggctggccttgagaaatatacaattgctgtgctggttctttcagagttgaaatggagtaacaaaatcagaaatcaccaaacggtttctaatttcaaagacagactgtctgaccttgcctacatagttcaggtagaaaccaagaaggaacatggagaaggaaattgagttcccgtccaggtgacatacaaccacaaccacctccagtaatacatctggaattacaacatgggctgttcaccttagggcacaacaagctctcacctaggaatgtgtttctccygtatttttattcttatttgaaaaagttctgattaaacttctacactacaccacacacacacacacacacacacacacacacacacacacacacaactccccatccccatccccgttcattcttggttctgtatcttcttgaagtagagcatacaatgyaacttaaaaaagagttatttctgatatatattcaatttggctgttttgaacaagtcttctcttgaagccattaaggggattttccatgtacctcaaaatatcactattttgaattttttgctccatgtttcacaccccagatgaagaaaacctacatagattaagggcttccagtgtgtccggcattgtcagatgtgtcagcaatgacctcccagctgcctcattcactggatgatttttcatcctcaatgtagtaatttttgtgctctggctggcccttctgttggtaaggaggcaggactgttgtggctttggtgacctgttcagtctgccagtgtctgctcgatggaaatttgggggcatttttttgaagttgtataaaattaaacatcagcaatttagctgtgcatatttgtatttagaggtgaaatagcttcagtctatggctgggaaaaggaattggaagtgtgactgcgygttgtgaccacaggcaygctttgtctcccagtgtggtaaaataggattcagagcattccaggttgatttgtaatgttgccctgacaaggaaatcattgcctgggaatatttttgttcgcccgattaagggaggttcctagttctataacaattgctgtgtcagttttgagaagcttaacattaatatgtcttttttttttttttttgcctttgctttcttcttttttttggcaagtgactcttcaaaatgtagtatgtaagggagggaaagtattaaacattgaggatctcttaattcagaaaagatggccaagccattttcagcacaaagagaaatgagaagcacgagagtcttgatcattagagcaaggagtcatcacgtggctgccatcctctgagcgtagatccagatcacttcctagctgcatgatgtgggtcagaatttcactagcctgagcctcggtttcccagcctgtaaattgtgggttttagcattttgagacttagagagagatgacgaatgtaaaagacctgggacaactcctgtgctctgtaaatggtggcagttagaggcaccttctgcaggtatgctttcagttgttagtgagttcctggaatttgaggtacagcatttaggatcaggggcagtagaatcaagctttgtgcctattggcatctaaagggtcagggaygggctaagcctttgagcagagctgtggttgcagcctcacccccatgcctccctacctctcttcctcccctcccctgccttgagggtcctcctttgcttcagaggcacagtccagccttggtgcagctcctccagggaccttcatcggctcctgtggccctggctgctcctcctccattgacccacctcctactggaagatgggatgaaatgaggtgtggcaaggccaccatgtccccaaagatggagccttctgggaagagttttcctttcattcctgccaagccttgcttactgccttctctagcaaccaaagatccttgtcaggagggcaaaggccacaagcatttgtgtcattggaatgtctgcacgtgtgtatatccatctaaataatagaggctttgaagaaaatgtggcgagggttacaatggcctcttttttttctttatgttctttaaatttttttttaattttaatttttataagtttgtagtaggtgtatgtggcctcttcttaatgactgaaaaataagcaggtgggcctcagagctatttgccctcctttcccacctggacttccattcctactcaggtttttgttctaacacaagctggttatttgtaattttgccatatggctgagcctgagggtgagtggtcagtggaacaagtgcagggaaaatggtttgcagcragtgtctttcttcaaatcaagcctcccttttgtctctccttgaaaatataatattagaggattttatcagaaaaagggagaatacacagtgtcctgctgttgctaggtaaccagaaaacrtcaaacccagtcagagctgaaactggcttgattttccctaggaacctggctgctcttgctgagtactttgtgtagtattaacagatctgtgattaacagcataatggtgaggctggagggtctccttcattctttcactttttaccyccaccccttgaccacatcrgtaaagtgccaaatatgttatttgagccttgaagtcaattcttgactgacagatattctgagggaaggtgctctgcagatgcaaatatagttgatttacacatagctggagtatatactgtatttccatgactttcacccattttaaaaaataaatgggcatccctttttcagcaatagcagcggtttaagatcccatgaacagtaacccatatttagtcacaggagacatttgtgcacacaatcgaacatatcttaatgatattgatgaatgattttgacacctattatgttcctttctcattgggcttggccattctgtggctgactatatgggcactgcatttcctaatcttagagagctctaacgccaagacatctgccttgtacatctcaggtggccwcctgtaacctgtgctgwctgtttcttgcagatttggacaccycccacactgagtccccaaccccccatgactcaaattcacaccgccctcaactgcaggcgtttataacagaagcaaagctaaatctaccgacaaggacaatgaccagacaagatggggaaactggagatggagccaaagaaaatattgtttacctctaattgtgttgtcatttttccaaacaaaacaaaacactggcacttttgggagaaactttttgtctccattccttatgtatgtgtgattgtctgtgtccaaattgctttaagaayaatatttaatatttcctggaagctcatttttttggcatgagtctaattaaattattgaaagccaccctgtttgtataatctttaacttatcaaatctaatttcagatttctggaggagaaactaacttgaataagcaggactattttaaaagttgttttgacgctagagtaaaattccatgtcacattttctacccaatcatctggatttcaagattccttttaagatctcaatgaagcaatttggatttaaagagtggtattcacaaggggtgaactttcacagtcagggcagttgcctcagtgcccacataggcagaggaggatgtgggaaagggyttttctcagctagtttttgtgtgctcatttcttctgggagcattaaaagtggtgatctgttacagtcactattcaactgggcacgtgttgtgattggtcagtcactgagccagggatacagtccggacttgcttagtacctaagcctaatgctggtggggtttcaagacatggttcagcmtcatcttttaacaaggcccagaggcccagagcccscatcaagtcattttgatgtaaatagtgaactttgttagagccctcacttctatcaatcagctgtcctgtccctgccagcacctggagcaccaactaccactccctggaaagaacccttccctgcagttttttaaggacaaaactgcccactcctcattaagtttgctgcctggatacacttttccacaaaggaaaactggcatatcctgccttccgagtagtatgggtctctgtgtgagaaaccaggagatattttcatcttgttcggaaatacttgtatgtattttggtgtcaataaatatcttgtacctcattattttactttgtaattttaacattatgtgtaggaccatagtaaaacattcatttcacacagacatctaatctcacctcgtgaaaagtgaaaataaaggaaaactattagattcatccaaaaatgcaacacctactgggagtgagatgtgataggaacagaaaaaaaaaaaaaaaaatcacccggatctcaatagttttttctccctacttaaagttgttaagttggatatctacattgtgtttttacttaggcaagtccaatcctaatttttttaaaagccccttttgggggcagtctttttctgactttagctggctatttttgtmacaattacattaaaaattcggtgactgatcttttcacagaatggatataacttattaaacttctattcaatcacttcacctctaagctgaactcttcaattacaacatgtatctcccattcctaaagacatctagaaatatctgtctttcctctttcttcaataaagtctagtccaggatcctatatctcttgaatgaaaagcatgcagatatttcagtctaaatcctttctccaataactataaatatctttcctttcttcatgaaattatatatagaaatagtgaaaatatgttaagatgttcaaaatcctcatggggttctttctttctttaaaaatgtgtgagctctggattttcaagacctgcaaaacaggtctgcatgcagttcctctgggaaagccagagcattttttaagtacctatattcataggttcctctgggcaattctcttatttaatatgatgacttttcaatggcatataactacatttcaaagctttcttgatgataagttcttccttttcaccatgtccccactatgtaatgagctcagatcctgctatggtctgaatgtcttaatgtttatatcccccccaggtttgtatgttgaaaacctaatcaccaatgcattgattattaggtggrcctttagggggtgagtagagcataaggatggggccctcatgaatgggattagtgcccttataaaagcggcactagagagctctcttgcccctttgccatgtggaggatgcagcaagaggacaccttctatgaaccaggaagttggccctcaccagacatggaatctgctggtgccttgaccttggacttcctggcctccaaactgtgagaaataataagtttctattgtgtgtaatacaccaagtttatggtcttttgttatagtagcccaaacagactaaggtctcaagacagagtcacagagtgactctagcacaaatttactaatcttaagagatgaccaccctatttttcaggatcataaatgggtttccccaaaaggacctayttttctcaccaagttaagagcttaaaggaaacactcattcctttagagatctgtcctagaaagaaaagcaatatttttgctctgtcccttccaggctgcatgaatttattcatcatttcatttagagtccaagctactctgcatttcatcaggactacataattcctggaatcgtgcaacacttcccagcccactcacagttgaagccctattcattaagaaaagggtaacagcccttggcacagaggacttgctgtgtgtgtgagttatgtaaggtgaagaatgtgagcataattacatcatggggtgacaaagaagtggagaggaatatgtatttcttcctgtgacctaggaatacatgagctactttcaaactgagaaccaacctgagattgttaatgtccaacctctgtatctctctcattgagaggcagcagagcatagaaattgaaagtatggattctggatccacatctgccactaactcgttgtgtgtccttggcatgttacttcacytcgctctgtttccatttccttatttataaaacagggatgactaccttatggaatcgttgcaagaattaaattattaatatatgcaatatgcttagaatagagcttgggrtatactaatcacttaatatatgctagccattattatcatattattttaaaaatctgttaataattgctcagcctagtcccagtctttaggcagatttcttccgcatagccagaaaaagtgaatagaaaattcaagtgtctggagattgctagacgtaagactggggaaagttaggtaagttgaaagttagctttcaacttatttgcatttctaaatctcctcttaactcatgtattcagtaaacatttattgacggtccrctaaaggccaagcaatctgtgygggacaaaataaagattaataagtatgcaagctattggagaagactaacacatgaacagatgatcctaaagtagagaggtgccaataattatatagagaagtacaagttgctataggagctcacaggaagagcacattggggcctagtaatacgtgaaatggagggagttgttctaaagaagaagatgcttgaggctggaaggataaagagcaggagtagggaaagacattctaagcaaggaaaatgctatggtttgaatatgtcctcaaatttcatttgttggaaacttaatcccagaatttttaattgattgaaggtgaggtctttgggaggtaattaggattagataaggtcagagtgaggcccccatgatgggattggttactttctaagaagaggaagagagacctgagctgacatgcatgctcttgccctcttgccatatgatacattctgccatgttatgacaaagcaaagaaggccccagatgccaacaccatgctcttggacttcccagcctctagaactgtaagattgtaacattttgaaataaattacccagtctcagatattcagttatcataacagaaaatggactaagacagagggaaacctgagccaaagtctggaggtttgaaacaaaagacatgagagactgtggcatacgtttggagatacccagaatgatttcctcccctctagattaaggtgtccaatgagaatgtccatctakctctgcctctttcaagcactctatataagaagtggggaaatgtggaagtccacccctgccctcgttggaactgatcaggttccaggctatggagcaatagcggactccttcctgggatgctatgctcttaaagtgtaaccaaatgcccyctcatcccctcacctttccacatccacctcttccataaagcaatgtaggttctggtcaaatggggaattggatatcttcctatttgatcccacgccacaagaaactaagagtaaaaggggtcctgggatcacctgaagatgcttattggaacagaggggaccaagaggatgcctaagtgtaccgctaaggggtggattgatgacttgcatgataacccacaaggcaagattgtaagtggagaaaaaaagagacaggctcatgtacctcttctgctttattttttacccaaccctgatgctacccatagctccctgttttaatctaccacctagggctgwgtggagcatggaaaagaaaaaaaggaggggaacacatggaagattccagaattatcttgattgacatgcagagtttgctcttttctttcctgactgcctctcatgcacagatgtccctctaccaatgtgagacaggcagcaaaaaaatatggaaaagccaaacagacttgggccctacttactggatctcccccagggccacagggttgcacaccaccagggggcactattcatgctctggagcacacatacgcgtagattccaacgtgagtggaaacttatggagttgtacaatcctgcaaccttgcttctgagctaggtttgcttacctatgaaatgaggataataatagctatgtccggatcacctgaagtcaggagttcgagaccagcctggccaacatggcgaaaccccgtctctactaaaaatacaaaaattagccaggcatggtggcaggtgcctgtagtcccagctactcgagaggctgaggcaggagaattgcttgaacctgggaggcggaggttacagtgggccgagatcgtgtcactgcactccagcctgggggacaagagcgagacttcgtctcaaaawaaataaataaataaataaataaaaaataataacaatagccatgtcttgcagggctgttgtgaactacttgaagaagcccagtgcagtaaacggcatacagtcagcactctaaaaaatgagagcagttgttwtatgcyggggataggggtagaaagaaggcaggcttgggcatgctcaagaatcgaagtagctagggcatcgctactttggttttgtccagctcattttccygtgctgagagatgtcgaagatcaaagcctgttaggatgctgggctcagagtaagagcttcatgctacttattggatgagaggatgaacaagagtctttggaaatcagagatcaaagggtcgtcagaactagaactagaactctgatccattacatttctttgcctctggctggtgagttcaaagcagtcagctcgagttgatgattgaacatcgttttgggtgaagtaacaagggaccatggttcagtggttctgtagaagcttcatggctgagaaacttcaacatgccattatttgaatcctagttgtctactctttgaatggcagaaagtcaaaggttttagatactaccagcagctatgggtctcataacaattgcccaaggagaaagaatgaacttggtacgaacacaggattatattttctttgctaatttcactagattctatagttacattagagaactgttccttatttctggaagagccccaatttccaccttcccctttttttatgcataggtctggcaataaatttaacttggctctgtctccaggcaatccagggttaaactgtctcctrgggcacacaatttcagtccctagggaaagtatgaaaaaccttctcttcttgttcagaagctcaattgagtgtctccattttatttcataaatgagatctgatttgtctcctaacatgtatttttacttactcaagagtgtgtctaagttcttttctttctctcctgagctggttttgggttgtttgcctattcatagaaggaaacagtgagggagaaagcagctagaactctgatgaatggtttacttcttgttagcaacccaagttaaacatttaatgatggaagcgggtatgggctgaaatgccatttgggggtaaatgcctggcttcattttttcatgctctctttaccactactcgccccagcccctcacaccctgtataatgtctgagcaggttttctgcatagttgccagtgcttatttttacaatctctaacataacagcttcaaatataaacacaaacatagccagcatgaacgacagcatctgcatygrccacggagctaaaacaggctcttagaaatgtgcttgacatttcccgtggcagcttcacagcctccttggaaagccttggtccacctctctgctgctgacaagctctgatttgggtaagatgctggcaggtgccagcaaaggacaataggcttttaattaaggtctgtagagccatagctcaggaaacacacctcctgaagagttttttttkttttktttttttgttttttttttttktttwaaaaacacttgcgtttcttcttgctaccctacraacagtaactgtgtgstccatcgaggcaaytgtggtcgttaatcttccgyagcacaggaattgctagtaacataaaggtagtaatgggattatgttttcttttctttttttttttttgcaatagctyaraaaattaatgttaacttctgttcctagtttggggcagttgtttttactatgatgaagctgaatgtgatcatacaactccatctttccatccaaactccctccatgcaaatttcttattatatctgacacagaattaatgtaaacatttttgtaatggccatattttgagtcactcacttagagraaggttttctaatgtggaatctgagcctgttaagcatcgttgctatggagactatgagagttggattaattaaggcttgaacagatgtgaagtgtgcagaatgcactattttctgttagtaattaaagagggtatgtgtgtacgtgagagagaaagaaaaatagagacaatcc

SEQ ID NO: 10025 - DNA, 53323 bp, Homo sapiens
ctatatataagatcatgttgtctgaaatcatagacaagttcttgtgatttggatgtcttttatttctttctcttgcccaattactctggcttggatttccagtactgtgctgcatagaagtggcaaaagtgaatatccttgccttgctcctgatcttacaggaaaagctttcaacctttcactattgactataatgttagctgtgggcttatgtatatggcctttattttgttgaagttactttctttccacacctgagggtattattccttcctattgcctgagggcactattccttctttaccaattgttatcataaaattatggtaaaatttgtcaaatgctttttctgcatatattgagatgattatatggcttttgtccttcattctgctaatgtgtgtatcacatttatagattttcttatgttgaaccatccttgcatcccaggggtaaattacacatgatcatggtgaataatccttttaatgtgatgttgttgctttgtagttactgtgagacttagataaaacatataatagttataacaggctattttaagctgataaaatttaacttcaaggataaaaaaactccacacttttactctccctccacatttwataggtttttaatatttttcagactttatgyttttgatgttataatttacatcttttatattgtgtatctgttaacttattgtggttataattatttttaatagttttgtcttttaaccttcattctaaagatataagtgatttatacagcacaattataatattggaaaattctgaatttgactgtatttttatttttacctgtgacttttatactttcgtagattttcatgtaattaattaacrtccctttctttcagcttgaagaattccctttaacatttcttgtaaggcaggtctcgtgttgatgaactacctcagcttttatttgtttgggaaagtctttatctcttctttatttctgaaggatgggactcttggttggcagttttttctctttcaacactttgaatatatcatctcactctctctgggcctagaagcattctgctgagaaatcttgtgatagccttattgcaattcttgtctgtgatatgcttcttttctcttgctgattttaggatcctgtctttgtytttgatttttgatagtttgattattatgtcttggtgtagtcttttttggattgaacctgactggagatttttaagcttcctgtacctgaatattaatattttatttcagatttgggaaattttcagctagcaatctttaaatatgctttctgacccccttttcctctattttctccttcttaaactactgtaatgtgaacattagctctcttttttaatttttaatttaatttttgtttttattttttgagatgcagtctcactctgtcacccaggctggagtgcagtggcatgatctcagctcactgcaacctttgccttctaggttgaagagattctgctgcctcagtctccccagtagctgggattacaggcatgtgccacaatccctggctaatttttttgtatttttagtagagactgggtttcaccatgttggtcaggctggtcttgactcctgacctcaggtgatccactcaccttggcctcccaaagcgctgggattatggcatgagccactgagtctggctgaatgttagctctcttgatgctgtcccataaatcttgtaggctttcatcatttcttttcattcttttttctcctctcactgtatattttcaaaaacctgtcttcagttcacagattctttcttctgcttgatcaagtctgctactggtgatttctactgcatttctcacttcattcattatatttttcagctccaatttcttttatgatttcaatctttctgttacatttcttatgttgtgcatttattgtttctctgatttcaccaaattgtttctctgtgtttgcttcaaagtaactgagcttctttaaaaacaattatcttgaatccattgtcaggccatttgtagtactccatttcttttgggtcagctactgggaaattattgtgtttcttaggtggtgatattttaatttgggttttcatgtttcttgctgccttacactgctgtctgagcatctggtggatctgccccaatttcaggctgtatgggctgactttggtggagaaataccttcttatgtggaataatgygaggatgctggctgggtgggatgcaaaagttctgacttcagtaggggcaaagctgtgtggtctccatgcagatctgtcagctgaggttggtgttagtgaatactacagggatccttagaggccaacactgtgggtatctacagtggcaatgaggctgttgaggttttcaattgtgacaagtcctccatatctctttttttccccacctgggaagtcatgactgaggacatccctcttggaattaggtctaacttgcaggcctgctcctggtggtggtgacactggtgtctgatgaacagtgcccatggagtggccaagagccaaggcctgaagcatgggcatgcatggagggaccacagcaccagattcaattgtagcaatrgtaccagtgcccaaggcacaggcatacttactatcacattgataatggtgtgtaaaatgcaggtacttataaagcagctaaggagccagggactttactgcatgcatacgcagagctacagtggctccaggatccagggtgtgggctagctctccttggtggctgagctggtgactagagcatggacaggcacagagaaaccttgactctaggacccagggtgttcactagctcactatagtggtggctctggtgttggaggtgtgggtgtgtgtagtacagcctcagagacagggtctggagcgcaggtgtgcacattactacagcagctctggagttgagaatatgggttacctttctacagtggctgaactagtgtctggagcaaagactttcacagagagaacttggcttggggtyccagggtgagatctagttcacaacagcagtgactccagtgtctgagacatgaggaggtgcactgcagccacagagccacagtccagagtgtgaatatctgtagagcagccacaacttttggggatcaggaacacacatagacttgtgagaggtggtaaccctggccccagtcctggggcagtgcaacaatagctgcttcttggtgagggggtgtgaggggtagtgcaactgtgtttccctttttagcatcctgctatgggaatggctgttggayaaaagatgccagtgtcctctgtggagcaggacactgggggyctcagtggctctgtgtcacatgactgacacagatagcctacaaatttctttattsgtagctatctcctggtgtctcatatatgccagtctcaccggtgattcttctacatggatattctttcttttctccattgtgttgttccaaattctttaacaggctcttgagccccatcccccaactccccacccttgtgagggctattttggtttgtgtataactgtctatgtttgtttttttgttggggcataaggctgacatctcctactccaccatcttgctaatgtcacctgcataggaatctttttatgctttccttatattcactaaaatttaacaatatcaaacttaaaaacatatgatcaattgaacttattaatatcaaacttattataaataagaaactaccaggctgggcatggtggctcatgcctgtaatcccaacattttgggaggctgaggtgaaaggatcacttgagcccaggaattcaagaccagcctgggaaatatagagagaccctatctctagagatttttttttttaattagccagtagtgatggcacacatctatagtcccagcyactcaggaggctgaggtgggagaattgcttgagcccaggaggtcaaggctgsagcaagcagtaatcatgccactgcactccagcctgggccgcagagtgagaccctgtctcaaaaaaagaacctactagtctacataccacacttcytcatccccatctgagactatatatattttttctaacatgaggcaatgccaaaaagwggrgctggtgagtgaaagtaagaacagaaagacatggaggcaagtcttatagaataatagccaacacttaaacttacacttaacagcgtgataggtattgttccaaacacattaaattcatttaatggtccttacatgtctatgtatttggtgaytattatccttattattcacattgctgagtgtattattctgttctcatgatgctgatagagacatacccgagactggataacttattaaaaaaaaaaaggtttaatggactcacagttccacgtggatggggagtcctcacaatcatggtagaaagcaaaagacacgtcttacatggcagcagggaagagagagaaatgagaaccaaacaaaaggggtttccccttataaaaccatcagctctcatgcgacttattcactaccatgagaacagtatgggggaaaccacccccatgattcaatgatctaccaggtgcctcccacaacctgtgggaattatgggagctacaattccagatgagatttgggtggggacacagccaaaccacatcactgaggaaactgagttatagggagattagtaacgcccaacacagctggtaggtggtggagccaggcagtctgactctagggtctggactctgaactgcatcatgctgccaagaagttcctcattttttcctctctctaagtttcccttattcccctacagtcattccttcaacagcatttccttcaccatcttttctacttctactatataattaattttttcttcttggtcccaaattccaacgtgcaaatgcagccttatataccctaattcatctttacctttagactttcttccaatgtttctacttcattccattttaaatttatccatgagatgcctatttacaagctgtaaccatcatgaagtgaatgaagaataatacctactactgtacaatagaattccaagagtataaataggagttatggctttctgacttgaaactaaatacttgatacttgattttgctgtctgagatcaatctgaaaagtaataataatcrctaacatttgttgagcatcaattgtgggccaagtgtcatttcaatcactctgtacatattaactcatttcatcctacaacaacccggtgaggcaagttctgttattctgttttacagttgaggaaacagaggcatagagagcttaagtagtttgcccagtagatagccaraagaggagccaggatgggtctcgggcagtttaacagcacagctgaagtcttaaccactatgccaacagctttttggtcctacacatcccatgggaagaggaaaataaaaaggtatctatttgtatacctttttatttctgatataagaagcagaattcctttcacatgacctatgtctatttaatacgtcattttgaaacttaccaataaaatttcccaagcgccagaaaactgttagtggctttttccatttctctctatttttttttgtgctactaattttgcttctttccctcagaaggctgccggaatagtaaacattcactgacatgtcataattactggaaaatgggcactggaaaatcacattgtaattaattcaaagcatgttttccraatgtactactttaaattggagcttatakcataatccaaggaaacctttgtgtgtgtactgttcccacattgctcagcctgggatatccaggagtaattcaccttgcgcctgcctccagaccatsttccatggaagggggtgaccccttgcctcttggcaaccactatttctaagctgccaacattactcttgcattatcaacattctaacttcatgggaagggctgtggtgagtttctggaatgtgaataggaagttgtttttctaaacagcctgacactgaggggaggcagtgagactgtaagcagtctgggttgggcagaaggcagaaaaccagcagagtcacagaggagatggtgagtttatttttttctgcatgggaagtggttgaagtgagttgragtggtatggrgtaaagtcaggcaggtaaaggttcagaaagtgaggaacagcgatagccatggagttttatgttgaattgcctattagattttgtgagtacttttaaacttgctgtccactttgaccctcccaacacccttgtgagttgaggttgctatttctattttacaaataaagccatcgtggtttacagaggctgtgttttatctaagcttcactgttaggctacatgatgttgggatctggggcctgtcctctggctccgcagstgctgttcctcctactagaatttataggggmtctctgagaatagatcatggtaaacctgtcaccccattttccaagactgtacttctctctgggataaatgatggaataaatggaagactgggtaggtgcyctgggacaagcttacaattgaatagtttctcatccccatccctcccatttctttctgtgagcctatgaatcttctgggactgatctggaatatccacatagtttccttttctgccctaagaytcaatcttgttaatgactcagtttcttcttctataaaatggatatagtaataatactctatagtttcatcatgaggattaaataagattttgctgaaaagcatccagatctgagcctgacacatagtaagtgattagtaaatgttagccattattgttacaataaaaagaaaattcttaggaatagtggggtttaggattcagggaagatcyaaggatagctaggcattttgaactcagcaatgttatatgctcatggataagatgcacgtggttaggctacttctaattcagggaagatccaaggatagctaggcattttgaactcagcaatgttatatgcacctagataaaatgcacatggttaagctacttccaattttcctcagactttccaagagtatcccacatagtcccagggtccgaaatcctgcagtcygtggctatggaggaacmaggcaggtctctgtttttgagcacctttctgtgggactccagaaaaaagtaccgcatacacctgattcatcctactgctttgctttactatagcacacttttcaagtacttataatgtgggtttctgtgttggggaaaacaggaataagagtatgataaagagaagaggaaggagtttgagcctgtcttaagtttgaaccacaatgacctaaggatatgaattacttttgtcctgtctttttgcatgtcatacttctgaattggttaacttaaatgagcagttattcctctcttccttctactctccttggcatcctcstctatttcaaaggtatgaacttattggatcagagagttctttgagattttgatgaaagttacaacttgtctttcccagatgaaagcaaaaacatcgacataaacaccaacctttagagacaaccacaggaggttcccagacctccatgtggatcccagggtaagaacccttctcgattgcctsctgggctttatgttcagaagcccctctcttggtaccctgaaattaggcttgagctctacagcgaagtgctaaggccccagccctggaatggtttttaatatttcaaagacaagacctcttccttttcctctgagcacatttggccccaaagattcagaaacctcaaactgcctgtgtaaattttgcttcaagttcagagagtggctttaattaacttttaggacctgagaaaatgaggataaggtttttctggtggggtattttcaatcasatagatctcagaggagtagctcttgattgggaacttatagttaaattgcactgatgtttgtcaaagttttagcgggctatggccgggctcagtggctcatgcctgtaatcccagcactttgggaggccgaggcgcatagatcacttgaagtygagagttcaagagcagcctggccaacatggtgaaacaccatatttactaaacttacaaaaactggctgggcatgttggcatgtgcctgtaatcccagctactcaggaggctgaggcaggacaawctcttgaacccaggaggtggaggtggcagtgagttgagatcacaccactgaactccagcctgggtgacagagcaagacttgtctcaaaaacaaaacaaaaaaaaagttttagtgggctaaggagcaggtctggrttttcgtccatttataccttttaaccaccttatgtggcttccagkccttactcttcttttcattacctgtttttcaaaatgcaactaaaatagttcagactctcctgggctagccaccagctcttagaatgtgcatcttcagagatctttaagtagaagcttattgatcaaatcctcaaaaatcaaaatgacttactacataaaaaactgtgtttagaaaaaaccctggacctaaacctagagagtaggcacacagtggttttataaatgacattcattatattgtcttcaaggtgtctaatctttttgattaaaaagtaaatcagaaacttcatgaagtcaaatacagagcaaatcctcactatttgtagagatataactcatctctgatccaatagactttttaaaaaattttaagtgtcgtactttatttttaatgctaatattttactcaaaataatggcaattggtagtctaaattaaatatatgcttggattctaagtgttgatgtcctgggtcccttcttgtctatattcataatttgctctttggcttagagacaacctcttttctcactgtatttctttttccacccctaagctgggctaccaatatctgtgccacaccactaacaccaccacygtccagaaacataagggaactaatgtattagctgtaatagcttgtaacatctgggctttgctaccaacaagttgtatagttctgcatcctcaacaactctcatattcacctcccctatttgcattcccactgatgccagaccaaaccwgtccctctttaactctcactgggaccattgcaatagcctcttcttttgcagtgcaatctccctgattgtaactcatttaaaaaaaaaaaagtatcgcactactctcacccctataatatcagcatttttggaggccaaagaaaaagtattgcttgagcccaggggctccaggccagcctgggcaatatagtgagaacttatctctacaaaaaattagccrggygtggtgaygcatgcctgtagtcccagttactcaggaggctgagatgggaagatcacttgaggccaggaggtrgaggtttcagtgaacccagatcatgccactgcacttcagcctgggcaacagagcaagaccctgtcccccagccccacaaaaaaaatcataccaccattaagtgcatgtgttcatgatacttctctgttcagaagtatcccttctgccaactggtatttgtgacccacaagatatggtctcaaactaccttttcagttaacctctaggatctcccaatcttcagcaggctggagtgcagtagtgccatctcagctcactgcaacctctgtctcctgggttcaagcgattctcctgtctcagccttctgagtagctgggattacaggcatgcgccaccatgcccagctaatttttgtattttttagtggagttggtttcgccatgttggcaaggctggtcttgaacttctgacctcaagggatctgcctgccttggcctcataaagtgttgggattacagatgtgagccaccgtgcccagcttccgttggcttatcattgcacttagaataaaatctcatccccttgttttggatcccaaagcccgatgtgatctgtcactacccccggctcrtatttttctctccattgctcattccattctggccacactaatgtcttcatgttctttgaacacactgcagtttgcttccaccttaaggcctttgaaatagctttttcttcttcctttaatgctcttcttcctgcttctcactggctggtttcttgcagtcattcttctctccacttaaacattatctcattaawgaggtcttccctgacgttcctgaccaacatagtgacacagtcattctatcacataagtttcatttcctacctagcacttatggctatattctgttaatatttttcatgtttacttgtttagtactgttgtgtagttattagtatttgtttcattgtcttctctaccaatagaatgtgcattctatgaggactggaattatgtctgttttcaccattttatttgttcacttagctattatcactactgtaaaagtaatgcattcagttataattattatgtatttttccaacattttcttatttagcatatttttgtcttactttcagttattcctctgccattattcattcatatatttatccataaaatgtttattgagtattgagtatgtgccctaccatggctggggattcaracctgagtaagtaatagtccttgcccttgagaagcctctgtcagtagcttcctcagctgtatgctcacatgtttgttgcgcatttaaattgtggacctcctgctcaagagaatattcagaaacggagatgctgattagaggacaytggaaacagatgaccataaggaggtcatctttacttcccaggaaagcagaagaatgagaagagaatagggccatggaggtgggaacctagagaaacacttacctctgcaagggaaggcagaggattgaggtagattcagaagaagactcagaaaagtttctcaaacattagagcagaagaacaacagaagagctaagggaagcattttaggcaaaaggaagtagtggtatttactgctacagaaaggtcaaggaagataagggtggaaagtcttcatttggtttggtaatgaggatgtcagcaatgaagtttgcagggacactttgataggatggtcgggcagtgggctggagagtaagggggaggcaaggaagttaagaaagtttagctataagaggaaggagagaaacaggcagatgtgggcaggaggacaaagggtcaagggagggacattgtttgattccgcctttctaaaagcacaaagctgtggtctacaatgtagacaaaaagaacaagatctcctttctgtggcactattcttgccaactttgtaagccacctggaacgtggcaagccatgggacacctactagcctctggtacctccttgtgtgaaaagttaggtcaaggcatttgcttcttccactttctctctgcttttctcttcaccctgcaatcattawtagtttttttgcttgtttgtttgttttgttttttgagaaagagtctcactctgttgccaaggctggagtgtctcggctcactgccacctctgccttctgggttcaagcgattctcctgcctcagcctcccaagtagctgggactacagacatgtgccactatgcctggctaatttttgcatttttagtagagacgaggttttaccatgttgccaggctgttctcgaactcctgacctcaagtgatctgcccaccttggcctcccaaagtgctgrgattagaggcatgagccactgcaccagcccagttytttattaaagtaaaattaaasataatcatggtacttaatgaaggcttacacaggcacaggatgttattctaatgacccagtctctgactcctttccagcaacttccagttgaaccagccttccagagaacattaaagactagcagagcatgtggatgcttctagagaggaatttcctcttgttttagtatttaacttgcttagtaacacaggacagagcagcatcctgcagactataatgcagagtaggagcaggtatgagaaggcctgcccaccccaagcaggtttcagaggaaaactgttactcaaagaagatttttaaacatcatccattctccatacctccacacaaaatccctatcagttgccttacagttaacacagaatcttgaacttgggccacattaaacatggacagacttagtaggtcatgaaccatctgagattctctaaactactgcaagcatgcatttgttttgaagaaatctgaccacggcttttatcagattttcaaaattcataagccctggaagaataagaataactgtgttaaccctatgcacattcatgtgagcaagcttgggcaaaycatttacgctcactgagtctcagtggtggggagtggtggctgccccatcttaggcattcgaagtctgaaagacttcctgcagaacagcagataaatgctaagttggcttggaagtgacctttatgktctccyatagctctgaaataacctgtaagaggtgaatcttggtatttggtgatgcatagaaacagaaaagtaygtcagattaaagcaggggatgcacactgacttgcattttcctttcttagatgttgtgccktcatcaaaagcactgtaccagtcctctaaaaccttcaaatgtttaaaacaagttgtctcgctctctctcactttgttttatcttgtgtggtagagaatttgctgatgaaattttgcttaaaaaaagttcaaacaaacaaacaaacaggttaaaatgggaaacatctctttttggaaattttgtttaaaccaaatcttatttaaaagtttaaacaaacaagtcaaagcasgaaacagtgggtagggttggccactgtgatgggagactgggagcctcaccgactccttcgccctacacactcttgtgagctggccccaaagccagggaaatccctagaaatamkctgttcagggagaaaaccacttccacaggaagagtaccactaaatttaaaatcgttgcactccttctgcaatctgtctgaatagaggcaaagcccaggttcaaaggcaagyactcaggtccccttcatgaaggctgcagagttgtgctcttcagcagcaatatttttgctcctatacctccaaaaatatcctggaacactatgttacctcttacacctttctaagtggaaagctacaattttttatcccaaattttaaaagcaaaagaagattggattttccagtgtattacaaaaattagackgtaaaaataaaattgttacataatttcttaaagtttatccaatggaataaagtactagcatgatctgcaatcctcatcacttaaaagaccacaagcaggctcttaagaaattttatattattcatttttctctccttgaatagttatttctatcccacttctacagtatttagcctaagattacacattttaagcttaaagtattttcttgattattatacttctttgcaaaataaaaatataaaatttcaattttctacaactgtaagtctctatgtgttaaaatgtttttcttttctattgagttagcatkacaactactttcagtacacaattaaataaagtaaatatactrcaagttttgacaagtaacttaaamctttatatttaaattgctattaaagattcatctctaagacaggaggagctttccctcatttgttcatatatccatgaatgaatattacttatcaacaaaattagacaagtttggcatcaatattaytcccatatttcattttcaaggatttaaacattgagaaacttcattcatatgaataagtaaatggaattagaagttttattatagcaatgtctcaattccttgaagtccttccaagttatatgccccaaattatatagtgatttactatcaaaatktagtcagacttgacaacttaatcgggtgctccctcaaagctgatgaaaggaaataaatggaaatcactagacttgaaaacggatttgctgcaatatcatttacaatattcaaattcttaatacctataccaatatttcgaatcatctctggcatacgaatgtatttatatccaarggcaaagctctggaataaataagaaattagtaaaaggtayaatttttctcttataaagtggragaaaggtgtattttaggywgattgkttttaagaaagtatatatgtgaaagttgagaatctgaatacagatttaattaacactctctttgcttgtgaaccccttgggaagtcagccttatcctggtttgaagaattccacttcagcrtttggaatggtgcattttgaaatgtgataggaagaacagcttgtgacacaacacaattcagagaaagcagyggggttaggttcrcaccaaagggttatcgatcactctgcattttgtgcaaataaacagctgtaaatcataacgttatgatactctcagtgtttaatcataggtcctgcagagatcagcagcttataagaayacaaaatatgcctacttaccaaagtcaagattcagaagctcccagatgaaragttctaggcttatgagataactctactctctgggacacattaactggtttgagttgagttctccctggtatctggtcaggctgtagtcaaaagtgcatgaacacatgcacacacaygaccccacactgtcccatgcaccctactgggcgtgacacatacacaaccccacactgtcccatgcaccctacataatccatcactgggcgtgacacacacacacacacacacacacacacacacacaacctcacactgtcccatgcaccctacatcatycatcactgggtgtgacacacacatacacacaatcccacactgtcccatgcaccctacatcatccatcaccaggacatgatacatgaacacacacacaacaccacacagtcccatgcaccctacatcatccatcactggggtgtgacacaaacacacacacacacaactccacaccatcccatgcaccctacatcatccatcactggggcatgacacacgaacacacacacaaccccacacagtcccatgcaccctacatctcatcactggggtgtgacacacacacacacacacacacacacaactccacaccatcccatgcaccctacatcatccrtcactgtggcatgacacacacatacacacagaaccccacactgtcccatccaccctacattatccatcactgtggcatgacacacacacacacacacacacacacacacagaaccccacactgtcccatgcaccctacatcatccatcactggggcatgacacacgcatacatacacaactccacacagtcccatgcagcctacatcatccatcactgtggcatgacacatacacacacacacacacacacacacacacacacacacaaccccacaccgtcccatgcaccctacatcatccatcactggggcatgacacacgaacatacacacaaccgcacaccgtcccatgcacgctacatcatccatcactggggcatgacacacgaacacacacataacctcgcagcaaattgtcacagaccaaattgtggtctgaggcaatttgagatttctttacaggaaaggttttaggtagcagtctggctgggatagtgacaaaactgcaaatgcatagcaaatgcactgtttttatgttgatagtaatgttgagtggctttagaggggaactgatgtagcagctaggcttggtcatgtcgcatgctttatcatccaaaacagcaatgcagcatgggatttagaagcctggaggttaatgaaggttaaaaaaaaaaaaaaaaaaaagtacagtggaaagagctctttcttgtttcaaagtcaagctctgctactgtcattctgaacgtgttatttagatgccccaagcttcagtattttcatgtgcaacatgaggaagtcggacaagatgagcatcactagaacttagatgcccaaaaacattttttgttgtttttttgagacggagtcttgcactgtcgccccggatagagtgcagtggtgtgatctccgctcactgcaacctccgcctcccgggttcaagcgattctcctgcctcgacctcccaaggagctgggattacaagcacccgccaccacacctgtctaatttttttttaatgtacttttagtagagacagggtttcactatgttggccaggctggtcttgaattcctgacctcatgatccgcccacctcagcctcccaaagtgctgggattacaggcatgagccactgtgcctggccccaaaaacattttaaaaatattcatagatttgatgaaatcccaacagaagagagttcatgagaaataatagttgctatagatccaaggggaacaagtttactgcatatattaagaaatattaaatatatacatacatatgtatattaaacattgaatagtattgtagatgtgtacagaaatgaaaaagcaagaagataaaacaaagatccatagtacaaaatagatggcatagcataacacaatttgttgatgctctgcacctcaaagtataggttagacattatttgtgtgggtcaggaagttctcatgtgactttctgttattcttgggtatgacataccacttcttaaaaagattgttttataataataatgacagccatattaatgtgtttagctttcttccatacacattaaaaatgtatcttaaaataaaaacattggtggcacaaactactcaataaacatttgttgaatgaatgaagaaatgaactctgtccccagccttgctacagtgtccatccagggtagaacttagaagcagggcaatgagaagcaagaaggaagcagagggcttgaaccactcttccagtggaaattggcacaattatacttcaacataatgattgttaactagaattatttttggccatgttggtggtgtatggatactaaaagaaagttttctcttcttgtttcaggccaactgccaaatagccatcttgtaccagagattccagagagtggtctttggaatttcccaactcctttgcttcagtgccctgatctctggtaaactttatgytaacttttcacttaggcctaagtaattagggtagagcccagatctatgtgtgagaaatttaaggattgtagccagttggtttgaggcatgggaaaactgtccaagtccagattgctggaagacaaatgtaccyaacgccatcatattggtagaaagggcataggaaagaacttaaaatgatatatccaggacgaatgtatccattasgcacagtagacacagacgcacaaaattttyaaagacccacacaygtctgaatttcttttataattattttctttgaagtcaaagaaaatgttttaatatatagtgatatattcatcttygtaccagtgcagttgcaaaatagaatttttaatatgttagcatggaggaagaagcctacataggcaaagttgcctgaagtctatgaaagtcatratgcagccctggctatatcagaatgaagtctttaaggcaaaacaatgccctggaaatgtcagcaagggaggtacaagcatgactaaccctcatgcaggcagcagaggagagggttggatagaaacaagcctttaaataaacaggaaagaaacccatttccaggcctgattgcttgctttgtacacctcttcatgtgggaaatggcctctcctgccccgggtggactcccayagactatgataagagtgctgtagtacctttatacttttgaaacgcacattctttagttcatttggtatcaaaaacacttgtgaaaaagggctgttctgagccctatcttaataagggagtattcagacatggaagaagtagagtagttaatgaaagacaaacagccaagaagaatggaaagactataagattgyagatcaggatatctgatttcccacccgggttctgccacaaacctactgtgtttcactcattcaacaagtatttattgaaggcctattaagtgctaaactctaggctcagtgctaaggatccaaagctaaaaagaaaacaccgtcggagatttacaacctggcagatgtagmctgtatcatagaaacagacattaccgtacatggcaatgagcacaatggaggcagggatgaggtgctgtgggagcctggaggaaggaacacagagtccacctgggaaagccatggagaataggtggagtaaagtttatcagacrtaagaagagaggacagccaggattgtggggagagcatgtgcaaattcaaggaagtaggaattctgttttgctgagaaagtacatacagtgggcaatgaggctggaccaactggtaggctccaggtcataaagcatgttattttccatgtgaagaggtagagcytgcccttaagacattttatatgtcatttaatctgagcttgggcaaattacttatgtctccttcttttataaaaggacaggagtaarttagatgacttcyagggtccctcctaactttgatatcttatgattccaaacctttaacatcaaggatcctcagaagatgacattttcctattctgacatcattcacacttttaagtgaaaggtggaaaccactctttttccttcaaacaactacattagacataaactagtcgttgttttgtgtattaatgttctggtcggaaattcatctgagtatgcagaagcatacttgggatcacggcctcttttttggtgaggggtactaacctggcactcmctctcctttactctagaactaacaaaccagaaagaagtggcagcatggacttatcattacagcacaaaagcatactcatggaatatttcccrtaaatactgccagaatcgctacacagacttagtggccatccagaataaaaatgaaattgattacctcaataaggtcctaccctactacagctcctactactggattgggatccgaaagaacaataagacatggacatgggtgggaaccaaaaaggctctcaccaacgaggctgagaactgggctgataatgaacctaacaacaaaaggaacaacgaggactgcgtggagatatacatcaagagtccrtcagcccctggcaagtggaatgatgagcactgcttgaagaaaaagcacgcattgtgttacacaggtagggccttctctactttgaaactttcctgttaaaaaaaaaaaaccctgccttctctggttggccaacataaccaccgagtcaacacaaagatacaaaggcaggacatgaaatcaaggggtaaattgttagtcaatcagtattattgagcaccttgaagaatataagatcagaattagagaaaactagctgcttaaaactagagggaaattttaatatcatccagctcacctgtctcatcttataamtgatgaaaaggacactcacgaggttttagtttctcaaggccgtggagcaggacagaagcaaagtgaggaccagaaaccagtctcccaaattttaggtgtagagcttttttttcacccctgtgtcttgtataacagagagtgtaaattggaaggaaatttagccctgcccctaggtgacacagctgtaactaatagctactgaatgtcagtatgctctaggcattgtgttattagtttatttagttcatgtgtcatttgctcatttaatattagtcaaatttagtcctcatgacaactccatcagtcaggtttttctattactcttactttgctgatgagggaaaggctcagagctattaagtaatctgcccagggttctaagctagttgatggtggagccagtttcacactcatgttgattccaaagttggtgttttttagccatgtaaactaccacattctttgctstacatttttatgagacaatttgagaatataaccaaggattgtaaatgctttatagtttctcttcaacaacaacatatctttagatccattgaactttggtgggagggtagtggtggggagtrggcaggaaaggaaagaagtaattgaaggtgaaatacttcgagtgtattttaattctcaactttaccagtgccagagtaagcagacattcctgaaagcttggtcttcctctagtcacgagcctagtgtcagagctgattccttctttctgatgttgcttccctgtccagaggggccggttctgtcctttgtagcacacgaacactgtgcctaaggatggtatggactgccccgagcaggaagtttctaagtactctgaagcttctttgataaatcatctgccakacatattctgaattctttagattttaaacacctctccctcagaagccctcaacagtacaggtatggaacagaatacacagaataaagcaagccttctacattgtccctcttctccccaagcctcctagctgaggcaaaacatatccatgaatgcattatcatataatcagatctactttayaaataatgcatttatatataaataaattgattaattgagcatatattcatggatcaggatggacattaccaggatattagctcatcctactgctctcccagtcagctctctacccctttctgggctatgcctccctagaattatctcttatcagataaccttgactgccactagctgtttcaatatgccactacttccccttcacacccaaccttcaaaatccatttctgcaagacagtcttcctcaataaagcttgccaaaaaaattgcaagatagaaaaaagataaaaaattactggcataaatgatgacactcctctaacccacaacagtggtagagacatcactaattaatacaactttacctgaacacagatgggttttatctccaccaacacagtactctaagcagccactaycattgattgtcgttttgccatctragatgtaaaggatgtagagaagcatcaattatccatgggagatgagaaatagatatatttactgtaatatgaaattaagtttgattgttggaataattctccacatgtcaggaattattagacctcagagcaggctatcgaaaaaagatttattcattgaatcatcatgaataaatcatcttctccctggagatccaaaggaatagacaaattgctaacctatctattcaggaaaccctgaaatgggatagaatacagaacattgtctctttttttcccctagagttctgagatcccaaggaagctrtaattggggaaacatttstatgctccaagaacatagggcaggcaggggttgctactgtaaggtattaagacattggtggggttaaggtcagggagcgaagtgaataggatgtggaccaaacctgtatccatttagctgctattgcctcctacatcttctctttatttgaacccttcccagtgtctcagtgcagcttcaccaaattcactggctgccayaggaacttcttcctatagaaccttgcatggtttatagaattttagtatctcagaattgagaggaaacatagagatcatgtagcacagcatatccacatatgacatatggatattcttttgtaatatacttccaagtgaaccagcatgtggacagggcttaagacagaggaagtaaccaccagaaaacarttcagccatagaacttacccccaactatgacctcattaataaaaacatctcagtgctttgaaagtatcaattctaatactaattctcatcaagtgcatataccctaaaatactttcttgcaggaaagaaaccatggcccttctctattctgtcacctgagtggcactatcttggtgaagaggacatggcagttcagccatagtcagtactctcttcgcctgctgtattcagactcatgaaacatcacctcrtaagattgtttgtcctttaccatgagtacgtcttaaacatctcatttggctcctctgtttctccactgtaggattctggacatagatttgaagcaaatgaaaggtgaaagggtttgggctctaacaytgtgcaagctgagctcagagaagtaacttgcctaaggtcacatagcaagtaggcagcagagccaggattcatatcacacctgtgtgaccccacgccccacatctggtgcctaacctcartgcagtaatacgtgacattgggcttccataataaaacaatgcttggtttgaaaaccacagcccattttgtaccacatagggtttctctgtccacacatctgtcattggctccrtttgtccctctgtgtccacacacaacaataccctccttaggaaatactaaatgcagtatgaaatgggagccacgcaatactccagcaggcccctacaatgcttttcacaagggacaggttggctctctagaagatactgtgcttccctcttgtctggctagctcagtcctatctgagaggggatgagtctgtggtcaaaacgagaattcagcctttcctcacatctgtgaatgtccatgactctgacctttccatatctatgcagcctcctgccaggacatgtcctgcagcaaacaaggagagtgcctcgagaccatcrggaactacacctgctcctgttaccctggattctatgggccagaatgtgaatacggtgaggcttcctttttgttgatattattttggttttatgctagagatgatgccaagaagtaaataaatcatgttgaagtctctccagtgagaatagratggtaccagcccccctctatcatctgtctcctccactcagtgtccctagacacacactctaggtaaaaacattttattcttgggagaaaacattgamtcataaatttcaaaaaagaaaagggaaagggaaaggaagcaaaaccracagaactttcaggctaattttacttgtttgaagtaaaaacttgtgaaagaatgactatttcccaagatgcagccaatacaaagagaccaagtagagatggatagcttgggttaaaagtttagaaaattagagttaagagggttacacaaatagttacagctttcagcaaacatgacattsctgttaattctacatggaaaataaaaatcactattttgtctcctgcagtgagagagtgtggagaacttgagctccctcaacacrtgctcatgaactgcagccaycctctgggaaacttctcttttaactcgcagtgcagcttccactkcactgacgggtaccaagtaaatgggcccagcaagctggaatgcttggcttctggaatctggacaaataagcctccacagtgtttaggtatgtagaccttattcttttcatcctcactgacwtagaattttgggggagaagaggacacaatgagctttctccattaaaaaatgtragaaataatgaccatctaggttagatggaaaactctggttatcactgttaactgtcaaccagagtaacattaatttcaattttcatggtatttttttatgggtagagtgacttagtcagtttaattgttgattcgcaggcaaaaacattacaaagggacccctctttccctttgttaattgtaaagtaaacagagtacaatgatgaggacttaggggttaagaattattaatttgataattttacctaacttctctacatgaaaaacaagggtgtttgatctttccaagcagctattgaaaacaccatttaaccattctagtgcatcaacctgcctgccactttgggaaggtgtgactgctgcagaatttgaaggcttccaaggtgatggacaaaatttgtccaaggactcacactattattctgtggttggttttagctgcccagtgcccacccctgaagattcctgaacgaggaaacatgayctgccttcattctgcaaaagcattccagcatcagtctagctgcagcttcagttgtgaagagggatttgcattagttggacyggaagtggtgcaatgcacagcctcgggggtatggacagccccagccccagtgtgtaaaggtgagtttcaggtagttgggatgtataatgtccattgcacccagtccttacttagtgcatagatgaaattgaccagcttatggagaagctkgcctgaattgccaaaatttaattctcttcctacctgccattcagctagattgggttcatctgagatgagaaagraaaaaaattcctttctttccccaaacacaaaygcaggcagtttcagaatggcctcattcatmatttccccataagattagaaagggtggcctctacatctataagtggacactagaagacctactgagacaggtttatagaagtatagggaatagaggayattaagaatacagcttggaggaatctttgtttttaacagactcagatcaccctgggaactggtaatccaagtctggacaaacatcattagggtctcttgacctttacatcttgctagctccacctgcatttcagaggtggttccaccattgctctctgtgtggcttttctcctttctcagtatctttctctttatccttggttattctctccagctgtgcagtgtcagcacctggaagcccccartgaaggaaccatggactgtgttcatccgctcactgcttttgcctatggctccagctgtaaatttgagtgccagcccggctacagagtgaggggcttggacrtgctccgctgcattgactctggacactggtctgcacccttgccaacctgtgagggtaggatttttcrttagcaacctccattctgtccaagaaggaatcatggcatggtagasaggccaagggctctcagtgtcggggtgatctcttctaagttcttgcactagagcaagctcttcaacctccaggaaccatggttttctcatctgtgaaatggagctaagaattgcaaggtgcttgtgaggattaagtacataaaaagtatacaattaaatarcatgtataaagtacctagcatagagcttctgctctactgacatatcygaggtataggaccatgtcctatacttgagagggagttgggagcagcggctaaggtggctaaagagagtggttcaccatgtagtctttgagggtagcctttgacaaagaagcaaaggaaggaacactgcatcgaaaaagtgtgtgatgcaatcccaggcaattacataattccrccaaaatgaattctctgcaattgcctcacaccctcagtttataaggcggacagtggtaatgggagaataggaaatttacgatagattagtgaattcccagacctggatgacaagcccaaccctgctactatctagctatgagactttagagaagtcacttaacacttctgaacctcacttttcttgcctaaaacataagagagaagagagaaacactagaggattttggtgtttttgtttgtttgtttgtttgtttgtttgtttgtttgttttgagacagagtctcactctgtcgcccaggctgaagtgcagtggcacgatctcagctcactgcaacctctgcctcccaggttcaaacgattctcctgcctcagcctcccgaatagctaggattacaggcaactttttgtatttttaatagagactagggtttcaccactttggccaggctggtctcaaactcccgamctcaagtgattcactcacatcagcctctcaaagtgctgggattataggtgtgagccattgtgctcagcyggatttttggttcttaaatgctctgagtctgtaaaaaccagaggtcaaagcccagagcaaagaggtagtctttacactttgaaaagtttcagaaatagcctggaaatraaatgctttatcaaggaagagcatgaggaaaccaatctttatcagaactgaggtcactcagggcttaattgtgcwcaggaattcactttggctgcactcacttggcaacygaagtctgattaggatgacatcctgtgttctagagacaaagcccggtcaggatcattttacaggactaggtaacagtgtcaacaataagctatgctagtccagcttttttttttttccctataagtccagcattttcctgtatatactcttttcagrttcaatttcacagataatgtcaatatttaatgagcactttcaatgtacaaaacactctgctcagctccagaataaaactatgaatgactgagcccaacttcgaggagaccayggtataatggggaagaatgacaatcatgtatgaacagcgcaagaacagaggctgtgggagcacattgcaggggcttctacccttagttaaggtgggaagggagggcttcctaaggaaagggaagtctaagctgagacctgaagggcaggtgagagtgagtcaggccaagaggggcatgggaaggtgttccaggcagtctctcttttggaaaatggaggttttagggttctgaacacactgaaaatgtggacaggaaagatayagcatctaggaattttttctgaggaagaacccggcccttccattacctggctttagaagataccttttccacttagctatttygtgtgagccgctggagagtcctgtccacggaagcatggattgctctccatccttgagagcgtttcagtatgacaccaactgtagcttccgctgtgctgaaggtttcatgctgagaggagccgatatagttcggtgtgataacttgggacagtggacagcaccagccccagtctgtcaaggtactgtaacagtggtaatgtttttctgtgtgtctcagctcgttagaggcatcagcatctgcactgagcattggcatgcctttctttatcagatattcactgagaacctactatgggccatgtcctttgtgcttgggaccagggatgagatgaaayggtgcgtgaagccagtcttaggcacatgtccactatagtatagtcaaggtgaggtttgcactgattgacacatatagggtgcattggaatgaagaagatggggcttgggggaataaatcatgcatgaggaatagcatgggatggggaagggtaatggacaaggtgtttagytcagtcctgtcacttcctgtccttaagctagtggtttagactctctgaggctcagtatcttctgtaaaatggggctactattatcagccttacctacctgcctcactagtagttgtgaattaatgtgtgtaaacgcaactttaaaactcttataggatttataggraaaatgatgatgatgacatgttaccttataaatcacatgtctgtggtctgatttgacaaaatgatcctctttcaatatgttaggtttctaatcttttgctcttatactaaggcactcatsgggggcgggtgtggtggttcacaaggattattattttttttacgaggagtacctcacactaaagtcatgttccagaagtgtaatattgacattttgtgttttcatttacggagacctctgagcaatctatgtgactccyctgggttcctaagtataccttgattttaaaatgaggcagtggtttgaaagcaggtcttgaagagatatttgtgcacccatgttcatagcactattaatcacaacagttaaaatgtggaagcaacccaaacacccatcaatggatgaaaggataagtaaaaagtattccacatacttacagtggaatattattcaaccttaaagaggaagtaaattctgacctctgctacaaacatgaatgaaccttgaagacattatgctaagtgaaataagccactatgaraggacaaatactgtatgattccactcatatgaggaacttagagtagtcaaagtcatagagacagaaagtagaacggaggttgccaagggctcggcggaagagggaaatagggagttatggtttaatggatacggagtttcagtttgagatgatgaaaagagttttggagatgaataatggtgatggtggyacaataatatgaatgtgcttaataccactgaactgtacacttgataytggtgacatggtaaatggtaaattaaatttcatgctacgtatatctcactataataaaaaattgaacagcaaaaaaaaaaaaaaagaaaaaacaagaaggcaatagaatagatggctatacaccatgatgctgacacytagtctgagttatggaatgtattgtwtatgttatctgggagaaaaagacacaatgagctctttgacacacttaaaacggatcataagggattattcaagccattgttgtctccaggaaggtaaatgtctaatcaagaaaagatagttggatattctcttaagtatccagagatgtggtctcactaacccccttcataggccttctgaatgtttcccactcctgaactcagtgtctgcatgtgacgcaaagccttaatgatattattactatctattactaccactgctactaatatagcagctaatgttcattgagcactttctatgatctcagtctaactctrtgaggtagttacaattattactaccattttaaagatgagaagagacaacacatggaatatgtgtgctctcttcgtatatggttatttattttacatctttgagatcatggtgtatattataatttttactctgattttttatttaacatcatacattgagacctctctcctatctttacaagttaaaatatattatttttagtgacctttaacattcttttcatggatccaccatmattaatttccaccctcaattaatggcatttgtgtttgttttcaatattccgctcttacaaataatgtcttcacaaaaatctctaamtagattttttggtatgcatcttgattacatacttagcataaattcttgggtccaaaagcatgataacttaaaaattattgacacatgttgccaagatgytcaacaaaggtttagcatttcctaataaaatccttcatgtgccgttataattaaatgacactttttcttatcttctatgttaaacaagcccaattcaggaatccctgttcttgacactagaaagagttaatggtcaaaaatcaatgagtacatgtgtattactgtttctttattccttacttcctcatcccttagctttgcagtgccaggatctcccagttccaaatgaggcccrggtgaactgctcccaccccttcggtgcctttaggtaccagtcagtctgcagcttcacctgcaatgaaggcttgctcctggtgggagcaagtgtgctacagtgcttggctactggaaactggaattytgttcctccagaatgccaaggtaagagtgtattctttctaacatcatggaaataaattgtaggcagtatttttaaargctggattttagaggtgacaactatgtaagatccaccttgaaatggactggaaaattcataaatactctcactcatcctcttgtcctataacccaaggatcccaaatgcaaatgcctccgggrgataggcagattacacaagtgtcaggatgtctggccatagacagtagggcatggcccttgctaactccttatcagggtctttacccagacctgaaggctcctgccacaaaccaggtaaactcttctcacctggccaaacatggcatctggaaagaagaccaggtgggaaaaaaattgcttcagagtggttgtcccaaggctggtctggcacttctaggaaccacagggtataatggtaaaatgggaggggcagaatttacaagtacccagttgcaaacactccaagatctgtataaaattggagaaatagacttagaataaggtgaagagtgatagaaaaaagagaaaaactaatmtgtatactggaggttacgggattctcagaagaaagaaatgtgtggattcagtataaacattctatctgcattgtacttgatatacatacattttttgagacggagtctcactctgtcgcccaggctggagtgtaatggcacaatctcggcccactgcaacctccgcctcccgggttcaagcaattctcctgtctcagcttcccgagtagctgggactacaggtgcccaccactgcacccagctaatttttgtatttttggtagagatgaggtttcaccatcttagctaggctggtctcaaactcctgacctcaggtgatctgcctgactcggcctcccacagtgctrgtattacaggtgtgagccactgctcccggccttgtacttgatatttaacaagccagtgtgctctgtcagtattgcaacatcttktatgaacttgaacgggttctagtcatccatgtttgtgaattgaaggatagaygtatattttttatattccccaagctttttccccctcaatgtatccaattccttagttaacttttatagacaatgctgctttttaaaygcaagattttcatttataaaaathtgcagaaatataataaagaaatgaagaaatatcctcttaaatactcctatcctaaaatagacactgttaggcttctggtatgaattcttccaatattttctccgcttttcctcctatgcaattaatatttttatgatgtatatacaattttaacaataaagttgaatggrtaaaagactagacagttctacattatttgccatacctttcactttgtatagactttcaacatttgagtgaaagtgggcagatacatattttttactaaaaggaaaccactcactattcaggtcacacaaaagcataatcacatacacacacacacacmccccmcmcacacaccccattgttaagctaggtcaacagtaaatgaatgaatgaatgaatgaatgaatgaatgaacaaatggacaagcaaacagcagaattgaatgtccttcatcgccaggcaccagagaggatggcaagcccctggacttagggttgggtgcaccttcagagctgggtctggagagaacagggcggggctgtgaccttgccccttaagtgctcatcctggctacgttgaagtctggacatatcacaaagtccacacaactttggggaagttgtgggaagaactgggaatccctgaggacagtgatcacagtgattgaaactcttacaggcaagcctgggtggtgcagggcacagattacagttcattgctccatactgtcctgcctctgggtgtttcacagcaaggaggttgccactcaccacggcttcctgtgaccttccagttcccttctgctttyagttctttatttactctgaactttctcctcttgttgctgggtgcacatcaagtgaaatacccaaatgtgggctgggcaggaaggtaccatgcagwgtgcaatccactcgctgttgtaatacttctgagagagtgttatcagacaatttccctttttaatgtcctcccacccctccacatctacccctgctgtcagaaggcaaagccacagaagagctggaaatgggttctgtggtaccaacatcctcacccacaccctttcccccataagtccttgcagtttataggcttcttgagttgtgtcctctccagccccacatacacacttactacagaaatacttttcaactagaagaaaagaaccagatctttggacaagttgatcagattgaaaggaatgtagctagagaggggaaggaatgaagggaagagaaaggcgtagaaagtgttcttgaaacctcatgctgtttaagtcagtggctgaaaaatgaccctaggagcaaggacttcatgtctaaaacaccaaaagcaatggcaataaaagccaaaattgacaaatgggatctaattaaactaaagagcttctgcacagcaaaagaaactaccatcagagtgaacaggcaacctacagaatgggagaacatttttgcaatctactcatcygacaaagggctaatatccagaatctacaatgaactcaaacaaatttacaagaaaaaaacaaacaaccccatcaaaaagtgggcaaaggatatgaacagacacttctcaaaagaagacatttatgcagccaaaagacacatgaaaaaatgctcatcatcactggccatcagagaaatgcaaatcaaaaccacaatgagataccatctcacaccagttagaatggcgatcattaaaaagtcaggaaacaacaggtgctggagaggatgtggagaaataggaacacttttacactgttggtgggactgtaaactagttcaaccatggtggaagtcagtgtggcaattcctcagggatctggaactagaaatgccatttgacctagccatcccatgactgggtatatacccaaaggattataaatcatgttgctaccaagacacatgcacaggtatgtttattgcggcactattcaaaatagcaaagacttggaaccaacccaaatgtccaacaatgatggactggattaagaaaatgtggcacatatgcaaggattttcctttttcccatttcgaagataaagcaactgaggctcagaaaggttattgtctagtgatagattgctagcaagtaacagagccaaaatttgggcgcmgattccaccacttggttgggaaagggggaagaaagtattttcctccatttctgtgtttccaatcatttgtcattgttttctggtaaggtcattggggtgtttctgaagaaggtatcaagggagaaaccagttccacccctgtctagaagcaacaaaaatgagttgcaccactatcctcccaaacagagcaccagcttcctttaaaaatcacctctaaagctgtttgtgattgagcacttcaggatgtcaatcaactgtaagctgctgctattttacacctctacaatctctaactggtgatraagcatcatgaaattcaaacaatcacttttagccaaataccatcgttgtatattaatcacacacacacacacacacacacacacacasasacacasasmgagagagagagggagaaagagagagagagttacagagttcaggttgctgaattataaaatgatctcttcttttctcctctgccatgcccatgatagccattccctgcacacctttgctaagccctcagaatggaacaatgacctgtgttcaacctcttggaagttccagttataaatccacatgtcaattcatctgtgacragggatattctttgtctggaccagaaagattggattgtactcgatcgggacgctggacagactccccaccaatgtgtgaaggtaggctgtgggtctgtcctttcttatggctttaaagatgacatcagagaatggagaatcatcagggatttatataaaagtgttyttgagctgaagcaaacaacactctccacaacaatggtaatctagataaaaaagttctccctctctttaaataatattttaatagctttagttaaatattccacagtttcaagaacatcctggccaacatggtgaaaccccgtttctactaaaaatacaaaaaatagctgggcatggtggtgcatgcctgtagtcccagctactcgggaggctgaggcaggagaatcgcttgaacccaggaggtggaggttgcagtgagctgagattgtgccattgcactccagcctggtgacagagtgagactctgtctcaaaaaaaaattgcacagtttcaggaagtgctttcatgtcattatagcattcctgtttaccacaattctaaaataataaggaaaggcagtatcatctcattttatagataaggaagagacacaagcttaaagaggttaaatwactcgtccagggtcacactgttagtaagtgaaaaggctcagctctatgtcactgaaagttttacttccttacagagtcttcttcagctacattcttcatttcttcattcctacattcaccttcaactgagcattactaaatcccagccacagaccttatttagggatgggtgagatttaaccctagcataactatgtgtgcacttccctcctctctccacttctwtattgaatataagcttcttgaaggcaggagctgtgccttcttcatctttataccccctgcagcagctagacagaataaaaatgggtgtgtgtgacaaatatctgttgaattgaaggtgatcatttaccagtaaaatttactcaaacacaagctttggtaatttagtggaattctcaaaggcaggggccagatcttatctgtctttaattcccctgagacatctggctggcaaagtatctagtatattttatgttctaaaatagaagtgcactgaattaattaattcatagctcctgtttagttgcaaaaggtgctattgttctaatgtattgttcagtgtagagttagtaataatgagaccagtgataatggtaataattattgcttaatgtaggactacctatttcataakcatcatcacattcartccacacaaatgayccttaagttggttattactatgcccattttaaaggtgaagaarctgaggctttgagaggttaagtagctagcaaagttcatatagcttgaagtatggagacaggatgcaaacccaggcctagtctgattatagggctagtgttttgaccactgaactacaytatcacccagtggcagagcttctgaatctcaggtaagtcacttgtgaatttaytcttttccactccacagattgcagctataactgctaaatgaactttagaaatggcagtgcctggtgatcagatgagagaatatgttggtagaaatctattcgtgttacacaaaaacagctaaaatattatttattccttcctgtggaatgagcactagattaatatccaaagacttgtattgctctctctccaagtcatgtgccattaggaaagtcttgtcacacccttaggctcccgttttctcaattccaaaaggagaagagtggaccagaccatctttgaggtcgcttccctggtcaagaattctgtagggtgaaagacataaaatgctaccatctgctgtcaaaaagatatactacaagttccctgagaattctagaacatgtatggaggaaagcatttgggcttgtggtttttcactcattcatttattcctcactctcttattcatttattccattgacatttctcataagttctattttcccacattttaaggctaaagaatatttaaaaaaacctttaaaaatctcattcacattttaaatcatgtaggcaaccaacatggctgctaaatctgtaatctctaaagcccttgcttcccttcacyactttccagcccccctttctctgcaggaggaggcatttgcctcccactttgcaggccccatccccactcactgtcaagacccaaccctgaccatgaacagcagctttaacccactatggcccttggaattatcaaccttgactgatcctgatcttgagccctggtttttgcatttgtgtttcttcttcgttctccaaatttatgctctaaatttaggcaaatggttcctcttattttcccatatgcctgaacccattaatttttaaccctcagcactgccccctagaaccccaattttcacatggtgttttgcagagtwctaggatacatcagatggactcaggggcctccaagtaagcagaggcagtgtggcaggtggagttctcaagctgtctcttcagagtgcaatgtgagatttcattttgggggatggctctaccgatagttccactttagttagaatgccggttccctgggccctctgggatgtggcctctgcctagytgttcctcagtatctgcagggggaattggttccaggactccctgcagataccagaatccccagatgcccaagtcacttatataaaatggcataatatttgcatataacctacatacattctcctttagacttttaaaccrtctttagattacgtataatacctaatgcaaagcctacacatcacttcatctgcatggattcaacatactcagcacatggcaaattcaagttttgctttttggaactttatakaatttattttttttctgaatgtttttgatccacaaygagttgaatccgtagatgcagaacccttggatacagagagtcggttatttttcagccttgtctctgcctttgcccttcaggacctgaagtccttttcatgagcctaagcagtgcttgaggttcttgtgccaactttgatgatgccacctgcatgatggaktgcttgtacacagtttccgtatccctcctgtccctgcctgttggaccactttcatgatacagactgctgaattcctaatcccttaacactgtctgtcattgatcctctggtgaccatgtttggctgctgaacccaactcctaatgtctattttcactgcgtggggaggggtcctggttccaagtcccaacctcaactctgctcttctgccatgtgcctgcttactcacgtcctaaaatatggtgaactggtgccccctaaaactctggcccagctgacatctccatttttttcttcattcccccaacatttctctgaatctgtgggrcttcctagttttattcctaaagtttgagtttacaatattcaactcagatacatttattattcatactatatcttctttccagaaaattattgagaaaactctatcaaactcaagtaaaatgatataatgaaaggaaacagataatttactaaatctatttgaaataatataaatcaatatgtttaagaattcagatgcaatcatgtatactttcttgatggactatagaagaacaccartgaatacccatatgtgatagmactgccttggtagtcagtgaaaatagaacactaagcgtgcaataaatgcaamccttatctgttttctatttttgtaattattcaggagtttttttttttttgccaaagttttagagtaggctcaagaatatgaccacttctcaaagttatgcacaaaagtcattcctgggtataactcttttcctgcatctgcactaatctccattccagcagcatccttgataactscacaaatgtcattcatcccatgtttgctgagtgcccaccatatgccrgatctgggttaggcttccatgtaactcatctaggctgcccctcaaacaggtaaacccacttctttacatgatccagagccaaattcttagtatgtaagggtcaaggttaatttttacctgagagagttcagagacttttataaatatgaaagtctggatatgtaaccttggctgagcatgactgataagactgaaaccaaagcactatcccccaaatgaatttaatgctgtagtagttctcattttatactagggcccccttcggttaatttttaaaaacagtaattcctcttgtttcttttcaaaccaggtaggcataccttttagaatgcatttaaattaaattgtattcattactgtattcattcaattcataagtatttgtagaacccctcctatgtgtcaggccctgttctctgggatacagtgttcaaagaactgacaaggtccctgctttcctgcagctgacattatacatattcttcagtttaaagttgtaattctgggagattatgaaamagttatttttgtgaaaatgttcacagatgacttcatgtctaggagttacaccagtagacatgtttcaaaaakgtttagtaaattgatttgatgtgtcagatatgaagttgttaattactcaacaatttgagagtactgaactgaaattcactgtgttattttggctatttgaatggattcatgcaataagaatccataatccttcaatgaatagcttgttactgaaaaatacatgggccagtatgtaaaagccaaatactgtacattggttttccatgagggagcatataggtcttgaagaggtttgtaaaaatcaaactatctaagtaaatgagacttatctgaccaaggtattgttktcagaatagccttagatttaaagaaagawtartcacttcatttgtctataacccaacatttattgataaataatagtcttatattagagaatyaatggggagaaargaataatgctaagaaaatatgtaactgcaataatttgtaaaaatacttttggggggaaattgtgaattaaaatttaaattcatttattcattcacttggcaagtggttactgagcactgcctcttgagatcctgggatggsagttatggaagactcaaggatgaatcattcttgggttttagacactttcccatccagtagaagagtgagggtatgacatgggacatgacarcacatcagttcagacaaaaagttgaagaattcagaggagaagagttcaggctgtggtgatcagcagagtcttcagagactttaygarttaaatcctggaggattagtgggattttaygycatraaagtggaaaaattctcaggggaatgtgagccaagaaccagaagcaataacacacaaagtcacttcagggaattccaagaaactaatctatcttgaccaggaggttttgagttttcctgtgttatctggatgggtggtattaaaatacaacagcaaaataaacaaaacaattagtgaggagattcaaatggaagaaatagtttgaggcagaaagcaatcattgcagttttaggtgtgttgaatttgagaagatggcrtgatatatgggagcaagtagtctcaggcaagaggaagggcggaaatgaaatcctggattgcacccattcaagtaagatagagggagctgcggcaggctacgaggtctctgaagcagagggtgtagagaaaatagggtgacwttgtaagttcttgagtatggctgyctaaatctttgacttctttgtcttcgtgacttgtacctatactcttctctgtaagcttaccatcctcccactgccctttgcagcaaatgacctacatgatatgttgtggaatgctgctgcctagcaaaatacctggaatataggtgcttaataaatattttttgaatatataagtgaatgaactttgtgtaacacagaacttctgaataaacttggagattgtgacactcttaatttgatactctagccatcaagtgcccagaactctttgccccagagcagggcagcctggattgttctgacacycgtggagaattcaatgttggctccacytgycatttctcttgtracaayggctttaagctggaggggcccaataatgtggaatgcacaactkctggaagatggtcagctactccrccaacctgcaaaggtaataatatgtacttgctaagacagttctacttttggaaatttattctacaacaacaaacaattatctagttcttatatgtgaactagataattgtatatattaccattatttgggtttagcaaacagctgaaggattttaaaatgtctaaggagtgacaggatatttttatgtttgtgaataaaagrtatattgattcttaagcaggaattttgtttcatggcttctttttttgaaagagctttgttgagtgaacggaatggtctccattaatttattgctgagagaaacagacaatactggggtagagtcactggtccrgtttttcaaatctaggaattgaggtgcagagaggtcaatcatcatcttcctgccacatggcaagttaatgacaaagctggtgggatcattcaaatggaagaaatagtttgagacagaaagcaatcattgcagwaaatttcaactttcacattgacctttagtcagagaacagtaccatttcycaataaggcagggttgggcaggcagttggcccatgtatatttggctttctgctgaatttcttatatttctgtaccatttcttgcttctttttaaaatagcaacaacaatgactcctctgatttcttctctkggccaggagaatcatctcctcaaggatgmtttttaataattttcctcatctggttttctatctctgacactgayagtttttcttaacttccttaaatagctcttgcaggagcctcccttgttatgaagggagtgaaaagcagttattccagattagccttaactctgttaacgcttcttttaattgggaggtctctgaatkgaaacattttctcacaacagkcatagcatcacttcctactccagggktgcaatgtccagccctcaccactcctgggcagggaaccatgtactgtaggcatcatccgggramctttggttttaataccacttgttactttggctgcarcgctggattcacactcataggagacagcactctcagctgcagaccttcaggacaatggacagcagtaactccagcatgcagaggtaaggtgaaaaggagcaggcagttctgaacctgccttcctgcaagtactcaagctagccattgtgcctgtatgttgaagtctcacccaaccacaaccactactccaagtgtcatctcccttatgaaatccacaccaatccyattagaagtaatgtgtcacaggcatttcacttctgtccttcctcaygtcacaagctaaagctaatacacaagtactcagagacttaaaggaagaaacatttgyagatgtccaagatgtgttagaaaaatagrcatattaaatgtaaaacctgctatagaaattggtaaactagaagttgcatattatgtgacagtataaacattccatattttcataataatttgaacctaaataaaaagttaagccatacatgatatttcctgaagagctatcgycctacacataaagcattgagacctatgtttctttcatttttgtatcccccacaaaacatagcacagtgctttgcaaatgtcactactgataaataacatttatttgaattaaatytaatttcttgacctttamtttcytatccataaattagaaagaataacsctgaagttccctgaaaatgtagtytaaggaggatgacagtctacttctttcaaacttccagtgtccagatatgctgaacacttattaagtatttyaataaacacatactgacatgccagttgatcacaaatgtagtaataayatttagactaayagtattttaagaaccaaaattttgtaaatagtatatktggaggcaagatttatcawtgcattagcaggtatttgtcggatgctactatgtgtccatctttgcatcttggttctttggatatcacccttcgagagaatattttcatatatgtgctgttagaagagctactgtgaatattggaagtggctcatatcctttctgaccttttacattctgcctcatttattggcaatgttaggttacaaaagaaactataatctstttcacctccaatccacatgttgtttctcttgcattmtttcttttctgcagctgtgaaatgctcagaactacatgttaataagccaatagcgatgaactgctccaacctctggggaaacttcagttatggatcaatctgctctttccattgtctagagggccagttacttaatggctctgcacaaacagcatgccaagagaatggccactggtcamctaccgtgccaacctgccaaggtacaattttcatgtgggttaagaagtcactttgatgtggaaaataacaaaatcagtgtttcttccctgtgtctttctcayagtggtcttgctttccatccccgggtttccccctgcttaataagtgtttcacaatgaatcaggcagaatctccttgccttataaagtagtggaaattaaacccagtgactgtgtaggtaatcacccctcctcttcagtrttcagtttgtgaaatgaaaccttttgcttcrttataatctctgtttaacagaccttgaagtttcaaaatgttttaaactgggagttatttcatgcagatttctaatttattatctcagaagacctttgcttaccacctaactctaaaaacctcctagcagatcttccttaattaaattccatctgtttgcaaggtatatttcagccccctattttttcccctcatagcttgtcctgactgccttttgttacataactgaatctttgccaaaaaattatgcacagtttattttatttgcctaaacttacatgtataggcttcttatgtctacaatttaatttcttttattgggaccttaccctaattcttttggaaattacagtttatatttaagtcttaggaataaattaaggccccacttttattttatttgcccatacttacatgtataggcttcttgtgtctacaatttaatttcttttattgggtcctcaccctgattcctttggaaattacagtctatatttaagccttaggaataaaataaggccccacttcccattctgttgcagtggatttatgaattccagatcttctttcatgttagcttgtcagcattcccaggacctttggtgatcctacttgatygcacatcttagagttcttgaaaactttctgggagagaaagactagtcttttgcataatacacttcttatgtcttgcatgtgtgtgtgtttgttttgtagcaggaccattgacyatccaggaagccctgacttactttggtggagcggtggcttctacrataggtctgataatgggtgggacgctcctggctttgctaagaaagcgtttcagacaaaaaggtaaataggaaagagtcttctctttgcatcttggttacataaatcaaaagaaattgatttatgtaatttagggtggggaggcaaaaaccacaacttcagtagttcatgttggaaaacatttgcattaaaagaaaataaagccaagataagtgatcttgagaactgattgtccattagaatcacctagggaacttcctaaaaatatagatccttctatggggagacttggtagtgggtgtggaaatctgaatttttcaaaagctctctcccaaaattcaaatgaggctactttgcagttttgcatttggggcctctggtctaagtaccctaggctatcactaaagctaattagaaaggtgttatgcttcctgacttcactcatttcttcatgtagcagtcatttattcatcaactctgttagagtgtgagactcataatgatggtttctgatattaaggaaggaaaaatccagtaggggagacaggtgaaatcagtgcyggtagtgaagtgtagtaagtgtgttaggacacaaatacaacctaggtattattagaacwtagactagggatgcctaaaccagacyggcaggtcagaaagcctttttcaagcttagctttgaagaatgagaggcatttagccaaggggaaaatggaaatagagttccatcrgagaaaatggcatgtagaaagacatgaaagtgtaaaatcaatgagaagatggtatgtttcgcagttcagtgcatctgaatcaaaaggggattatggaggaggcaggagatgaagttaggggcagaagaagctgcccctgtattggtgacctggtgtgataagctaagagatttgctttttctcctgaaaatttgtaaagttgatgcaggatttaaacagagaagaccaaatagatgaaaactctctgtaagggaaactgtgttcatcagactgttcatcagaaaaagaactttagtctaggaattaaagatgggaacatcccatctcttaaggtttaaaacatcctttctcaatcttctccagacacttagcctgcctataagttcataaagttttgtttataacctaatggggctcttcttcatcactcctcatagaaagtaactgggggcatcagagagaccattaattgctcaaatcaaggtaatggaaagtggctatgttaaaatatctgaaagagatctcattgaatttctctattgttgacataggtctcaacacctattcttaactgctcagaggcaaaaccacgtgttccttactcttattctttctccatttacaatgctaccaaaacattgaggctgtttttccaaatttccttcatatactctcctgtgagtggctaagacaatagacaaaggtcaatactctgcttcaataccaaagagatgtactgagagctacagtgaatccctccatgcaaaatgtgtgcttgctcaaccaaacccagaaggcagaggcaagagctcctagaccttaatctctatgatcatgtaggaatcactctaatcttgatgtttcccccaagtcctttctttgactttgagacatttccagrggaccctctaacagtggagaaggacaaatggccactcatgccccaatatttttaataataaatacattcatttgttggggatgggagcttttttcctcagcttctcccaatttgatttyaggctttgaagttttctatggccaaataagaggaaaatgctgcagccatagctgaaaattcaactatgagagtctgttatttggataaaaatatgctaccagggaggaaaaacatccactgttctgttggtttggattcatgtatgtgattagcttgctcagctaagggctgagggcaagtgacacaagatgccctcaaaagaaattgatttatgtatttactgaaaggaaggaggaagaaagtgacaggactctggagttaaatattgtcgaatgtttaatttagcctaaaacactttctacctttcagggagaaactgttcccaatattccccttataatgagccctcctgaaaatcaktctactggttttccccagtaatttctatccttaatgaccctctctttcatcttgttttttttttttaatcattcattcttgtcttcttgctgattttagatgatgggaaatgccccttgaatcctcacaggtaaggtagaaatgttttatgattgagtaaattttgctaycttaactttawaattcactgtaatatgtcagaatgattacatgcaatgcctgcctcctttttacaatgtcttttgcaatgtcttcttttctactctgaagtaaaatacacagataacaaatattctaattaaaatatamagtaggaataaaaygaaaagtaatttataataaaaacaagatgcaaaaacttaggcgctgtgccagtagatgcaatgaggtcatcagaagcgtgcaccttccacagaatcactaggaaagcaacgcccacgcaggtggactgatgggggaatgttgtattagtgactcaaagagcattagaactgtggccaacaccagcctaatttttcaacatrgtgaacaactccrgtaaagagtctgaaaacctgtgataattgtcctttgattcatatrgcaattgcattttaaagatgcaaaaaaatgcttaatatttacatgtaaagtgcttgagttccaggctcagagatttttaacctgtatgaatatcgagcagatattccaaagttatgtgggatgttggacaattcttttgtgtcctgtaccccttgctrtttataatctagcaatagttttcaaaaagggacagtatgcccccaagggtatttttttatttttgtaatgaacaagagttctactgacattgagtgggcaggaggcaggggtgctggatatcttttaaagacatttccgtcctggaggacatggaaatccttatatgaactctattgtcgtagacatccagcacccttgccccatacccactcaatatcggaagaactcttggttataaaaatcaaaaaacacccctaggggkcatattgcacyctttgaaaactatcgttagattatcaagtgttaatgccaagaattttgtaactacctcttgtcacctagaagaggttgcagcaacttagagggtataacaggtattyagtacataaagcatgaacaataacttagtgtgggtgcraaatgcaatgcaaattacccagagctggtaagtgggatatcgaatatttctttggcatttatttttctttcctttctaaagcagaattccaagggtggatggtaatttgtggtttctggaaatactatgtgttggactgtgttgtcgagaactaagcagtatattgttgccatccttgtgtttctgttctttagccacctaggaacatatggagtttttacaaacgctgcatttgacccgagtccttaaggtaagatccctataaagatatttttgaaggaaatagaacactagggaaaaatggaagaytataaagcttaacttttctttacataatcatatattaaattttaagtatgtattaaattttcaggcatgaaggaaattgtgttggcagtaggacacaggtatgacaatggagttacaaaagagttcacaaaaggattttcatttcctccaggacagaaatgtcctaacaagacataacttatttcaggatgtgtaacatttccattattaactgctaggtggtgatgatgtggccttgcctgcaaagcagaagtcaggactgctgaaaaatgtttacgaactgttatggartcaattccctatgctacctgctggaaaaacaaaaataatctgatgctatccctctcccaaaaagtgggtagttgagtgtcctacaaaaagcctgaatggcagaatattcgaaatctagaaagaaaagattatgctgcgcctcagggtgtagatatgatgagyaatttttttctttcttttatttttttaaggaaatgataattatttaaatttctttggtctcatttccagagacctgtccttttcctggtctcctcattcagcctccatatgatcctgttgtgaacatcaagtttcctgctacactggacttaactataatgcatttgctgcaggtttccataaacacccatgaatcaaagacatggaattaccttagattagctctggaccagcctgttggacccgctctggaccaaccctgtttcctgagtttgggattgtggtacaatctcaaattctcaacctaccaccccttcctgtcccacctcttctcttcctgtaacacaagccacagaagccwggagcaaatgtttctgcagtagtctctgtgctttgactcacctgttacttgaaataccagtgaaccaaagagactggagcatctgactcacaagaagaccagactgtggagaaataaaaatacctctttattttttgattgaaggaaggttttctccactttgttggaaagcaggtggcatctctaattggaagaaattcctgtagcatcttctggagtctccagtggttgctgttgatgaggcctcttggacctctgctctgaggcttccagagagtcctctggatggcaccagaggctgcagaaggccaagaatcaagctagaaggccacatgtcaccgtggaccttcctgccaccagtcactgtccctcaaatgacccaaasaccaatattcaaatgcgtaattaaaagaattttccccaaatgccgtgttcctctattttatggtttgttcagtaaggtctgtatacatcacattgtttaccatcagtgtaataacacacaattatggttgtcctatttacacctcaaccattcattcagtcagcaaatatgtatcgcacaccctacactgcaagagaaaatcagagaaatggaaaaattcttcatcaccttaatattttacagggaagaacaaatgtgttttacatgttctttaaatcccatgtttaataaataggtcattgaaagttatatagtatttatctggaactgatgttaaaaaaaatagagagccaaaaattatagtagtcatcttgtctctgtaaaatgyaattmaataaatatgtcatgtacactgtatatacataagcaaacatgcaaataaaaaagcagcctactcaaaggttacaataatgttgcaacaattctggtagtaaccttgggatttagggacacagtgctttcaaaacgtttctctgatacactgccagtagcatctctgactgcttatttaaatgtcaatcagtaggctaggtgttctaggactttggtctcaaccctgtttcctgagtcagaatctacattttgtaaaagttcccctgggaattctgatggtctgccaactttgggagacactgataatattgtagataaagaagtgtaagcaactgttcagttagggakacaatagatacctgcatggaataacaaaaggtaattaacatgattatataatttgaatagtgttgtaatagttcataaaatggaaaagccaatttgagcccagaatctgggagayagrcagaactctggactgtaaagaatggcccagcaaagaggaagaaaatgggcattctaagttggtgcaataatatcagcacaggagaaaagacagaatattggggggagtggggagggaggaagaggctgttgatgagcctgatatcattaacagagacctcatgtgaggtgccagattacaatttattgaatgtactgaatgcataaagcataagacagaaacctggagccatgcagatacagggaacccaggacaagtcattatgatgcctcagacaatataattcgcagattctctatcaatagcaaagtaagatttaaggtgctgtgaaacagtcagatccttcaagaaaaacaagaatacaaggggtcctggagacaggaaaatatgatcataataataaatttgtgattccttctttctctctttttctctttctttctttttctttctttyttttttttttttgatggagttttgctctcgttgcccaggctggagtaaaatggcaygatatcagctcactgcaaactccaccttccaggttcaagcaattctcttgcctcaatctctcgagtaggtgggattacaggtgtccaccacaacgcccggctaattttttatatttttagtagagaagggtttcaccatgttggccaggctggtcttgaactcctgacctcaggtgattcaccygycttggcctcccaaagtactgggattacaggcgtgagccactgcgcytagcckctgtgtgttaagtgctggaactatagtttacagtagcattttatcctcccaacataccctatcasgaaaaaytattattgtcatccttatttcacagatgtcaaaactgaacagagaggtacagtaacttgcccaagacaacacagctagtaagtgaaactgaaatctggacaactgatttttttcagccaagctcttcaagcccgctgcyatgctgcagcttagctggcgacaggcccttatcaaggcagaactgtgccttgatagmggccaggaaggcgattcagagcagtaggccttgtccatgtgtttgttccctgcttcttcaccacttgaaaatagtgtttcagtgcccagtaacagggcacaatactcttttcctcagattaaaaggggagccatctgcttaaggtggttgggtgccactgcactgcacagaaggttctccaagtgtgagcttggacccargcagscctcaggtcagtggtaacggacgactgcttccgtggtgtyggcaggtggaaatggagggatacagctttgtscggctcatgaatccctgggcattgtcccgcctgctagagcctctgatctctgccccttcttcacctgcagtaaaacagtcactagtttggttgctctccctaatacctctggtcactgggagctgtgatctcaccaaacccctgccaggaaaarccccagaaaaagcggagggagtgagagycagaggctgctgctgccgtttgcaagaactgcaggggaggaggacgctgccacccacagcctctagagctcattgcagctgggacagcccggagtgtggttagcagctcggcaagcgctgcccaggtcctggggtggtggcagccagcgggagcaggaaaggaagcatgttcccaggctgcccacgcctctgggtcctggtggtcttgrgcaccagctgggtaggctgggggagccaagggacagaagcggcacagctaaggcagttctacgtggctgctcagggcatcagttggagctaccgacctgagcccacaaactcaaggtaactcaggtgtggagtccgggtgggcttctctagagaggaaaatctatttcttttagagaacattccctttgcaatgtcatggctttttttttttttaacttcaggtaagtaaatataactaataggagagtatactgaattaaataaactgggcaaatgctaattttgcatccaacaatgtagtttatcattctgagggtttagaaagcaccctatttgattggttagatgctrccttcttttcaagtttattttcaatacagttttgttagtatgtttgtgttggcttatatattggttaattcaaaggcaccaggcacttgctccctcattagcccttcctgcaaactcctgttccagatttttagttgtatagtatttttatgagactcctagttacatattatttattccattgtctacatagcttcatcttctaaaactaaaaatgaacaccttgtgctttttgtcatataattttattgctgccttataaatgactttcaaaatatcatcagttcttgtatgtttttgtactttcaccttttttctgcttcatatttgacttatttatcctattgaatgtgactcttcatttttttttctctctgttcatcatgtcctgggatatggtttaccttggctacttaaaggcatatgtaactgagaggargtttaattcagataaaatactatccttgagttgcmaactattttttctaattgaaatgttaaaaataagacttctcagaaattaactaaatcatacagtctattcaatatttccagttagttattttttaaatggtaaacctgctagtgtgactcactttttttccttacatcacacttcattatgaaagatgtgttcctcttttacaattacaaaaccaaagtaatctgccaaaaaataatgtaatattttgagatcttttagtgtataatattaacctttttaaaactctcattgtaactgggttattttggagggtattacataccatcttggtcttataataagaagagatccctccttctcaaaaataatcattttaaatatcgtacttcaaagtgataatctaggtcacacccacaccctttgggaactgccgtaagctaaaaccccaaggaaaataacagtccttctaacactaatcttgcctgctcatgagtagaatgcagacttggttgttggctttcttgtagcatgctgggttcatgcttgggagttttttctcttgtctgtagttagcgttgaaaataacaagcaaaataccggaggcagaaccagatagggcaaaggtctgattcacatggtgagtacacagggaaccatgactggtcattctgtcccctcatcctgtgggtaagtttccaaagttctggagattcgttcctctggtagsaattgttgagtcaaaaccatagaaacacaacccagacaaactgtcatattgtttaaccctaaatcatatcatttctctctagcattttcttatgaaaaatctaatccatatatctggctgcttaaactaagaacttgttctaacttgtcctgcccctagagctatgatactcactaggtgaatatcaacatagccaaytccatcttttggcaaagtgtattttagcacaaagcagacatctatctacttatytcatataatattagcaggacaatgccttttaaaggtaaaatgtatctattattcttgctccaagtctaaggtgaacactttcaaaaatttccttagaaaacttgtttagtcactcacatgtatacaaagagatattgaagaaaagatatacatacattttccttctagggttctagctttatatgattttgtgattatgaacaaatcatctttaaacaatccttataaatgaaaaactcrtcrtacacattgtttgaattcatatsatctgtaactttttaatcagatagattattttccaatagaaattgttcagatcaaaatagacatacctcagtatgaatacacagcatacatagtaaaaacatgttaggaaacatctctctgttgaaattactccacgtaagagactgataytttttagtaaagattttacaccatcatctacatttctgtattaaagatctggggcaggggaggacaataacttttcaattgtactaaaaataaataaataaaaatggacttccacattagggacattagtatatagaatcctggaattcttaagttagaagaatgctaagagttcatttaattcatatkcaacttccacgctttaaccttctacttttcccctttccctcagcaccaatgaccttaccaagtagttgtctaatttctacttgaatgctkccagtgatggagaatccactaccttctctatctagctattctaaaagtacttacgtgcctcctttaattctgcccccacatattaacacagtytctgtattccacatattacaatttgtgagcattactgtaactacagatttgtttttgctttctgagaaaacctgaagggtaaagactaactcttattacatttacaaaataatattactagctaacatggattgagtatttctagtgtgccagctctatgccttttgcacatatcaacttatttaaaattatacaacaattctgtgaaggagatttcagtattaatctcatttyatagttgtagaaactgaggcacaaatggatgaagtaaacttttcaaagtaaaacaataagaggtagatataggcttcaagtccagagatactgaattcacagcctgcaccctagccaccgygctgtatagaagtcatggcatatgtgggtgctgttatgtcttgattatggctgggccactgtccccacattaggaagcaaaacaaagccactctgatcaactgatttagacatttgcaaggtattttctccaaattctctttccttttaccctcatctttgagtttaagacaaggataagactgatttgcctttagaggtacagaacaataacaacaacagcaaaaacaggaaagtaacccaccactcacaactctccctgttgtctgtcctctctctaattttatttaaaatcatgaatgcagtggtttcacattttttaatcttggttctgccacttatcaactgtatctcttggacaagttactgactctttccaraacagttttttcatttgtttgtttccaatatgaatccmagggcttttaccccattagccatctctcacctctcaactagaaataaattccaccaaatcaatactttttcacaatgttccccagtagattaaaactatatttgattgatcagttgaaaaacagctcatatatttattcataaaggatttggtca

SEQ ID NO: 10026 - DNA, 84409 bp, Homo sapiens
agacacttagcctgcctataagttcataaagttttgtttataacctaatggggctcttcttcatcactcctcatagaaagtaactgggggcatcagagagaccattaattgctcaaatcaaggtaatggaaagtggctatgttaaaatatctgaaagagatctcattgaatttctctattgttgacataggtctcaacacctattcttaactgctcagaggcaaaaccacgtgttccttactcttattctttctccatttacaatgctaccaaaacattgaggctgtttttccaaatttccttcatatactctcctgtgagtggctaagacaatagacaaaggtcaatactctgcttcaataccaaagagatgtactgagagctacagtgaatccctccatgcaaaatgtgtgcttgctcaaccaaacccagaaggcagaggcaagagctcctagaccttaatctctatgatcatgtaggaatcactctaatcttgatgtttcccccaagtcctttctttgactttgagacatttccagrggaccctctaacagtggagaaggacaaatggccactcatgccccaatatttttaataataaatacattcatttgttggggatgggagcttttttcctcagcttctcccaatttgatttyaggctttgaagttttctatggccaaataagaggaaaatgctgcagccatagctgaaaattcaactatgagagtctgttatttggataaaaatatgctaccagggaggaaaaacatccactgttctgttggtttggattcatgtatgtgattagcttgctcagctaagggctgagggcaagtgacacaagatgccctcaaaagaaattgatttatgtatttactgaaaggaaggaggaagaaagtgacaggactctggagttaaatattgtcgaatgtttaatttagcctaaaacactttctacctttcagggagaaactgttcccaatattccccttataatgagccctcctgaaaatcaktctactggttttccccagtaatttctatccttaatgaccctctctttcatcttgttttttttttttaatcattcattcttgtcttcttgctgattttagatgatgggaaatgccccttgaatcctcacaggtaaggtagaaatgttttatgattgagtaaattttgctaycttaactttawaattcactgtaatatgtcagaatgattacatgcaatgcctgcctcctttttacaatgtcttttgcaatgtcttcttttctactctgaagtaaaatacacagataacaaatattctaattaaaatatamagtaggaataaaaygaaaagtaatttataataaaaacaagatgcaaaaacttaggcgctgtgccagtagatgcaatgaggtcatcagaagcgtgcaccttccacagaatcactaggaaagcaacgcccacgcaggtggactgatgggggaatgttgtattagtgactcaaagagcattagaactgtggccaacaccagcctaatttttcaacatrgtgaacaactccrgtaaagagtctgaaaacctgtgataattgtcctttgattcatatrgcaattgcattttaaagatgcaaaaaaatgcttaatatttacatgtaaagtgcttgagttccaggctcagagatttttaacctgtatgaatatcgagcagatattccaaagttatgtgggatgttggacaattcttttgtgtcctgtaccccttgctrtttataatctagcaatagttttcaaaaagggacagtatgcccccaagggtatttttttatttttgtaatgaacaagagttctactgacattgagtgggcaggaggcaggggtgctggatatcttttaaagacatttccgtcctggaggacatggaaatccttatatgaactctattgtcgtagacatccagcacccttgccccatacccactcaatatcggaagaactcttggttataaaaatcaaaaaacacccctaggggkcatattgcacyctttgaaaactatcgttagattatcaagtgttaatgccaagaattttgtaactacctcttgtcacctagaagaggttgcagcaacttagagggtataacaggtattyagtacataaagcatgaacaataacttagtgtgggtgcraaatgcaatgcaaattacccagagctggtaagtgggatatcgaatatttctttggcatttatttttctttcctttctaaagcagaattccaagggtggatggtaatttgtggtttctggaaatactatgtgttggactgtgttgtcgagaactaagcagtatattgttgccatccttgtgtttctgttctttagccacctaggaacatatggagtttttacaaacgctgcatttgacccgagtccttaaggtaagatccctataaagatatttttgaaggaaatagaacactagggaaaaatggaagaytataaagcttaacttttctttacataatcatatattaaattttaagtatgtattaaattttcaggcatgaaggaaattgtgttggcagtaggacacaggtatgacaatggagttacaaaagagttcacaaaaggattttcatttcctccaggacagaaatgtcctaacaagacataacttatttcaggatgtgtaacatttccattattaactgctaggtggtgatgatgtggccttgcctgcaaagcagaagtcaggactgctgaaaaatgtttacgaactgttatggartcaattccctatgctacctgctggaaaaacaaaaataatctgatgctatccctctcccaaaaagtgggtagttgagtgtcctacaaaaagcctgaatggcagaatattcgaaatctagaaagaaaagattatgctgcgcctcagggtgtagatatgatgagyaatttttttctttcttttatttttttaaggaaatgataattatttaaatttctttggtctcatttccagagacctgtccttttcctggtctcctcattcagcctccatatgatcctgttgtgaacatcaagtttcctgctacactggacttaactataatgcatttgctgcaggtttccataaacacccatgaatcaaagacatggaattaccttagattagctctggaccagcctgttggacccgctctggaccaaccctgtttcctgagtttgggattgtggtacaatctcaaattctcaacctaccaccccttcctgtcccacctcttctcttcctgtaacacaagccacagaagccwggagcaaatgtttctgcagtagtctctgtgctttgactcacctgttacttgaaataccagtgaaccaaagagactggagcatctgactcacaagaagaccagactgtggagaaataaaaatacctctttattttttgattgaaggaaggttttctccactttgttggaaagcaggtggcatctctaattggaagaaattcctgtagcatcttctggagtctccagtggttgctgttgatgaggcctcttggacctctgctctgaggcttccagagagtcctctggatggcaccagaggctgcagaaggccaagaatcaagctagaaggccacatgtcaccgtggaccttcctgccaccagtcactgtccctcaaatgacccaaasaccaatattcaaatgcgtaattaaaagaattttccccaaatgccgtgttcctctattttatggtttgttcagtaaggtctgtatacatcacattgtttaccatcagtgtaataacacacaattatggttgtcctatttacacctcaaccattcattcagtcagcaaatatgtatcgcacaccctacactgcaagagaaaatcagagaaatggaaaaattcttcatcaccttaatattttacagggaagaacaaatgtgttttacatgttctttaaatcccatgtttaataaataggtcattgaaagttatatagtatttatctggaactgatgttaaaaaaaatagagagccaaaaattatagtagtcatcttgtctctgtaaaatgyaattmaataaatatgtcatgtacactgtatatacataagcaaacatgcaaataaaaaagcagcctactcaaaggttacaataatgttgcaacaattctggtagtaaccttgggatttagggacacagtgctttcaaaacgtttctctgatacactgccagtagcatctctgactgcttatttaaatgtcaatcagtaggctaggtgttctaggactttggtctcaaccctgtttcctgagtcagaatctacattttgtaaaagttcccctgggaattctgatggtctgccaactttgggagacactgataatattgtagataaagaagtgtaagcaactgttcagttagggakacaatagatacctgcatggaataacaaaaggtaattaacatgattatataatttgaatagtgttgtaatagttcataaaatggaaaagccaatttgagcccagaatctgggagayagrcagaactctggactgtaaagaatggcccagcaaagaggaagaaaatgggcattctaagttggtgcaataatatcagcacaggagaaaagacagaatattggggggagtggggagggaggaagaggctgttgatgagcctgatatcattaacagagacctcatgtgaggtgccagattacaatttattgaatgtactgaatgcataaagcataagacagaaacctggagccatgcagatacagggaacccaggacaagtcattatgatgcctcagacaatataattcgcagattctctatcaatagcaaagtaagatttaaggtgctgtgaaacagtcagatccttcaagaaaaacaagaatacaaggggtcctggagacaggaaaatatgatcataataataaatttgtgattccttctttctctctttttctctttctttctttttctttctttyttttttttttttgatggagttttgctctcgttgcccaggctggagtaaaatggcaygatatcagctcactgcaaactccaccttccaggttcaagcaattctcttgcctcaatctctcgagtaggtgggattacaggtgtccaccacaacgcccggctaattttttatatttttagtagagaagggtttcaccatgttggccaggctggtcttgaactcctgacctcaggtgattcaccygycttggcctcccaaagtactgggattacaggcgtgagccactgcgcytagcckctgtgtgttaagtgctggaactatagtttacagtagcattttatcctcccaacataccctatcasgaaaaaytattattgtcatccttatttcacagatgtcaaaactgaacagagaggtacagtaacttgcccaagacaacacagctagtaagtgaaactgaaatctggacaactgatttttttcagccaagctcttcaagcccgctgcyatgctgcagcttagctggcgacaggcccttatcaaggcagaactgtgccttgatagmggccaggaaggcgattcagagcagtaggccttgtccatgtgtttgttccctgcttcttcaccacttgaaaatagtgtttcagtgcccagtaacagggcacaatactcttttcctcagattaaaaggggagccatctgcttaaggtggttgggtgccactgcactgcacagaaggttctccaagtgtgagcttggacccargcagscctcaggtcagtggtaacggacgactgcttccgtggtgtyggcaggtggaaatggagggatacagctttgtscggctcatgaatccctgggcattgtcccgcctgctagagcctctgatctctgccccttcttcacctgcagtaaaacagtcactagtttggttgctctccctaatacctctggtcactgggagctgtgatctcaccaaacccctgccaggaaaarccccagaaaaagcggagggagtgagagycagaggctgctgctgccgtttgcaagaactgcaggggaggaggacgctgccacccacagcctctagagctcattgcagctgggacagcccggagtgtggttagcagctcggcaagcgctgcccaggtcctggggtggtggcagccagcgggagcaggaaaggaagcatgttcccaggctgcccacgcctctgggtcctggtggtcttgrgcaccagctgggtaggctgggggagccaagggacagaagcggcacagctaaggcagttctacgtggctgctcagggcatcagttggagctaccgacctgagcccacaaactcaaggtaactcaggtgtggagtccgggtgggcttctctagagaggaaaatctatttcttttagagaacattccctttgcaatgtcatggctttttttttttttaacttcaggtaagtaaatataactaataggagagtatactgaattaaataaactgggcaaatgctaattttgcatccaacaatgtagtttatcattctgagggtttagaaagcaccctatttgattggttagatgctrccttcttttcaagtttattttcaatacagttttgttagtatgtttgtgttggcttatatattggttaattcaaaggcaccaggcacttgctccctcattagcccttcctgcaaactcctgttccagatttttagttgtatagtatttttatgagactcctagttacatattatttattccattgtctacatagcttcatcttctaaaactaaaaatgaacaccttgtgctttttgtcatataattttattgctgccttataaatgactttcaaaatatcatcagttcttgtatgtttttgtactttcaccttttttctgcttcatatttgacttatttatcctattgaatgtgactcttcatttttttttctctctgttcatcatgtcctgggatatggtttaccttggctacttaaaggcatatgtaactgagaggargtttaattcagataaaatactatccttgagttgcmaactattttttctaattgaaatgttaaaaataagacttctcagaaattaactaaatcatacagtctattcaatatttccagttagttattttttaaatggtaaacctgctagtgtgactcactttttttccttacatcacacttcattatgaaagatgtgttcctcttttacaattacaaaaccaaagtaatctgccaaaaaataatgtaatattttgagatcttttagtgtataatattaacctttttaaaactctcattgtaactgggttattttggagggtattacataccatcttggtcttataataagaagagatccctccttctcaaaaataatcattttaaatatcgtacttcaaagtgataatctaggtcacacccacaccctttgggaactgccgtaagctaaaaccccaaggaaaataacagtccttctaacactaatcttgcctgctcatgagtagaatgcagacttggttgttggctttcttgtagcatgctgggttcatgcttgggagttttttctcttgtctgtagttagcgttgaaaataacaagcaaaataccggaggcagaaccagatagggcaaaggtctgattcacatggtgagtacacagggaaccatgactggtcattctgtcccctcatcctgtgggtaagtttccaaagttctggagattcgttcctctggtagsaattgttgagtcaaaaccatagaaacacaacccagacaaactgtcatattgtttaaccctaaatcatatcatttctctctagcattttcttatgaaaaatctaatccatatatctggctgcttaaactaagaacttgttctaacttgtcctgcccctagagctatgatactcactaggtgaatatcaacatagccaaytccatcttttggcaaagtgtattttagcacaaagcagacatctatctacttatytcatataatattagcaggacaatgccttttaaaggtaaaatgtatctattattcttgctccaagtctaaggtgaacactttcaaaaatttccttagaaaacttgtttagtcactcacatgtatacaaagagatattgaagaaaagatatacatacattttccttctagggttctagctttatatgattttgtgattatgaacaaatcatctttaaacaatccttataaatgaaaaactcrtcrtacacattgtttgaattcatatsatctgtaactttttaatcagatagattattttccaatagaaattgttcagatcaaaatagacatacctcagtatgaatacacagcatacatagtaaaaacatgttaggaaacatctctctgttgaaattactccacgtaagagactgataytttttagtaaagattttacaccatcatctacatttctgtattaaagatctggggcaggggaggacaataacttttcaattgtactaaaaataaataaataaaaatggacttccacattagggacattagtatatagaatcctggaattcttaagttagaagaatgctaagagttcatttaattcatatkcaacttccacgctttaaccttctacttttcccctttccctcagcaccaatgaccttaccaagtagttgtctaatttctacttgaatgctkccagtgatggagaatccactaccttctctatctagctattctaaaagtacttacgtgcctcctttaattctgcccccacatattaacacagtytctgtattccacatattacaatttgtgagcattactgtaactacagatttgtttttgctttctgagaaaacctgaagggtaaagactaactcttattacatttacaaaataatattactagctaacatggattgagtatttctagtgtgccagctctatgccttttgcacatatcaacttatttaaaattatacaacaattctgtgaaggagatttcagtattaatctcatttyatagttgtagaaactgaggcacaaatggatgaagtaaacttttcaaagtaaaacaataagaggtagatataggcttcaagtccagagatactgaattcacagcctgcaccctagccaccgygctgtatagaagtcatggcatatgtgggtgctgttatgtcttgattatggctgggccactgtccccacattaggaagcaaaacaaagccactctgatcaactgatttagacatttgcaaggtattttctccaaattctctttccttttaccctcatctttgagtttaagacaaggataagactgatttgcctttagaggtacagaacaataacaacaacagcaaaaacaggaaagtaacccaccactcacaactctccctgttgtctgtcctctctctaattttatttaaaatcatgaatgcagtggtttcacattttttaatcttggttctgccacttatcaactgtatctcttggacaagttactgactctttccaraacagttttttcatttgtttgtttccaatatgaatccmagggcttttaccccattagccatctctcacctctcaactagaaataaattccaccaaatcaatactttttcacaatgttccccagtagattaaaactatatttgattgatcagttgaaaaacagctcatatatttattcataaaggatttggtcatattttaatcatataaaatctaaacctacagtttgggtttctactgtgatattgggttctttttagaaaattgattctgaggaatgatattagggtagattaacttgtgaacaaatagttatcacaacaggatatttttgaagagaccaataattatttcattaactttacttattgatcatatttataaaactgtggacttctgaaatacaataaagatactrgtattctactagaagtctgaagatatgagagatctactttttttgtaatgtgagaaatagatattgaatatgcctttcaaattagtttttgtattttatttccagtttgaatctttctgtaacttcctttaagaaaattgtctacagagagtatgaaccatattttaagaaagaaaaaccacartctaccatttcaggtaagcctgaaatatacttttttaattttaaagataaatttctatgggtaatttggcattcacatgcatctaaaatatccatttactgaaaatttatagaaacgtgtggttttttttttaagaagtactggctrcataatatgtggggcccagtgcaaaatgaaaatgtgagtccccttgttcatattattgaaaatttcacagtgactgcaaagcattaaaccaagcyaggggccctttggggcatggggccctgtgaaactgcccaggtcacatacccatgaagctggctctgtttttaaccttgattaaaataactaaataaaacttataagtgtttgaatttttattcattcatctaaaaaactgttattgagtacctggtatgggctgggcattgaaataggcattgtggatgcaatagtggacaagacagtctcatatcctgggttcatggagattatggtctagtttaatgagcatagatgtgccttcgcaaaatgatattttgcttccatttggctccctagattcattcaaaggaactatgtatggctgactcttttgcatctctktcccgtctattcttctgtttatttagtgtgatatatacaatagccataatttttaaagaaaatctcttattttttcctcatctcttcctttatcaagaagactgggttgaatagggttctaatatcttaaytatgataccatattccgcagggatgatagagaccatcaagggagaacttcctccagttgaatccccttgtcagtaattcacctgtccctttccccaatcagatgaagacctgctgtctttcccagaatcatcctagtctgtcctgcctcttctgatctcctttaatcttcaatatttagtcaatgggagtcttcctttcagttaaaaatcaacractaaaccaaaaccaaatcaaaccatgtccagttaactcctatctagaaaaagaaaaaaaaaaatctccccttgaccctgcctgccttttccttttctctcctttccttcactaccagttttctgtatgagaactctgtatcattctctacatttctkmgcctatattccttccctaatctgctttagtatgaataagtctactaaaattactctcacaaaagggcacctaggacttgaggtgccagagcctatgttcttttactactagacattactaggacatttaacaytcttcctttctgaagctctcgctttacctgttttttctagtgccacttccccttggttttctcagacttctcttaccactcctgctcagtatccccaccagatattcttccccagggttcsaatctcacccaaaaccaaggctttcactactacctacccagaagccactttccctctgaagctacattgacaccccctcaataccagcagaattaaatcttccctcttctatacatccccagtaccttgaattaatccctaccttctaaagatattaagaggatcaattgagttaataagtacaaagtatttataatgatgctgacacataataggcactcagtagaagttagctacattattgttattgttgctgctattactaatcataacttagatcatatatatcatagtattatggatatctatatatctatatttctccactcatttatatagtcttcacatgtgttcatttatatatttatttaattttaaacagatctgcatttaaatattcttttatttttaaataattgtgtattgaggccaggcgtggtggctcatgcactttgggaggccaaggcagatggatcacttgaggtcaggagttccagaccagcctggcccacatggtgaaacccmgcctctactgaaaatacaaaaattagttgtgcatgrtggtacatgcctgtagtcccagctactcaggaggctgagacatgagaatcacttgaacccaggaggtggaggctgcagtgagctgacatcgcatcacttcactccaacctgggtgacagagcgaaactctatctcaaaaaaaaaamaacaacaacaacaacaacaaaaaagtatattgagaacctactacattctaggctctgggataaagtgaataagacatggaccttgatttccaggagccaatcagctattggggataacctatggatagacaagcaatgacagtagagtaataaggaagaactatgatgaggattctgtagtaggacataggagacctatctccagtctggtggtcaggaaagtatttctatttctagattgatagctgaaaaaagagtaggatcttggaaagccaagtggggaggcaaggggttgggtgatagatgcattttaaaccaaggcacagaatgtttaaaagtttggaggtgagagtatggtatatttgtggaaccataactggatcagcacagttggaccacaaacttcagggaaggaattaacaagagatgcaactagatggggatcagggatccatgctaggctttatattgagaggaatagggagtccctaaaaggatttcagcaggagaaatatttgtcctttagaaagattatgttgtccaattatagagaatagattggagaaagaccagtccagagccagagaargtagtcatgggactgttgtatcaatccagatagcagagaagctgagatggagtccaaagatatttaggagctaaagttgattaaacttggtgactcattagatgcagataatgaggaagaaaagggaattgttatggacttcaaggtktctggtttgaacagcagaatggatagggtgccattcagtgagaaagaaaatgtaagaaaaggagatagtttgtgagagaaggtgataagtatagatttggagtctgaggtgtgtatagaatatctacctagagatgttaagtgagcagacgggtgtagaagtttggccctcaaaagagagatctgagctagctgtcaacatttgggagacatcagaacaaagatggcaaatgaagaatttagagggtgtgaactcacccagggaggatgtgatgagaagagaaggctgcagacagagctcaaagtagcagcaaagtccaagggatgagccaagaaagaaaagtttaccaaggagcttgagaaagcctgttcagggaggggagaagaaatctagagaatgtgttatcctggaggcaaagggtcaaatgctattaatataagggtcaaaatatggtccctttgttatggaatagtgggacaagaccagatggcagggtgttgaggagtgaatggaaggcgaggaaactgaagcacaagggtcttatagataactcttccctgaaacttggttccagatgggaggagagacagggtagtttcgggggtgggggtgggtactgaggagcttaaggacatttgagaattttataaaaaggaatacagagacttaaatatttaagggaagactctatagaaatgccatgaagtcctttccaatagaaaatgtggggataaaacatctgagagagaatgattaatggagacttagaagaagcaggaagcattgggattcaaaccttgggctggcttggccttaggtagaatggctaccaccttcatggggggccaggaaagcagaggataacgttgcaaataaaattaagtttgtagttatgagtaggaagttgaaggatgtcctgtcctatatcacagagtctattcattttcatagctccagctccaagcttagcatgtacaatagatacttaagaactatttaattaaattaaattgtaggtagatgaagggaatataaggtgggaaacatactcattagggccaggaaaagaggattggggccggtatttgaaggtgtaccttttgtggcttttgccaagctaagcaaattttaatccctttgctgtgtgagacattgtgctaaatgccataagagayggaaaggactaattccaggctgaagacttttaaacaataaaaaggcatggatagcttttgaagaaaagggttctgtgatcaaagtcctttcagatgattaaattttttagtgatttcctgatttaaccttgttagaggtagactctgacagttggtgagaacagtctccaatttatgtgtraggcctttgcacctttctgtcaacccctgtgtatctcagaatatatttgtttcatgtggacaaaggtgtttcgacgtccattttaatgtaatctcttcctgaatgtccaaagttgcttaactatgaacttatgaagtgcaggagtggtatcttattcacctttgtaactctatagtagttgatacaaggaggcaaatctggcgtgaaggaaaagccttttattttgactgagaagatctggatttgaacactgccattaactatgtggcctctcccattccccagactagtcctgtgttatttgtacctttcccctatgtcctgctccactcatctgctgggtgtgattctagctgagccctgaaaaagtcatgagcctcactcctgcagcatgaactattgttgttgttagttcttgtaattgtagggggctgggctgtaggattggaggtatgaagatgcccatccaataaggtttgtggacatttgggcaggtgagggagtacasctggggtcatttttaggaattctgtcttgggctttaaaatggctagtcttggctgggcatagtggctcatgactgtaatcccagcactttgggaggccaaggtgggaggattgcttgaggccaggagttttagaccagcctgggcaatgtagtgagactctgtttctatttaaaaaaatacatacatatatatatatatatatatatatatatatatatatatwtaaattagccagacatggtggtacatacctgtcatttcagctactggggaggctaaggcaagagggtcatttaggacaagagcatcacttgagcccaggagttggaggctgcagtgagttatgatcacaccactgcactccagcctgggtgacaaaataagacctcatctctaaataaataaataattaattaaattggctagttttgagtctgcatatttttcagggacaaattataaaatgtttgtccctgaaggagttttgaaatagctgcaacaatcactaccttgtgttatgtaatgcattgttcacctaagagcaggggattggattagttgaccttctgcagtcctttccagttccacaactgcactaaattgggtacatgctgtgctggcttccccaagccctgaagtaggccactcctttccccaatccagctttgggcactgaggagagggttagaaggkytttaggccatctggctgttggaggagctaaagagcagcttgaaaaccatttagccatgtgttttcctacatgcrtgaaagtatttggtatgcatttatgaaaacatmcttttgttttgccttaaatctgaagaagcaggaggggaggttgaataaatactccaaactgtccactgaagtaataggtcttattaggttaaataacttaggagactttctctgggcatctggtatttgcaggcatgtgatgccaacaaacaaatcaaccaagcaagagaaccatggcaactaaatgcggcacacaattggcagcatagtcagcaccctgttgggctcattggcagctggggtaggtgggaatagtcagtggaaacttccatcaggagccaagacagagggtagcagctggaagaggggggtcagtcagtggagtccgacatgtcaggagtcaaaagaggtgtagacatctggactattctataaagrtgggggyctgagcctgcccygtggaaggaatagggagagctttggctcaggagtccagagatctgagttctgatcccagcaatgctaccagatcactgactgaccttgggcaagtcacctttgtcccccgattcctacctcccaggctttgttaactaaaataaggactgaactttgtgacctccacagtcctgtgtaaagctaacataaaaacaaacaaaaagcttcaggcacaagatcagaataaactccagsagtaggagttcaaggaaaggaataggacaaccgtgggtggcaagacaggggtagggaaagataggacctctgtcccagaaatcagagtttaccattgcttctgtaaccagttactgcaaacttagtggctaaaacaacacaaatttattcttttatgattatatwtctgcagaysagaagtccaaaatgggttttattgggctaaaatcaaggtgttggcagagctgcattccttctggaggctctgggggagaattgtttccttgtcttttccagttactggaagctgcctacactcacgggctcatggccccttcctccatcttcaaaaccagctgagtagcatcttccaagctcttcctaactcagattctcctgcatccctctgataaggacctttgttattacatgggatccacctggacagcccagaagaatctcatctcaagattcttaatmatagatacacagtcccttttgccatataaagtagcatatttccaggtcccagagattaggacrtggacatctcagcagggrcacattattctgcctactacacccaccaaacaaagccctcccacggtgtcctccatctcagagaatggcaccctcctccacccagctccccaaaycagaacctcatcagccatccacagcaactgatgtcctttattctctaccccacatccaatccatcttcaagttccaactattttatctcataaatacatcactaatatattctctcctcatcatctcatcataatctcagtcaccaccatctctcctggagtcttctatctgttctctcaattgttctctgctcagtctcctccgagatcatcctccacaaatacagccagagattttaaaaccaaaatctggtccatgttgcacccctgatgaaaactctttaatggcttccagatactcttaggctaaagggaaaactctatgaggcttacaaagccctgcatgatgggactctgaggatgccttcggcttcaccttctgccccttcctttcacatactaagctccacctccccactggataactgtcagttctctaaaaaggccacattttctggcacctcagggcctttgcgcacrctactctaactttttagaatgtctttggccatcccttttcctctctgcctttggacctcagttaaaggattaattcctcgggaarggattccccaactcacctccaattggactagattccactgtcaaatactcttcagagtattccctccttttctgtcataatatttaccataggtttaaattgaatgtttttgtgatcatttgtttaaaatctgtctttcctactataaaaacktataaagttatagaactataaaaatgtttgacttttataaactctatgaaggcagggagtgggtgtatctattttactcttttacgcaccattgcaattctgatgcctaggataatataggcacttgatattcattgaataaataaaggaatgaataaaggaatgaatacaaggtggaggtgtagtataawgaagtggcttaaaagtcacgatctagagacagacatattaaactttaaatcatgatgctgtgtgatattaggcaagatatttaaactctctgaggctcagtgtcctcacctataaaatgaggatcttaatatctaccttaaaaacttgtgaggattaatgtagggacttacagtgcttgaatgtattaagggaaacagtacaggaaagccttattatgattatcatcaccactgcaaacaaatgctggctgaactccatgagtgcygtgacttccttctcctgcttctaggaygcctaatggcgagaagccaatcccatgacacttgtggatggctcagaaatgacagtagttgatttctgtcacttgtctggaatggggcttttggtcatagattctcaagatttcaaagacatcaagatcaccaaggagcacacgttaaagtccagattcccaagtttcacctccagaactcagattcattgaggctgaggtgatatttggaaatctgcctcttattaagaccctaggtgattctgatgcagagactccaaggactacactttggaaattctagtacagtcatcccttggtatccacagggtattggttccaggactactcacagataccaaaatttgcagatgctcaagtcccttatataaaatttcatagtatttgcaataacctatgcacatcctctcatatactttaaatcatctttaaattagttataatactgaatgcaatgtaaatactatgtaaattgctattatgttakagttttatttgtattgtttttattgtttattttttattgttgttttttgaatatttttgatccaaaattggttgactccatggatgtgtaaccatgaatatgaaccatggtcatggagggctgactatatayaattcctcaaattctgactcagccatcaactttttccctaactccccagacagaatttgtgcttcatcctctcttcttctgtaatattttgcccatatctcagcagtyrctcctatcatacatctatctccaaactagcttgtgagttccttcagtacagggactgtatttgatccaggtakccagaaactttctaacacagtgcctggcatgtagaaagtaaaacctcattcttgatktctgcacccataacctcctgtctctgctgtgttctcccattgcagtaactaataacatcatttacccagttgttctgataaaacaccttgagktcatccttgacttctgtctctcacaagccacatgcaatccatcagcaagtcttgtttgccttacctacaaaaatgtccagamtccaaccactactcatyacgttctgctacatgtgctggcccagtacactgcagtctctttcctatactgcctaatctctctgcttccattcttgtccctacacagactatyctctacacagcagctatgatgaactttttgttttaggatgaacttttaatacacgttatactatgtctctgctgtacaaagtggtttttcattttacttagaaatgctccatttcacttagacraggcgtggtggctcacacctgtaatcccagcactttgggaggctgaggcgggtgtatcacctgaggtcaggagtttgagaccagcctggccaacatggtgaaaagtcatctctactaaaaatacaaaaattagctgggtgtggtggtgcatgcctgcaatcccagctacttgggaggttgaggtaggagaattgcttgaacccaggaggcggaggttgcagtgggtcctgagattgcatcactgcactccagcctaggagacagagygagactccatctcaaaaaaaaaaagaaaaatgctccagtgatgtcccatttcacttagaagaaaattcaagttcttaccrtagcccatagggcctcccttgttctacacacctaccatccacctcatctcttctttcttcccgtactgtttttcttactgttccttagatacatcaagactactcctgcctcagagccagagagctgtgtgatttggttcctcaattcatctaggtctctgagcacacccatktcagagaaatctaaagtaactaccctctcgcatcamcctctgtaattgaaatgaacatctttcttaagcaaagaaagttattgctaaggaatgacagtgggtcaaagtgggmaagacttggycagaactatttctcctactctgttgacttcttttggstccaggacaagtgtttctaccattctattgtgatctgtgtacatgtaatgttgagttaatgagctgctaaaaccttctagattgaaaataagtgagtcagcctcaggaccaggaggaatggtagcaatcactcttggtatcatctgtttgtttttcttgcttagcaactctgcctttgatgaccctgaatacagacatagtttaaatatttgttttcacaggacttcttgggcctactttatatgctgaagtcggagacatcataaaagttcactttaaaaataaggcasataagcccttgagcatccatcctcaaggaattaggtacagtaaattatcagaaggtaagataaatctaatatttttctgaaaagggaaaatgtctaagtctttaataccagcatcaacatttaaaactatactgttaaccacrtgttgttagggaaatctcttgcaactggtaattataaaaattgttgctgttgtaagttttgagagaagaaaaggaaaaggttttggagtcctctagacctgcatttttcactgggttcttactctttaatgtttgggagggcaagttatctaatttctctgaattctcatatgttcatcttaaaatgggaataataatacatacrttgaaagatggtttaaggcgggggtcagtaaatttttccgtaaagggccagatagtaagtttgtytggcttygcaggccataagatctctgttgcaagtactcaactctgccttttagtacaaaagcagccatagacgatacctatttttttggctttggttacagatgycagaactaattaactttgttaccgtattctttccctcaagtcatacaccagagtaagaccrcctctgacaatacaattttatttacaaaaacaggaaaktggttgggtttggcccatgagccactgacatagtgacatagaactagcctgatataggcttcctggcacatagatgacactcaataagtggtatttggtggtggtgagactagaagcattaatagtattagacttttggacatagtgaagtggttaagaaagtaagcyttaaaggcagacaagttaaaattctagctttatcatttctgattctacgactttagcatctctgagcctcagttttctcatctataaaatggaaatgattataaccacccataagattgcctgaaatttaaatgargtcacttaggtagagtactaaacatggttcctgggatcggataagctctctataaataatgatgacaatgatggcaataatcataaagataatagtcatgcaagttattgtatcagccgctgaatagtaagtacctgatgttaatatggttctaattatcccattatgmygatgttcagatcattgtaagcatagtagagttccatcaggcactggtataaaaaattgtatccatattataatagttgttggtatgakaacattttaaaataatttcagacttttcatggttcacatttaaatatctttccttctacatgttccagccatcatacctttgagagaataattgagtaggagagtggtttatgtgcaggttttagaactagactaataagtgcaaatcctggctcagtgacttttatgaagttatttaacctctgtgtgcctcatctttctcatctgtaaaatggtaataataatcatgtctctgtcatacaggtttgttgtcrtgaaatcttagaataatgactggcatatracagataataaatattagccatgatagtaaagataattcttcaattaaaatgtgttcaaataatttagtatttatcttaaaacttgttagtttcagaaaaaatcagaaagtaatttttaaatttattrttttctatataaactgttgtcaaactcatacccactaaggtataagtgactgataataggtcaatgaactaccttccttaggagtacttgcattagcacttaatctttggcttgaggaaaaacaatgaagcattaactgtggcactgagatttcttccaaagtgaatttggcaagactctgggtgaggtagtgggaacaggagtttctcctwtgttcttaaaatcatacagtgacatagtgaacaaccacttcacctacttatgargcttctagacractgcatcagaagttcagcaatgtaaagaagaagggggagaaacctcaaaatatcaaaatgtcacatgcaggtttcatttcaaataagggaggaggtaagaattgtagactttggaccctacctgggctgtttgcacagtgaatgaaccttgcaacactatccctcttcctttactgtttatttgtccctacattccctacagccagcaattatttatgagcaattgcttaaaatgctcccacagctttcactggagacatgattattggcatataatattgcctctggtcctatgamtctaagaaaggtaaatacatattggtagggaaagtaaaattttaccttggaaatgagatgcaaayctagtaagcagatagtatcttttatggtaaaagacaagccttataagttgattttattatgccctctgcattaaaataaaacatctcctcctccatgtctgacactcaccctcacctatagcctccctctgtggtttgagctattttttkgggagtggggataaactaactgcatgctgagccagttacatgagaatccagattcctctatctcagaggtagatatttgagagataggtggtagggggttaagatagtattacactggcttgagaaaccacaacagaacataagagaactctggataaccctttttgacagaatggacaaacggtgatttgtaaaaatgcttgtaaggacatttcctttaataatgtatttaataagactgtcttagatcagggaataaagtatctgcaactgtaactaatcacttaaaarctgtcactaaagggtttcaatttgaggttaaattttcagaaactctgtaactagcatgcatcaaattgacttcaatgctgcacctttgagcaaagtttgttgttcagtaaaattttcaaagtcgttttggtcaattacctttaaaaagcttgtttcatggagaatttaatattattcttttcttttagttatattctcatattttaaatatatgagttgcatatgaatgtgatgtcacmaaattasttctataatatatagccatctgctggtaagccagctctccaaataaaacacrttttctgccagacattgttcgttgtatctaagtgttgccaaattctctatacaaaaatttgctcttctagatttttcyaaaacattccaatgcttgacttaatgtaggtgattacatyttttcacttctcatctgaatattttggccttatgtagagacttccttgagtatatgataaacacctgaaacaaactataayggctatagtttgtatatttaataaatcacaaaaatgtggatcccttttccaaagagacttgcaagtcctgtgcaatgaaatcagctctttataaaayrtcagcattgattcgcccattgcctacattatagcttctaaaagaatattctgaatctttgaatgtagtgaagsattcactaagtttattaacttaggagaggaaaagagttgttcacaaaaataagtaacaagggaagagttactgagtgagcaccctaatgagtaaccaaaaaggctctttatgtaacttcactttcccaaagcttgtatgcaccatttttcatttttaaaaaatactgagagcctttggcaagtaattagtacatcatgacaagaataaatacaatacaaagctgactatcgactgagcaggaaatgaacagaactgagtaaatataaatgaagagctacccttgtgtaaagattttattccagcaagcagctgaacaaggacttcttgtgctctagcacaatagttgtccctgtccatttctcttcttttcagtttagagcttaattttttttattttgattacaaagtcaaaatcacattcaccaaaactgcatctcacaaatgcttcctcttaatagytgtttgtattttatactttatattaatgtatgttgyaaaatcaaagatacaacaaacctgttttattctagactaaaggtaaaataatttgaagtgaaaagaataaaagcattgataaaattacaccccaattktctcattagccatctcactcagtgtaattatagaatatatcctatgtacaagtctatatcattcactgtttcaagatgctcataattcaacttttagtagtatactaaacttaattaacatcattcatttaattatttgaaattcatcttatatgtaactgacaggcgaatgtgaaattctgagtaatttagtttgatcaattaracagacattaatttgtgtgactagagtaaccyttcattatctatctcaaaatatcatgtacacaagtatatayaataattttttaagcccagtatgtgttaaaataaatctaggtgtgaaacattgattgtttacagataggttcaatattgttagaaaatcagtcaccctgctatacctagcacaagtgttatagcatcttgggcaatttttagatacttacattggttggttctcattccagattgacagtgtgttctaattgtagccctagaagaaatctagaggtcaaacctatcacaattagggcaccaacatgtaccctagagttaactaggyagagcccctcaggggcccaggccctktcttctttacatttgtactctggcatttagcacagagcctggaacctagtggatgatgatggtcatgatcatgatgatattaatcattactgaactaaactgaggggcygaggactgattagaaagtaaggactatgcattatttttcccttgctttaaaattattgattttgctgataattttgagcaggtactttgtcttacttattaccaaaaaaaaaaaaaaaaagtacttttaccaaaaaagtcttatttactttcatcgcctttggaatagatacatcactacaatggattggaagtttgtgtcctccaaaaattcacatactgaaatctaacctccagtgtgatggcattagyaggtggggcctttgggagatttttttttattatactttaagttttagggtacatgtgcacattgtgcaggttagttacatatgtatacatgtgccatgctggtgcgctgyacccactaactcgtcatctagcattaggtatatctccmaatgctatccctccccbctcctttgggagatttttaggtaatgaggatggagccctcatgatragattagtgcccttataaaagggaccctctcactcaccctctttctaccatgtgaggatacaaggagaagatggcagtctacaacctggaagagaccctgyaccagaacccaaccatgctggcaccctgattttaaacttccagcctccagaactgtgaggaagaagtgtccgttgtttataagccactcaatccaggktactttgttaacagcaacccaaactaagaaaatcaccaatttctatcttactcacatgtgttaccagaactcragcacacttaagatctatcttatctaaagtagaacataaaggaaagaggctgtattaattgcaacatgactgggaaagaaaatacttaaccaaaatgtgaacatgtattcccacaggctatcagagcatttgttaggagccagaaattttacaamtattttccagtcttcataacccatcaaaaaggataaagttatctctagaaaaaggattatattatcttaaattataaatgaaaaaactgaggtyaaagggacttcaagaaaccttcccaagttcccacagttagcaaatgatacaaccaccaagatattttcaactctgaccctgaagttcaagtgctttctcccactatctagcagaaaaaagtatcgttaaccatatagtctcacaaataytgaattacaaatggcgmtgagtgctgtcaaaaaaccaacaacaaacaaacaggtatcacaatcagagatcaagaagggtgtaagatgatatttgatctgacatctgaagaatgagcacacatttacccagaaaaakaaagggaggaagaacttcaaaagttatctcctaccctgcaaagaatataatgttttgcccttaggggagcttgtgaaggcagtggaaagaatatcattttctactatagaaaccccatgtgatgttttaacagttgaaacagtggaagctgcctgtccagaaacatcatttttcaactttatgaggccatgtagcaagaagcattgaagaagggctgtcatgcttgattcaaggtagatggtgcagctcatcaactagccatgctaatttcagttaatasacaagttctgacctgagagggcaactctccttatcagtcctgtttgtgctttgttaccaaagctcttttgtaatctttcacagataatgcttcctgcttattagtggagactttctccataaactttttttcttttatagactagaattatgttatmacttacaggaagtgacttaagcttttatcatttctcagctcttgacagttttattatcaaagtgaaagtacagcctagagtaaatattagttattagtgtcaagctatcctttggggtgtgttgggggaagacacaacaaagtccactttatgctagygcaaagttcacaaactcagatgcctatagtagccagataagtagttcagtgaacaaaattggtccagtaagdactgatcatcagaaagcagaaaagggcagctaagatccagatccaacaaaattctgtgcaggagtttggtcctgttgytaaccagatctccaggtttttgttttttaaagagaaaccagtaatccaaattcttatataatttctccggatgtttaatgttggcatttaatctattttaacattacgcaatcataacaacacacagccatgagctttgacttgttgacctaggctgtagcccataggaccttaaattttaggagtttaataaatattcactgagcatcttcttcatgttcatgttccatgcttctctaggtacctatggaaggcaccagagacactaagacaaatacaatccagcacttttccttgaggaactcacacttgggtgaccaaaatgtgcaggacacaaatacttatgatctagtagaagaaaatgaattagtcayataatctcacaggcatttaattacaaattgtgatgggtgctgtaaaagaaaaaaatgtgtatcagaattggagataaaggtagaagtgaacagatattcaaggtgatgtctgaatgatgagcacatatttatcaaaaggaagacgggaggaagagcactctaggcagagggaatggcatctgcaaagaccctgaggtaggacagaacttggatgtctggggaactgacaggggacccaagggacaaggagcccatagtaaacaagagaaaagacgtatgataagactgaagagagaagtagaggtaaatcatacatggacttgtggtccacgttaaggactttatgcaagaagtaaatctagatrtacctactcaacttatggtttccatgctcagaacctcatgagatacattgcacgttactgtagtacctgaatccttcattgctattgaatggatgtgccttattttccactcccacctggrgaatccaaacatatgctgatgccatgcaaactcatgcaaagcgttttgagtggaatagattttccacagttgggatggggaaaggtacaattaaagaagggaagctgacattgctgtaatgtaaaaaaatattttatatggaaatttagcatctcagactttggcttcagaacataaggaacmagatttaccctttttctcaacaactagacaggcagacaaaacatataaaacagaagttttcagacatcgaatgacagacaactcaagacagtaaaagaagwgtaacaaaccagatgtgccctatgagcacctaarcttactgcttgaagagtgtttccagggaacagcacaagcagggagaacccagacagagtctctatgggttgaggaaatagagtttggacttcggagaagctcaaatggctagaatttgtgattttagggcagagtcctgcagaggacagtataatcacagagaaagagctctagagaatctacagagaggttttgtcaagttgaatactgatctgcacatacatgtgaggaaagtactgagggtaagaaaaatgtcacttgaaaggaacaggtggaacagtccctggaccttactcagggccggtaatcgtttatgttcctaccatcaaacatagaaagacctcctaataaatgagcactggatagaattgtcagaaggatttagaaacagtgggtggataaaattagactacaggctgctgaggaggcaacagaataaaaaayaagatttgatttcaagtatcttaactgtgaataaaactcaatactagttaacaagaatgcaacaaacaacaatgtaaattcacaatgttaataaaaataaacaagcattagaagaagcagaaagagatgactcataaccaagaaaaaactcaacagattgagaagtgaaagagagaatagaagcagcaggcagagacagtaagacagctatcataaatcttctcaatatgttccagaaagcagagaaaagcatgagcatgatgaagatagagaatataaatatgcatacacagaacttctgtagatgaatacaattgttgacatgaaaagtaaaaaataaagcatagaaaagaaaggtaaaaaataaaggwtaaaaaaatatattataaactgaaggayaccactaatacaacaaacactggatgaaattaatagcacattagacactgtgaaaggaaatagtagaaaatattaatacattgcaatagaaactgcaaagtgaaatacagagattaaaaaggctgaagaaagtgaacagagcatcagtgaactgtgggaccatatcaagtgatctaacatatgtgtaattggatcccagaagtagcaggaacagaaaaagtatttgaagaaatratgactgaaaaattcccaaatgtaatgtaaactacaaaccaacagattcaagatgtttgacaaaactaagaagaaggaacatgaagaaaaccacaccaagccacatcactatcaagttgctggaaaccagtgataaagagaaaatattggaagcagtgagagataaaaacacacaccacatacaggggaacaaaaccaagaaatgatagcagacttatcgttagaaactatgcacaccagaagacaattagggacatctttaaagtgttgggagggtagaagataggggaatctgtctgtttagtattctataccaagtcaaaaagtcttttttaaatgaaggcaaaataaagagtgttttagacatacaaatgcagaaagaatttctcactaacagagcagaaaaaaatgttaaaggaactcctttagatagaagaaatattatgtcagagagacatttagattcataagaargaatgaaaagttccagaagttgataaatatagagaaattttttcctcrttttaatctattaaaaaggcaattgattatctaaatgttaaagcaaaatagtaacaatttattgtggggtatattatgtatatataaataaaatgtatgacaatagcacaaaggctgggagggaagaaatggaaatatattattgcaaggttcttacaagtgaaatagtataatattatttgaaggaagtttgtgacaagttaaaaatgtactatatattgtaaacggaagggcaccactaagaaaacaaagctaagaaggcaacaatggagattaaacatcactaactatactcaatccaaaagaaaacagaaaggaaggggaaaaggaataaagaccagatagacaaatagaaaataaatataaagatggcagttttaaattcaaccatatcatcaattacattaaaagtaaatggaaagaacactacaattaagaaacaaataagattgaataaaaaagcaatgctaaactgtatgcagaatttaagaaatccactttaatgagagagacaaagataggtaaaaaataaaggatagraaattatataccataccagctaacactaatccaacacaaaagggtgtgtaatgatgattccattgatatgacattacagaaaagccaaattatagtgaaataaagcagattagtggttgtctgggcccrgagggcattggctacaaatggcatgaagaaatgttttggaatgatggaactcttctctatcttgattggaactatagctataagactgggtaattgttttaatcaaagctcagcaaatattatacttaaaagtggtaaatgttattatatgcaaattatacctcaatgaggataatgaaaggaagaaagagagggaaggagggtggggaatagggaaggaagaagacaaagaaaggaagaaaggagaaaagaaaagaaactaggaaaggaaaaagaaaagaaagggaagagaaaggaaggggagggraaggattaatcatttcagttttcaaaaagtgtagttgcttcagtaagagkagttttattggccttttaccccatcatgtaaaacatttcaggcttttttycccagatccttgttgtctgcctacatccacactgatgttctcaccttcttctcktaaagaatttatcaagttattgtaccaaacaaaaataactgcatcccaaagagaaattctgtcaccagctgatgatagggaatctttcacctaattaaatgaggaattcctcaggcagaggaaactgttcattccacttggctmtctatggcactcacctctccccttcctgacctcacttgctccattttattattgaaaacctcacccaaccytctacacttcttttaatattgagtatctcagttccttctcttcaataaagaagaccaatttcttcatcctctccctctcctatcagtagggaaagtccaatatacatggaggtgttaatgatgtgtctttgggtgcacaaagtacaaagtaagacatctaagtttcaggggatggacacrtttcatattyatacagacaaccagcctgcataggggagttagacgctgtggctckggggaaaaaattgagataatcagatggctaagatgaaataaagagataaaacaaagctgaggatcacagcagttggaaagaagatctgaaatagcaaaacaaaataatacataaacagctctgactatcctcccatctcatgttaataggctaagtatgtcttattaaasaccacaaagaagatatcacccattcttatattctgagatggtttactaatcaraggcgattcaattctctgattatatttaaataataattgttcaggtaccctggaaaattaacttgctaaactttaatttacaaataacatttgttattcttaagatcaccatgttatcaaagcctttgtaastacatgagcatagaaatgggcatatgtgaatctttccaaataataaaagttcactattgaaggacatatgcatctccagagarctcatcttagctatcmccagatktgagagtggtgaaaacgcaatcctcagaaactgyccacatgtcttgatggctgttactcctccaggtgcttcttaccttgaccacacattccctgcrgagaagatggacgacgctgtggctccaggccgakaatacacctatgaatggagtatcagtgaggacagtggacccacccatgatgaccctccatgcctcacacacatctattactcccatgaaaatctgatcgaggatttcaactckgggctgattggscccctgcttatctgtaaaaaaggtaagaacacccccaccaaaagattcaacaactaaaygttggaatggtcaggagttctgtcatgggacaaagcttgggagcatcttggtaacttcttgtacatcaagcagaggaagacggcacggagaccagatcattgtttgacmagagaaaaaaacacctgctatttcagggtgtggatccacctctgtttcttctcattcctccttcatctcagtccttaaggttctcccaggcaaattcctgtttgagagtatgttctgatgtcatgcttgtatgatctgtaacatttacctcaaggccaaagtcttttagaaagyatacagtagcctatacyctgctgaaagagctcttggaaagaactttggctaacatgtttgacatatctgaggtttgggctggtaatttgctctataaacacgtgaaatgccagcttcctttcttacaaacaagttgaaaactttgggtggtaggtttcaaacacactcaagtgactttacaagaacttttattggctgggcttcttaggagcaagcttggattttcattttatcccatgagaatccagcccatctttcattaaaacaaacaaccrcagtgagccacagcatgggaaataacgtgatggactcaccatctgcctatacayacacrctcagrccatacctacatacatgcccaatgtatttactcattatacaaagactttttttccatttcctggtatatataagatactgtgatggtactgaaaaaaaccktaaaacttacaaaagactcttcttgcattttaccatcagcagcatgtttttctcatagtgagaatggattaatgctgatacttccacccaattatctaatgccccctttcatatacaaataagatgacagcattaaacttggggcatgatgctttyaccaactgagctaacgtatctatatactcttctattgagactggrggaaatggatacttgtacagagtcttgagagtcaccaaatgttttcttcccaagctggatgaaataaagcctgttccccaaagcaagaaggtatcaaagaagacagtrtggcaccagattttaaataaccctagaaccattattacttgataaatatgctattttaaaaaataagaatttcttcaagttgaaatcattatggttgattgcttgccctaaacwctttgctatccaggaaagctaatgagyrtcttctatctgcagtgctactgaaaacatgtctttcctttcatagggaccctaactgagggtgggacacagaagacgtttgacaagcaaatcgtgctactatttgctgtgtttgatgaaagcaagagctggagccagtcatcatccctaatgtacacagtcaatggatatgtgaatgggacaatgccaggtaacaygagggctgtgtaccattaaacaacagtaaaatcattagtaatttttcggtcctgttttcttcaaagcactagagaagttgaccatactcactgttttscaactccctatcaagaaggaaatattttctctttttttttttaaacaggaaatagaagagacaaattagaagctagagaagaaatgtgcagccttgttaggtataktgacctrrgtaggtttcaccttggcctgtactttgaataagaccttaaggtatcagctcagccactctctccgagttctgcagttcctctatatgatgaccatgscttcttcaaggacaagccctagcaggaaggatcagcaggaagattgcagtaaagatgaacagattaggagtaatcctcaacacacamaaaaamccagcatttcaaaaggtgacagaagagtaatattcartggcatctagaatattttctctttccatttgcatttgggcacttatgagaaggcaaaatcatagcaatcgttaagagaaaaaataactrattcccacttagaccacatctcttctatttctctctggtagaactgacctacaactaaagatccagggtatatgatactagcctgagggaaaaacattaaaaaattaaaatgccactttactaaataaaccatatttcaaaacactaaacttcttagaggttattctctaatgccatctgaaaatcacaaatagcttcacttactaaaacacaaatattgttaagakttgagatctgggtagtgtttttaaattgtattctatttcatttgactacattttccacttggktttctgaaaatatactcatatgactctcaatgttgatcccaagttccaatactaggagcttgtaaaaactggggcttagttaactgacctcgaccttagataatctgagttcagacttcagattatcagactaccttctgtggccctggataaattagttgtctcaatgtgcttacttacaaaagtggactaaccatttatcctaacatctatttcctggcagagtgaacaatctgtataagtatatggatgccaagaaaagcaaaaccatatgcacaaaaataaaaataaattgatctgagcttagagtttacgaatttatagttcccaaaagaataaytgggggtaaatgggacaaggtagggaaagaccatcagtagaaactaagaatagtaaacatttgtaaaaaccctctgccttataargcagaataaattgaatacatatgataaatgctaacacagrtatgttaattgctgaactcaatataagcatttctttggcatggataaacgcttccaccaaagcctcctagtgatgcaaggaatcctggctttgttgcaatggtctcctaaaaaaaacaagcctttgtgtgggtaaggaactgattctcagscccattatctagtatctagtgattatgtatctgagatgtaaaacagaaacctaaaagccaaggatggagtctccccacagagcaaatgagcattttcccagtgactgtaggagcaaagaaggagcaaaactaagtttttatattcagttatcactactccttccatgaaaagctcccaatggctcagcataatgaggacttgtacactgcattttaaggagagtgtgtaaccccaaagtgatttcgttgacttgtcattaaaacaatcaaaaagtaagtaaaaataacaattgaaaatcctcayatcatcttcacatcttcttcccttaggcagagcttcgaccactasagctagagagctgagaggattaagtgcttgaactcagccctattggcggttctggtgatttgactccctccagctgagatcagactggggtgaccaaacattccattttgccgtggactttttaccagttctaatagttaaagtcctgaatcttgggaaacccctcagaccagaamagtcggttaccttcttggttcccttcttggcctaatcctttagcaatccctgtgtttytgagttcacatccaccatctctaagctctgttgttacctgtataatgccatttatcacaatgagttrtcactgcttgtttgctggtcactcagatgtctgcttttgcagggcacaaactacaactggagtgtctgttccctcaaagctttatacaatgcctgacacacagcaggtgctcaatacacttggtgagtgaatgtttgatcacagagtacttgactgaatgcttattttggcctgtgtctctccctctttctcagatataacagtttgtgyccatgaccacatcagctggcatytgctgggaatgagctcggggccagaattattctccattcatttcaayggccaggtcctggagcagaaccatcataaggtctcagccatcacccttgtcagtgctacatccactaccgcaaatatgactgtgggcccagagggaaagtggatcatatcttctctcaccccaaaacatttgcaaggcaagaaactctcctgacagtcttgcttctcaatgcagaatcctttcttcccatgcactaactccctctttctccyttgccctttcaagccacctgcaccgcagacaaactttcctcrgttcctaacaaccaaacttagatattttgctcttagatttataacttgctctttggggatggagaaagcgaaggaattggcaaaggtttttttttttttttttttttttttttwaattaagcaaaagctaaagagatctctaacttcctcgaaagaagaaaagaggaagaaaacaaatgcatacatagagatattctttcttcgggttacttcatatgcaaaaaagacctagatgctagcacaagacaaactgcaaatttacagaagcactaagttgtaraaagtgtaaaagtttagcatgaaaacattaacctttacagtgggatraacacaaagtctagcacagagaggaactcaatgaatgtgtgttgaatggatcatacatggcatatactgaggggtgagctccaaagaacactggggaattcaggtgggaaaataaatcaacccacgttatgtggtatcrtgtaaacaaaataactgattgttctactacacatttttgctttaaaactgttgagattagagytcatataaatggagactaaaatctaaggaaatgatatcacaataggaaatcattttgttaccaaaataatgtataagmaacacatataaggaagagatactycatgagatcatttctgtttcttttcacacgagtagtcaaaattatatttgaagtaataaaaccatcatgatatccgtggaagatagagttcccaataatattaaaacaacaatgtaacttttgtttctttgttgaggataagtgcattatgtattgttattaatatttaatttttaacaacaattttattaggtactggtgctacttcattttatagattaagggacagatgacagaaaaatgagaatttaacaagacttaattcataaggtcttaagaagttaaaaattattagaaatttgcctgctcaagaagaaataaagggaatctttccaaattttttccctaacccctcctccttttcccccttttaaaattcttgccttttctggatgccacttaaagagttccaaactaaaatgttcaaaaattgcctgagcattactttcactcttattatattaatataaaccttccacaagttgatttaaaggatatgcatttcaatcaaccataatttcttctcttgagttatttcattgtctttctgtcctaactcagctgggatgcaggcttacattgacattaaaaactgcccaaagaaaaccrsgaatcttaagwaaataactcgtgagcagaggcggcacatgaagaggtgggaatacttcattgctgcagaggaagtcatttgggactatgcacctgtaataccagcgaatatggacaagtgagttgttggggttcataccactgggcaaaggttcaagacacattccatagggtcctagatgtttggggtgaaatgtaagttcacagctctcaaggggacacatgtattggtttctattcaagtctttttgtaaaaattaatcttgaattacccccaaatcaccaaagaaattcagcctaataataataaaaatgacaacagcrgctaccttttgttgaatgtttgccattgccaagcactgtattgtccctttctgagagcttcgcttcaactctacaaactagatactgctcttatttctttttatagatgaggaaatgggtctgagagattaagagatttggaaattcaaatagctcttaaacccttgaaaagttactcaaattcactcataataacagaaatgcaaattaaacttcatgggaatactacttttatctatcacattcacaagtccagatgacatcatctgttgacaaggctgtgagaaaaaagaactatcatatattgttcgtggaagattaaattggtaaaaggattctgaagaataacttggcaatatgtatcaaaattctaaatgcatataccctttgactcagctatctcactctggaaatctaactatacagatacacttgttcacaggtgaaatgatgtatgtacaacatattcactgttgcaacgttagtagtagtaagactggaaacaacycaaaatgtccatcagtagaaaactagtttaataaattaggatacattcatacaatggaatactaagcatcaaaaaaagaggatgcaaacactctgtatgtactaatacaaaaagttctccaagataygttattaaattaaaaagctgggatgtagtatagcgtgtatayatagctgccttttgttaaaggagtgaaagggataagaatatttatattttcttatttgtaagacataaaggtattctggaattacacgcatgaaattaatatatggctacctagaaaattcagggagggtagggaggtcattttgagrgtcatcagagaaaagtgagagttttcwctgtaataaaaattaygygaatgtaytttctattaaaaacaattaaactaggaaaaagaacaaaaaaaatttggccaagattatagaattgttgacagaactgagataggaawccaggagtgtttggcaacagtcagtgctttccactgggaaaaataaattcataaaatgatattccatcttaaaagattgctgggttaaatgatatttctgactttaggtcttggaggaactgccatactgtcttccacaatggctgaattaatttacattccaccaagagtgtataagtgttcctttctctccatgaccttgccagcatctsttctttcttgacttttcaatcatcgccattctgactggcatgagagggcatctcattgcgtttttctttctttttttgagacggagtctcgctstgtcgcccaggctggagtgcagtggcgcaatctctgctcactgcaagctccgcctcccaggytcacgccattctcctgcctcagcctcccgagtagctgagactacaggggcccgccaacacaaatacaaaatacaaaaaatataattttttgtatttttagtagagatggggtttcaccgtgttagccaggatggtctcgatctcctgacctcgtgatttgcccgcctcggcctcccaaagtgctgagagtacaggcgtgagccaccgcgcccggcctcattgtggttttgatttgcatttctctcatgawcactgatgttgagctttttaaaatgtgctttttggccgcatgtagttgcttttgcaaactaaggtaataaagagggmaggggaaaagtggttcatgtttctgctcccaaagtatttatcccagtagctacaaaagatgggtgaaggaggttgcttttcagtcagctcagagaattggctagatggtggaagagatagcccaatagcacagaactatgattaacaatgctagtaaatgtttcctggggttggaagttgcttttagggattaagaaatacctttaaaaccaaaaaggctatcatagaataagtgataggacagactttagaaaaattcctagtatcttttcagccagtataggccttttcccagagatatcaaatgtctgctgtagcaataagaatgacaggaagatctaagtagctgcttctaaccagttacctatgacttttatcagtgatgcaggagacaaatcagaagtttccagttttccaactagacagaaaacataaggactttgcaaactacactaagaaatttttagagaactagtatgttagctaatctaagagcagaatgtttaagcacaagggtttccccatcctaccgagatctctatttgagaaagtggtttaatttttttttacttcactttaagaaaatacaggtctcagcatttggataatttctcaaaccaaattggaaaacattataagaaagttatgtacacacagtacgaagatgagtccttcaccaaacatacagtgaatcccaataygaargaagatgggattttgggtcctattatcagagcccaggtcagagacacactcaaagtaagtaacacaaatacagaatcatgggagaaattacatagtaaaatattatggagtacctrgttattttttaattttaaaagaaaaagatgctcatataattttaaattcaaatgcaacttttagtttttatttagtatttgtatttatttacagcttrctcagtaatacaaaggatctgagacagtttctcaagttataaaggcataaaacaaggagtctatgtaattgggatagaataygsggacaaagaaaataaagccacagataagtagataccatgtgaccctgtaaggctgtcttcaaattttgtcctaagctttatggcagtcagtgtaaaaaaggaaatatgtcagggtgaagtttacatcatctacaaaaagaaagcaccatttatcctgatgttaagatctaagaggaacttctttaatgagttctacaaaagagagtgctgagtgatacagtagatggcatcctkgataaaattcttataaccagcataatagattaaaagttgcataaaataatrgattaaaagttgcattaaaatatttctcattatagctaagatataacagtaaacacaattgaatagaaacaatttttactcattttttaatgtagtctaggtatgcagctctctaatggttggactctgatgaaggtaaactccatgtatcaagagcacggagttttcctcagacaattctccttaaatgtcatgtcacttcaccaagatagataagaattggacagcagagaattaaaggttgcaatctttgacaaaatcctagagtgtarwtaatctacagacaaaggatgatccaaaggctttgacaatcaaccaaatagaagataggattaaggttctcttttgcagattaaagagcctaactaggactcctgtgtgttttatgcacctgacaaggtctattctgttcatttaaaatagccaaaggacaaaagcagttttttttctccatgcctctttcccttcttccatttctgatcccttttatgtgctctcagcaagtgtagacataccttattaaaagttcaggatctggctatttgtctgtgcctctcaagcaagtagcttttcccccycaccaagggtcttactctgtcacccaggctggagtgcagtggtgtgatcatggctcactgcaacctccacttcctgggctcaggcgattctcgcayctcagcctctcaagtagctgggactacaggcacacgccccaaygcctggctaatttttgtatttttttgtagagatgakgtttcaccatgttgcccaggctggtcttgaactcctgagctcaagtgatccamstgcttcakcctcccaaagtgctggggttacaggtttgagccactgaacctagctgagaagatgacttcaaagacagtgtcctaaaaaatctaccrggcaggggaaggkgatcatggtctagagatgagaagcagattcaaaatgagatgtggcccaagctgaaaagagaagggcaggggaaggaggacttgcttggagagagtgatactgtgaggaaaacgtcacttctcctaacctatcctctaaagtcagacttctctttccattttccaccttaatgtgtgagtgaaacactctctccaatgctcctgccaagtgatgaggggaggttactgctcagataaacagatctaattttccyactgtgtgtacacatgtatacacacacaccatccaaaaggtgaatatgcaaagctagtatcttatattatttgtcatgatcaaccttaaatcctagaataaatttgatttaactttgtagatcgtgttcaaaaatatggccagccgcccctatagcatttaccctcatggagtgaccttctcgccttatgaagatgaagtcaaytcttctttcacctcaggtttgaatctttcacttctactgaatccaactagtaacttctgagaggctgccacatttttctgctattctccttgcccggtggtgtcactactgcagtcaggtagtatacaygtaggagtatcctaaaaatcacagccaaacccttctcacttcaggagttttgtctcttagtggtaacaaaatatggtgtcttttattagtgtcatagtggcctctagtggagcattatctaatggctacatgttatccaggttccaagtagaatatttaaagaattcaattgaacaatgagaacatttagacacaggatggggaacatcacacacyggggcctgtcgsggggggggggtggggggcggggggagggrtagcattaggagatatacctaatgttaatgacaagttaatgggtgcagcacaccaacatgacacatgtatacatatgtaacaaacctgcaygttgtgcacatgtaccctagaacttaaagtataatttaaaaaaaawaaaaawaaaagaattccttttgcaatattaattggttccagcgaaagcttatttatttatttattaycatgaaataactttgcaaatgaaaacaattttgaatatattttctttcaggcaggaacaacaccatgatcagagcagttcaaccaggggaaacctatacttataagtggaacatcttagagtttgatgaacccacagaaaatgatgcccagkgcttaacaagaccatactacagtgacgtggacatcatgaragacatcgcctctgggctaataggactacttctaatctgtaagagcagatccctggacaggyraggaatacaggtattttgtccttgaagtaacctttcagaaattctgagaatttcttctggctagaacatgttaggtctcctggctaaataatggggcatttccttcaagagaacagtaattgtcaagtagtcctttttagcaccagtgtgataacatttattcttttttttttttgtcttgtctatttttatcagtaccatcactgccgaaggcaagtctagagtgtgataacatattttgtcttagtttcaaattccaggtctgttggtatyggatgtgttgagcaagttgattagcctttcctaatttcttccttttatcaaatgggtaataaccctcctaaaaatgttacaggtctgtttgggggttcagtgagataccatctggtaaaagtataaagctctttaccagtctttgctatttttagagacctgcaatagggagacagaggagagattctctgaaagcaaccaaatttagagacatagttcctagtgaaattggacccagattatggcccatctctgttgagactaaagtatacagaagaatgtgaacaaagatactgaatttctgagtttgtcttcattgaagaattgtagtctcatattattaaactaaaattcccaattatgctaaactgtaaccaaagaggtcttatctcaaggcatacaaaataaacatatgcctagaaaaagcagaaatgaatttctggacatatggamgatcctgatttattgagctaggaaaggaaacaggtagtagaagcataaggcttttctattgcaaccttctctttcatcctttgcacttattcagagcatattcagtcaatcattcatgttgaaaggtgtgcaattacagagatagacagactttcagctgccatagcgaaatgagatttttcttttgggatttgttttttttttttttttcttttgagacagagtctcactctgtcacccaggctggagagcagtggcaccattttagatcactgcaacctctgcctcctgggttcaagtgattctcctgcctcagtctcttgagtagctgggattacaggygcccrccaccacccccatgtaatttttgtattttttagtagagacaggrtttcaccatgttggctaggcyggtctygaactcctgacctaaggtgttccacctgcctcagcctcccaaagtgctggtattacaggtgtgagccactstgcccggctcttttgggatattttaatctctgaattttcttatctgttctgtttgcttttgcatattacctttagctctaacaagtgctgtgtacacaatggactctcataaatgcctgaattatatggcttcagtagttccaagaactatgtcactttggtttctgagaactcagtggtgtagataatttgctgcaatgttaatgactgaatacagcacttttttttcttttttttttactcttaagttcaggggtacttatgtgcaggatgtgcaggtttgttacataggtaaacatgtgtcatggaggtctgttgtacttactacttcatcacccaggtattaagcctagtatccattagttattttttctgatcctctccctctttccaccctccatcctctgataggccccagtatgtattgttcccttctatgtgtccatgygttctcataatttagctttcacttgtaagtgaaaacatgcagtatgtggttttctgttcttgcgttaacttgcttagaataatggcctccagctccatccatgtccctgcaaaggacataatcttgttctttttgatggtcacatagtattctatggtgtwtatgtaccatattttcttcatccagtctgtcattgatgggcatttgggttgatttcatgtctttrctattgtgaagagtgcgaaaatgaacatacgcatgcatgtgtctttataacagaatgatttatattcctttgggtacataccaagtaatggaattgctgggttcaaaggtatttctgactttaggtctttgaggactcaccatggtatcttccacaatggttgaactaatttacactcccaccaagagtgtataagtgttcctttttctccacaaccttgccaacatctgttagtttttgactttttaataatagccattcttattggtgcgagatggtatctcattgtggttttgatttgcatttctctaatgatcagtgatgttgagcgtttttttcatatgctctttggccacatgtgtgtcttcttttgaaaagtgtctgttcctgtccttggcctactttttaatggggctgtttgtttttttcttgtaaatttaagttccttataaatgctcsatattagacctttgccagatgcatagtttgcaaaaattttctcccattctgaatgttgtctgtttactctcttgatagtttcttttgctgtgcaggagctctttatttcaattaaatcccatttgacaatttttgcttttgttgctattgcttttggcatgttcgtcatgaaagctttgcccatccctatgtyccaaataatattgcctaggttgtcttccagggtttttgtagtttggggttttacgtttaagtgtgttgttgttgttttttgtttgtttgtttctgttatttttgagatggagtctcgttctgttgcccaggctrgagtgcagtggtacgatctcagctcactgcaacctctgcctcccatgttcaggtgattctcctgcctcggcccctcggcctcccgagtagctgggattacaggcataagccacgatgcctggctaattttcttttcttttcttttcttttcttttttttttttttttagtagagacgggttttgccatgttgaccagactggtcttcaactcctgacctcaggtgatccaccsgccttggcctcccaaagtgctggtattacaggcgtgagccaccgcgccaggcctacatttaagtctttaatccatcttgagttaatttttgtatatgatgtaagaaaggggtccagtttcaattttctgcctacggctagccagttttcccagaaccatttatggaatagagaatcctttccctattgcttgcttttgtcacagatcagatagytgtaggtgygcagccttatttctgagttctctattctgttccattggtctwtgcgtctgttcttgtaccagtactatactgttttktcctccagagggcagcagacatcgaacagcaggctgtgtttgctgtgtttgatgagaacaaaagctggtmccttgaggacaacatcaacaagttttgtgaaaatcctgatgargtgaaacgtgatgaccccaagttttatgaatcaaacatcatgagcagtaagtcagagtactatttttgttcatcagtttttcattcctgtggttgaaatatgactgtgcctagagtcagagacatggattaaaatctactcgctaaggggcacctccaatcctcacttccagtccaaagacttggtgatraaatccrtgggtgacatcatagcaacatttttaagcaagaggtcaaaggctcacatccttagaaatgcgtttgatcttctattccaagcrtgtgtgtgtgtgtgtgtgtgtgtgtgkacacagacatactctgcgtggtgaggaaaagggtgagrgagtaggactaatggaaggtgttatagtccatgtcaatagtatcctagactgagttcagggtgaatatatggcyaggacagaaasaaggcaagtaatccaaagatggattgacacatcaaagtagagcaaaatgagtatagggacccaagagtcttggaaaggcatgcatgaagacrtttcaagtgatcagtaagatkttcagaacaaaaggaattccctgaatgagggttccggcatttgctgcagttctaaagttcagtggccaaaagcactgccatggcagtctgagagaaatgtcactgagccagctggaagcaaacttctccacaacagccagggtccccctactgatcctcagagtctagagtcatggtaatcaccttctctagtaggtaatcacacatgtgaggatgatttctgcatgttctgttcatatagcttcagatgacygacagctagggattatcagagctgacaggtgccaggtcaaataattcaaacagaaaattactctcagctttctttgcataacttccttttggcagtgaatctatcatagttctagaccagtgctgtccaatagaaactaygtatgagctayatgcgtaatttaaaattttctgatagcaacattaaaaagtaaagagaaataggtgacattaattttagtaatatgttttacttaactcagtatatcctgaatattatcatttcaacatgtaaccaatataaaaattaatgagacttactttattactaagtctttgaaattcaatgtatattttatactcacagcatatctcagtccagtctacccatatttcaagtgctygataaccacttgtagccagtggctaccatattgaacaatrcagttatagaccatttagaaaaacatctagaatgaggtataaactaataatacatcatgtaaattattaaagtcacttaagtgrtttaagtaggtatttaaatatttgttaatgccagtcattatactggtactaaggctaagagtggtaatsgaggtagacatgagcccygcccttgtagaaatcatacctttggttttttactatgcttagtacataagtaaataaaaatattgcctacagcagtgtcccttttaacaataatgaaatgtatgaactggatactcaaatggaaactgtgaatactatgtagattataagacagcaataaaaactataaaatatgctaaatgggctttatttttagggacattacttcttacccaatgactaatatatcaaaaagatgaatttcttatattatgcttttcctccaagtggaattattagaatatctttaaaggcagagaatggagcacaaaatmtttactatacatttgaygaatgactaaatcaatgtaaatggaaggctttatctttttcctgagatttctcctttggctaattyaggagaataatctctcatttgaaaattctgagtttgatcttctagtcacatgttagactagataaagcttatcttggataatcactgctttgacacaaccaaattaacatggagacatttatcttaggtataattagacacatgcccttttgttggcatagacttggaattttaacagattttacactttcagctatcaatggctatgtgcctgagagcataactactcttggattctgctttgatgacactgtccagtggcacttcygtagtgtggggacccagaatgaaattttgaccatccacttcactgggcactcattcatctatggaaagaggcatgaggacacyttgacmctcttccccatgcgtggagaatctgtgacggtcacaatggataatgttggtgagtaagagtctggacactcacagaggaagcttgctttgaatttctggtctataaaggtctgctgcaactctccaggctaccagtgctcctctatktatctccctgaccccctgcaggcttttctttcaatgtttctcatgatttctctttgagaaattaatgacttaaatggatccagttctttagtgtgggttatatttttccttctctgggcaaagtaggaagtaaaaatatacaacagcagaaaaataaggcataactctgaggaagaagcataaatattttggccacaaaagagcatttcttttatcaaaatgccctattcggttttttgcaacagtcatcttcaatcatcaggtacagtgccttaaaggctgcttcagcaacagctttggagtttgtcagactggaatgcaagtcctgatctgccaatcgattgctgtgtaaccttacacaagttacttggccacactgagccacaagtcatttatctggaaaacagtgtaatcacatctcacagagttactttgaccattaaaatagtaatatgygccaagtgcctagcactcagtagacaccaacaatggtaactattggagactcaccaagaaatctttratgttccagcaatgcatgccatttcagagattcaaaattgtcctcgtgaattattacttagaaacatctaaatrtctcttatttgtggggatagagctcatcaccatccctttaattctaagacaagatgtgctgttaggatatttatgatattaaaagtccattttattcttgattcatccctttcttaatatattttaaaatagtgagcaactatctgtgctgaaagaccttttttcccctctaatctccactaagcaayacttttgktttttattctgttaagcgagatgaacgcactggtcatgtgyttagagtyacagcaatgtcaaattgctttagaaaaacaaragtttactaaatatttcattctcatttttctctccttrtgttattttgacccagtaatcaatagktcacagacaagcagtggtccacagcccatacttgaatattcctgacgaaagtttattagaaattacctgccacaatggattattgtgttttcatgtcttttcccagacttccagatctctcttctgtctgtctctcttctgtaggaacttggatgttaacttccatgaattctagtccaagaagcaaaaagctgaggctgaaattcagggatgttaaatgtatcccagatgatgatgaagactcatatgagatttttgaacctccagaatctacagtcatggctacacggaaaatgcatgatcgtttagaacctgaagatgaagagagtgatgctgactatgattaccagaacagactggctgcagcattaggaatyaggtcattcygaaactcatcattgaaycaggaagaagaagagttcaatcttactgccctagctctggagaatggcactgarttcgtttcttcraacacagatataattgttggttcaaattattcttccccaagkaatattagtaagttcactgtcaataaccttgcagaacctcagaaagccccttctcacyaacaagccaccacagctggttccycactgagacacctcattggcaagamctcagttctcaattcttccacagcagagcattccagcccatattctgaagaccctatagaggatcctctacagccagatgtcacagggatacgtctactttcacttggtgctggagaattcaraagtcaagaacatgctaagcrtaagggacccaaggtagaaagagatcaagcagcaaagcacaggttctcctggatgaaattactagcacataaagttgggagacacctaagccaagacactggttctccttccggaatgaggccctgggaggaccttcctagccaagacwctggttctccttccagaatgaggccctggraggaccctcctagtgatctgttactcttaaaacaaagtaactcatctaagattttggttgggagatggcatttggcttctgagaaaggtagctatgaaataatccaagatactgatgaagacacagctgttarcaattggctgatcagcccccagaatgcctcacktgcttggggagaaagcacccctcttgccaacaagcctggaaagcagagtggccacccaaagtttcctagagttagacataaatctctacaagtaagacaggatggaggaaagagtagactgaagaaaagccagtttctcattaagacaygaaaaaagaaaaaagagaagcacacacaccatgctcctttatctccgaggacctttcaccctctaagaagtgaagcctacaacacattttcagaaagaagacttaagcattcgttggtgcttcataaatccaatgaaacatctcttcccacagacctcaatcagacrttgccctctatggattttggctggatagcctcacttcctgaccataatcagaattcctcaaatgacactggtcaggcaagctgtcctccaggtctttatcagacagtgcccccagaggaacactatcaaacattccccattcaagaccctgatcaaatgcactctacttcagaccccagtcasagatcctcttctccagagctcagtgaaatgcttgagtatgacygaagtcacaagtccttccccacmgatataagtcaaatgtccccttcctcagaacatgaagtctggcagacagtcatctctccagacctcagccaggtgacyctctctccagaactcagccagacaaacctctctccagacctcagccacacgactctctctccagaactcattcagagaaacctttccccagccctcggtcagatgcccatttctccagacctcagccatacaaccctttctccagacctcagccatacaaccctttctttagacctcagccagacaaacctctctccagaactcagtcagacaaacctttcyccagccctcggtcagatgcccctttctccagacctcagccatacaaccmtttctctagacttcagccagacaaacctctctccagaactcagccatatgactctctctccagaactcagtcagacaaacctttccccagccctyggtcagatgcccatttctccagacctcagccrtacaaccctttctctagacttcagccagacaaacctctctccagaactcagtcaaacaaacctttccccagccctcggtcagatgcccctttctccagaccccagccatacaacyctttctctagacctcagccagacaaacctctctccagaactcagtcagacaaacctttccccagacctcagtgagatgcccctctttgcagatytcagtcaaattccccttaccycagacctcgaccagatgacactttctccagaccttggtgagacagatctttccccaaactttggtcagatgtccctttccccagacctcagccaggtgactctctctccagacatcagtgacaccacccttctcccggatctcagccagatatcacctcctccagaccttgatcagatattctacccttctgaatctagtcagtcattgcttcttcaagaatttaatgagtcttttccttatccagaccttggtcagatgccatctccttcatctcctactctcaatgatacttttctatcaaaggaatttaatccactggttatagtgggcctcagtaaagatggtacagattacattgagatcattccaaaggaagmggtccagagcagtgaagatgactatgctgaaattgattatgtgccctatgatgacccctacaaaactgatgttaggacaaacatcaactcctccagagatcctgacaacattgcagcatggtacctccgcagcaacaatggaaacagaagaaattattacattgctgctgaagaaatatcctgggattattcagaatttgtacaaaggtttggccagttttctccttttttattctcatttttccattactgctgmaaaaagtagctactacarttcagggggataattgtgggcaaattatactaagaacagtgtggttcccctattgcaagttggcctgttctttttcctttgtcaattccaagattgcttctttaccttagatgacccctggacaatataagaacaatcactgtgagaactctataatattctgtaattaagcatttttctgtgtcctctcctcttactacccatgtttctactgactcttattgctccaggcagagcccarcctatccatagctatatgctaatcaatatgatttaattgaagttagcctcaaatccaaacycaaatatgatgtagaaatctcctttttgcatttacttgtttagatcagaatttctaagagatccaaatcccttttttaaaagaatatttacaattcagttttgcttasgggtagaaagccatgttgaactgggctctttgttctgggatgaagatacagaaagagaagagagaggaggaaaggagcaaggcttagtcaactacaaattctcagggatatagcatgatgactgtgcatcagctgtctagatatgcccacagcttttactaaagctgttacactaatcacttaaaaaaccaaagtgtaattacagtaggcaaacacaatgtatggtgtgacttatgcatatgagttcattaatctgatgcctgacatctccacattagaactctgtttaaaacaccttttcctatgacttcctatwtaaatgttgcactcaataccacatgagaacaactagctacctgagtatttctaagcaaggccccgagggagtgagatgcagggcctgtccagagtgaatagggatggaaccaccttcaaaatcttgtattccattcaaggctcacaacccacttttatggcaktcggagttgctttacccactcccttgtgttctgtgagtttgcatgttatgctcagagtctggaaagatgggattagtaggggaggtagaccagaagaaaggcagaaggagattctctgttgatgactcacagtatatagcaaatattatgggtttgatgggtgagtgtttggcttgtttccacaggcttgggaaatgtgagagtcagtgggagaattcgacatgcttcagtcctagactgagccaatgaactagatggaaataatgtgctttatttatttatttataatttgtaattaaactttttattttggaacaaaaataaaatagattcacatacagtcaagagaaataatacggagagatcctttgggtatcctgagtattctttacccagtttctcccaggggtaacattttgcaaatctataatactatatcacaaccagcacactgatgttgatactgtcaagacacagaatgttcaccatcaccataaaaatccctctcattacccctttatagtcacatctgccttcctcccaccatagcccttccttattccctggcaaccagtagtctgatctccatttctrtaattttgtcatttcaagaatattacataaatggaatcaggcaacatgtaacctttggggactggtattttttcactcagtataattctctggagattcatctggttattgcatgtattccattatatgggtgtaccmcagtttttttgttgttgttgttttatacacatttatggtgtaaacatgatgttttaatatatttataaattgtgaattggctaaatcaagctaattaacctatgcattacctcacatacttttttgtggttagaacacttaaaatgtactcagcaatgttaaaaattcagtgtgttgttattaactacagtcaccatcttatacaacagatcttctaaatttatttcttctaactgaattttatcttttgaccattttctcaatgctccacctctgtatccctttgttaaccactgttctaccttctgcttctatgagctcaatgtttttagtttccacattataagtgagatcctgcagtacttgtctttctgtgcctggcttattttatgtaacataacgacctcctggttcagtcatgttgtcacaaatggcatttcttcgttttcttttttttaaatgctaaatagtatttcattgtttatgtagatcacatttaagaaatccattcatttgtttatagacatttgggttgcttccctatcttggctaatgtggctaatgctgcagtgaacgtgggacagcagatatctcttcaacatactgatttcattttctttgggtatatacccaaaagtgggattgatggatcatgtggtaattctatttttaatttttaaaggaacctcccatactgttttccataatggctgtactaatttacactctcaccaagagtatacaagagttcccttttcttcacatccwtgccaacatttatctcttgtcatttttataatagccatcctaacggtgtgaggtgagccctcattgtgattttaaattgcatttctctgattattagtaatgttgagcatcttttcatatatttgttggtcatttgtatgtcttcttttacgaaatgtctattcaagtcttttgctcattttttaatcaggctatttgggttttttgctgaattgagttccttatatttttaatattaatattcttatcagatatctggttttcaagaatattctcccattccaaaggttgtctcttcactctgttatttcctttgctgtgcataaacttttgagtttgatggcaatcccatttgtctayttctgcttttgttgcctgtactttcgaggtcaaatccaaaaaatctttgtccacaccaatgtcaagaagcttaagaataatggacattagcaaaaaacaaatgtgagaagagtggctacttttagggtacaaaacattcacccatccagtgactttcataagtgtgaccttctaattaatctgaccattgtcacctgatagccccaagctctggcactgtcccattacatggctttgtctgcctttgatcttaaaatttggtgtgttaacatacgattatatttatacattcatttatatgtttgacaaaaatttattaagttcctgctgtgtgtcagataatgtgcttaccactggagagagtactatgagcaaactaggcacaatggctgacctcatggcacttatacccagtgagagacagatattaatagataatctcacaaataaattatatataatctacaatatataytctagagatattataagaatactacaggaatttactatatatactataataatactatagaaatatgagaaattgatatagagacttgacctagtctaaaaggtcataggaagacttacctataaaataatatttgagttaggaattgaaagatatttactggcttttgtttttatccacttatatatttactcatttatccaccaagtatttattaaagaccttctctatgctagatgctatatttagaaagagacaatttcctaaattctgggaacagtctttaatttcttcttttacacaaatagtattattatttcagggaaacagatattgaagactctgatgatattccagaagataccacatataagaaagtagtttttcgaaagtacctcgacagcacttttaccaaacgtgatcctygaggggagtatgaagagcatctcggaattcttggtcctattatcagagctgaagtggatgatgttatccaagtaagtcttttgagcactgctaagatcttcggaggaatttccacaagcaccagagggttgtaaaggtgcaggtggcaagagagctataggtgatttgtttgttttccaggattaatgaataattacatttcttttcaaagactccttgccaagcaatttggcaatcttcgaactaaaaaaaaaaaagatctcattttttaaatgctgaaaactatataatctgtggaaaatctttctgtaatttctatctaaagctaacctatctaaagttaacacagaaaattaatatattcaagagcaattgaattgggtttcatagcagtggtggtggtggtggcagtagcagtgctagtagtaatagtaatttagaaatatcttcaggtgttttcctaaaaattaaataaaatgaagttaaataaaatgagtaaggaaagtaaagatgtctccaygccctccaaaagtgagcaagtttcttcagtgtcttcctagttctggtaatttctttcaaaatcttgtgtccagacccacgattataacttgcttttataacaaagtttacttccgccatttttgctaaccgctcacrttcaaaaacccagaaagaaccctgattctaaagtaagctattctagattttaaaatataatctactatacctgtgtaagcattcactacattttcagtgaccatttgctctttttaaaaacgtaaacaagtacatagggatataagaatcttaattattctaaattttccatgaagctatgggaggcaatattctcttttatgattaggggatcctttttcaagatgaacgataatttaacacaatatttaaaaaacttattctaagtaactcaggaatcaaaaaccagacactgtatgttctcacttacaaatgggagataaactgcrggtatgcgaaggcagacagattggtataatggacattggagactcaaaagggaacgggggatggatgaaaagctacctattgggtacarggtacactactcaggtgacaggtacactaaaatcctagacttcaccactatacaattcatccatgtaaccaaaaaccacttgcattcctaaagcaactgaagttttttaaaaaatttaaaaatcaaaattaatgcacgaaagccacaataaacaaaacctcacaattgtgaataaagacaggataagtaacaatgttgcattgagacatactggagccttaggcaaaaggaaaaaaatcaaatactgaatctttgttttagccctggatttcactagataaaaatgacttcatttgtgtatttttaaaataattttaacttttattttagattcagggggcatatgtgcagttttgttatctgggtatattatgtgatgctgttgtttagggtatgattgatcccatcatccaagtarmgtgcatagtacccaatagtttttcatcccttgctcatctccttccttcccccttctagaagtccccagtgtttattgccatctttatgttcatgagtacccaatgtttagctcccacttataagtgagaacatgtggtatttggctttctgtttctgcattaattcacttagcataatagcctccrgctggcatccatgttgttgcaaaggacgtgatttcagtctttgttatggctgcgtagtattccatggtgcatatgtaccatattttctttatgtagtccaccactgatgggcacctagattgattccatgtctttgctactgtgaataatgctgtgatgaacatcctagtacatgtgtcttttcagtagaacaatgtattttctgtctttctttcttttttttttttttgagatggagtctcactctgtcgcccaggctggagtacagaggtatgatctcaactcactgcaacctctgcctcccaggttcaagcaattctcctgcctcagcctcccgagtagctgggattacaggcacccaccaccatgcccagctaatttttgtatttttagtagagacagggttttaccatgttggccaggctggtctcaaactcctgacctcgggcaatctgcctgcctcagcttcccaaagtgctgggatkacaggcatgagccattgcgcccggctgaacaatktattttcttttttggctatatacccagtaatagaattgctaggtcaaattgtagcaggacaagccacagacaaaaacccctcagacaccaagttaaagaaggaagggctttattcagccgggagctttggcaagactcatgtctccaacaaccgagctccccgagtgagcaattcctgtcccttttaagggctcacaactctaagagggtccacgtgagtgggtcgtgattgattgagcaaggagggggtacgtgactgggggctgcatgcaccagtaattagaacagaacagaacaggacagggattttcacagtgcttttctatacaatgtctgtaatctatagataacataaccgattaggtcacgggtmgatctttaactaccaggtccakggtgtggcgccgggctgtctgcttgtggatttcatttctgccttttagtttttacttcttctttctttggaggcagaaattgggcataagacaatatgaggggtggtctcctcccttaaaatagtagttctgtttcaaattctttgagaaacccccaaacttctttccacagtggctaatttacattctaagcagcagtgtataagcattcccttttcttcacagcctcaccagcatctattttttgactttgtactaatagccattctgactggtgtgagatggtatttcactgtggtattgatttgcatttctctgatgattagtgatgttgagcatttttttcacatttgttggctatttgtatgtcttcttttgataagtatctgttcatgtcttttgcccactttttaatggggttatttgtatttcgcttgttcaattgtttaactatcttatagtttctggatattagacctttgtcagatacatactttgtgaatattttttctattctgtgtctgttcactctgtagatagcttcttttgctgagcagaagctctttagtttaatttgtcaatttttgcttttgttgaaatgcttttgaggaattagtcataaattctttcccaaggctgatatccagaatggtgtttcctaggtttttcttctaggattcttatagtktgaggtctgacatttaaatctttaatccattttgagttaatttttgtatatgatgaatccagtttcattggattcattggggttcagtttcattcttccacatatgggtagccggctattccagcaccayttattaaatatgagtccttttccccttgttttttgttgttgttgttgctgttgttgttgactttgtcaaagttcaggtggttgtaagtgtgtggctttatttctgggttctttattctgtttcattggcctatgtgtctgtttttgtatcagtaccatgctattttggttattgtaactttatagtatagtttcaagtcaggtactgtgatacctccagatttgttctttttgcttaggattgctttggctattcaggctcttttttgattccatatgaattttagaatagctttgtctaatcctgaggaaaatgattccagtagttgttaaaaaatagtgttgaatctgtagattgctttgggcacaatrgctattttaacaatactgattcttccaatacataagcatagaatgtttttccatttgtttgtgtcatctatgatttctttcatcagtgttttgtaattcttcttatagagatctttcacctctttggttagatgttttcctaggtattttgtatgtgtgtgtggctatgtttaatgggatttcgttcttgatttcgctctcagtttgaacattactgatgtatagaaatgctattttgtacatttgtacattttattttgtataattgattttgtacattaatcttgcatcctgaaactttactgaagtcatttatcagttcctggagcctyttcatggagtctttagggttttctaggtacagaatcatattgccaatgaagagagatactttaacttcttttcttctttggttgccttttatttctttctcttgcttgattgctgtgactagaatttccagtactatgttgaataagagtgatgagattgggcatccatgtcttgttccagttctcacggggaaggctttcagcttttgctcattcagtatgatgttggctgtaggtttgtcatagatggctcctattagtttgaagtatgttccttcaatgcctagtttgttgagggtttttatcatgaagggatgttaggttttatcaaaagctttttccacatttattgagatgatgatactgtttttgtttttaatgcggtttatgtggtgaatcacatttattgatttgcatatgtggagccactttgcatcctaggaatgaagcctatgtgattgtgatgaattaatttttaatttgctgctggatttggtttgccaatattttgttgaagatttttgtgtctatgtacatcagagatattggccggtagttttcattattcattgtgtctttgccaggttttgttattagggtgatgctggctttgtagaataaaataaggaacagacaattagggrgtctttaatcactagaagttatagaagggctgggaggagcttcatgggtctgactgctggggtgtgaagacttctcatatggcatttaagtcctttaccatctggccccaacctgctccttttctascctcatttctcaccaggttccacctgtccctgtgcatttcacagcccagttccaccgagatccttgctattccccaaactcttcctttactcccctgctcacaggcatccttctgcccttctgagagtctgaaatgtctttctagctcctgttcattctatgatggccaattccatttcctctaagaaacttaccttaattcttccaaccactcctaaatattcaaccaaattgttcctccagggcattgtcatctgaacccacttagactttgtatatagcacctgttgtctccagatttgtagtgtggatgcccatgtgcatgtctgtttcagcagkagcttaaaagcttcttatgaacaagaatcaagcttctttcatcttcacatctccactacctatcactctcatttcattagtagataatgtcagtactttagccttgagyctaagaacaaatatcttttggtatttctggagaaaactacttgggccatatctcacaggatggttatgaaaattaaatgaaataatatacataagttattttgtaccttatatcttagctccgattttataaycagccattttgacttataatgctgacatttttgtggtttagatttttgttaagcttaagtacatttgtggatcattccttttcctaggttcgttttaaaaatttagcatccagaccgtattctctacatgcccatggrctttcctatgaaaaatcatcagagggaaagasttatgaagatgactctcctgaatggtttaaggaagataatgctgttcagccaaatagcagttatacctacgtatggcatgccactgagcgatcagggccagaaagtcctggctctgcctgtcgggcttgggcctrctactcagctgtgaacccagtaggtactttcattgaaagtttttctcattcccctaacctcgtaatctgaagtccaccaaatggaagagtcrgggttatttcttgtcaaatgtctgtcttgcttttcatgaggaatgcataagggtgtggttaacagtctgcatttatcataaccagggactctccatgcagctcttcagatgacagagagagaaacatttattcagtggagaggaggaaagattacttgaatgattggccatgaattagaatgcctacatttacagaagatggcatttatttgaaattttcttgaacaagtattagctatgttctgctctttctttrtgaaaagaactgcaaagtcaagactcctttatctgwcattctgcaatgtatatatacttcaaaacaatatgtcatacacagtatatgcatacaattttatctgtcaattaaaaagagaaacaactcctccatttcaggcatagtggaaagagcacagactcagatttaaatttttaccctgtcaatgcataatcctaggaaattccttgacctctcttagcctggtatcagaagttaaaaatgagataacagtacatagtgcatggtaagcacttggtaaatatttgttcaatgaatgaatttatatttaccakataagatagttgtcaggattaaatgggagattgcaggcaaatcatttaatatagtaatagattctcaataaatagtatcccttatattatcaatttattattatcatcattgttactgggataaagatcaatcagaggaaggaggattatgaatacaacagaattaggtgataaatatccaggcttattaygccattcatttataatcttcatcttcaaattcagagcctatcagaaagtttccttttctatatgatgagtgattatcagaagagcaaggaaattcctgagaaagaggcaatacaatttactctgtttttccaggaaaaagatattcactcaggcttgataggtcccctcstaatctgccaaaaaggaatactacataaggacagcaacatgcctrtggacatgagagaatttgtcttactatttatgacctttgatgaaaagaagagctggtactatgaaaagaagtcccgaagttcttggagactcacatcctcagaaatgaaaaaatcccatgagtttcacggtattttcctyrgactttgatctaatctcctaattaaatcacactgggtcacagtgatttctgcccttagatattcacaagattagacatgagatgcttctgagacacccagagctacaactaaaaccrgttccttaacattccagagggctgatgtaatctggcaggtgacactgtgggtraggcaaaaagagaaagtctgaaagatagcacagagaagctgctgcaaaacaaaccaacagaaaaccacaacaacaaaaagccagtgtgcttcagctggtaacatacattgaaaaggaattaacattgttctgcaatttaaagttaataagcttgtttctggatctctaaaggcacaagtgtttatataaaagaaatgatcacctgtgtgtcttttctaaaataagaatgaygctaacagttttagctctcagcagctaccaggtggcacccaaagcatatgagaacaaaatgagataagaaacyaggtacccaggtaataggagaatagtggcaagagagcatttgggtggtcacactgggaaaagtgtgcctatttggaaattcacaaggaaaatttgccctgtaagctagtaactgaaacagraactgagaagagaaaggtacgagcttgtgttatgaatatgtagataggtgttctcacrcctgatataatttgaaggatgcccaaatgatctcaacccgtccctctccaaaaattcacctgcctggtttctgaaatttcacagcagttcctctaacttaagaaggaggaaacaaagcacttccytcactttggtttcagttaaacgtttggtaacactaaactttatctttacagttttgtgttacatttttaaggtgatcaagtttctcaggaactttttaaaaaatccgcgtattttactgtggggagagtmgataaagcctgagaaccctagttatctaatctgagaagtgggcaraggagttgtcataccaataagagaataaacaygacttgctatggttgctggatacaccaaygataaactcctaattttataaactcctagacttcctaatttgcctgaaactttctctgaatttagaaggccttaaggtgacatgctgcmtatctccttgctgactctaatccctggagtttactttgtctgcccatatttgtatttatcttttgtagttaaggaaaattaagactgttaatggaaagtatacacgggtaaagcacrgaactgtaaaagctgaggaaaagagtgataaactgcttggaaagggagttccccctgccttctgctgtaggctggtgtgaatgatatgagaaggactagtggttctgctttagcctctcactaatgtgacatacaagagggccctttccatggctaggtaggcctgggaatgcagaatcatgaggaacatgggtgttgagtgggttgccccatatttccttaccactcgccctctctgtgtcaacagatttttaattgatttcaactctttgtcctttcagccattaatgggatgatctacagcttgcctggcctgaaaatrtatgagcaagagtgggtgaggttacacctgctgaacataggcggctcccaagacattcacrtggttcactttcacggccagaccttgctggaaaatggcaataaacagcaccagttaggggtctggccccttctgcctggtaaagattgggtaatgggaagaggtccctgctaagaaatacagggaaaaggcaatctgtaactccttctcatttcttccttgtgcatatacttcctaaggggtcagaacacagggttctggcatagagcctaggcaaacccatagacccaaagtatatacggagtacaaaaatgtcacctaatttatgaactatttgcagcaccacacaggctaaatgtgtgacccaactcagttgcaacataacatgcagtttctcccaagccactgtrtgtcatacagatgaggtcttaagcagatgaaaaaatgaatcccacagggctcaggcagctacagctatctctgctgggagggtttccagattcttcagttctgctcctcttctaggccctatcaccctaatatctttgggcaagtgactccaggaatcacattcttaaactgacttatagactgtttgaagaggaaaacatttttaaaaaataataataaaagttaaagaataacaaaggtatttagaacttttcatgtgcaaaataaagataaatgtagatttaaacagtctacaattatacagaagggatgtttctgtgccaatgagttgtttgtaagtgtatctacttgtgcagcagtataaaaacctaggaagtcagttaaaatgcagatgtgaaggcagagggattttgttctcagagactttaaagtagattttgggcagaattccaaggagtctgtatttttaacaagcagccttccttctattttgccttctattaaaagtaatggcaaaaaccgcaattatagtttgcaccarcctaacacatgctgcctgaggagttagtgaaggcagcccctcracagcactttgggtgacgttgtgtgaatctgcctcagatgcagrcacagaagtccaaatggactggtttgattaagagcagggaaraaaagagggttcttattggtttttcmcatgccagtaactcactaatacatctagagagtattaattgtattatattaatatcatattaattaattaatataataattaatagataatttattgtattaaaatcagagacagaagagattcagtcaaatttactcatcttttcatcaagtattagaagatcagtcatccttcctatcagcctgcagacagactgagaagctaggattggctggtgtctctaaatctgcaaacctaaatacctgcattggagagaggaaaactggagacatttttcagtgtgtttgaggaagataatcatatctattcattttcacccacaatctgggaaacagtcataaattatagtcaacagaatttaaatattaactgccagggggtaatgttaaataccagaatkgatagccagaggttttagaaatctcattctttcagtgttttttctgagcaatttatgtaaatctctattcaaatatgtaagctttatggaaaacttgaaaacatggaggaagaaggttttatttttattttcttatataaaaaagagaaaaaagcaaaaatgaaaagagggaaaggaaacatgtatgatatttttgaagcccaatgatgtcattsgaggtcactttgataattaggactgtgaagctgtattgtatgtgagttaatttgtaacattatatttagataagtgaaagtttcttctagtgaggtgtggtggtgatttaaaattttttttagttatctctgtgtrtgtgttgttattgttttgtttttatctgttatactttcagtcctacctaaagaaaaatggttaaattctatttgaaagcctcttgtgaagcaggaattttaggattcttagagaactatcaaccmcaatatttacttgttaatttttgcaaatgtaatgttgttctttttattttaggttcatttaaaactcttgaaatgaaggcatcaaaacctggctggtgrctcctaaacacagaggttggagaaaaccagagagcagggatgcaaacgccatttcttatcatggacagaggtatcacaagagccatgtgatatttggtttggcaggagagtgcctattactagaatattaccaacttttagattggaaatattcaactctaagaactctgatgtgacaaaggcataatttgtagccataattgctttyattcyggcccatggtctgattgcattgaaaacacatcagtcagatcaaaagcattcctgtcaattgggaaacctgtgtaaagcatccttcttcatgacttgtgatccatggacaagtgcatataagaaattttccagcttccaagagttgaggagggaaaaggtcacaggaatttaacaatgactgagtcacyaaacttgacatttcagcatttaggaaacacagttttcatctgtccatctgttcatccattctttaagccattactaagcactgttgagtatgaagcactgtgccaacatccaggtagcacagtggctggtatcccttccttgatcaagatataaataaccttgtaactttgaggtcaacttttgagaacatagtctcatcaggrctagaactttttttcatatttttatattttgtatttttattttttttgtagagaagaggttgcccaagatcaaactcctggcctcaagtaatcctcccccctyrgcctcccagagtgctaggattacaggcatgagccactgcacctggccatggatggtacctaatgttgtaaaatagcataatttaagataaaagcagragaaaatcagtttaaaaartgattacatttcaggatttcagttgctttcttctaggatgccactatatctattaaagcaccagtcttgttagtgcatttaccattttataatcagatatatttaagtcagggccacacaaggtaggtaaaaatatctaattattgagtcagaaacataatccctaaccatggagttttactttattrtatatattttrtaagcaaaaattattcattttttttctgtttttcatagactgtaggatgccaatgggactaagcactggtatcatatctgattcacagatcaaggcttcagagtttctgggtaagttgtagcaccatggtctgtgaatggtaccccctacagttgtgcagcatgcagcctatgaaaccatacatgacaatcctatctatgaatcagtttttctctttatgcttttctctackacaatgtagtgaagcagctccatttggggtacatatatggtaaaggaaggaacactayggtaggagctaaaggcctgttagtgtgctcttaacactgccacctcttctggtgtataatgatcccaaagagtcttttccaggaaaaaccgatagctgggggtcattgatttctctacataaaaagcccagcctctctgcagggatttggcaaggatcagataccttastcttatgaccacrcgcccatttccaaaactctcctcagtcatcttttctgggtttgaccacacatgtagtatttcagccagattcacagggtcttatcagccaggcattatagtccycattaatatggccctttgcctgtggcaaccattcatctattcagaaaactttgttgaacctccactatatgtgaggaactcctccaaagttttcccacactgcctcaaagcccttcccaagatcaagaggtcatgatcaagaggatgatgaggctcccatatacccttccatgtcttcctgttaggcaggcacattcagcattaggaatataaacacaacagaaaaaatcaaacatgacctgtgtgcaagaaaggggataggaggtggttggcagttgaccaaacacagacctgaagcccagatttcatcatcaaggactggcctagtagctgaggcccatgcctagactcctgactacaacacaggtcctccaaggatctggttttccactggattaaactcacttgagaaattgctgggtttttaaaaaattcagaataaatctttttcttcccttgagtttaggttactgggagcccagattagcaagattaaacaatggtggatcttataatgcttggagtgtagaaaaacttgcagcagaatttgcctctaaaccttggatccaggtttgtcttaatagactgataatatttactgctatcgtaataataaaaatgaaagtgatttagtaattccttgttattgttcttgcaatgttgttaggggaaatagcaagtactaagtgtgaggcactgttctaagtactttatatccttaaaatcaaccctctgaggttggttctaataatatcttgttttatagattaaaaaacaaaaggcacagagatactacctaccttcccaaagtaacacacagctaattagtcattgagttgggattcaaatttaggtactctgtgcccaaatatgaattgcatgtagtcattgtatcagtttgctaagatcttatgtgctagctctttagttctraagaaagctgattgtataatgaatttaggcagtgtgtgacttgttgacaaggacagttctrtttactggctttcctatattgcaggtggacatgcaaaaggaagtcataatcacagggatccagacccaaggtgccaaacactacctgaagtcctgctataccacagagttctatgtagcttacagttccaaccagatcaactggcagatcttcaaagggaacagcacaaggaatgtgatggtttgtgtgcatatttctatctgaatctctagactctagacttggcctagaattattatgactatacctaatgattatgtattttaaaaaatacctttctgggtattagaaatgtgaatggctttctaagggtcatatggagaaaagcagtaatatgataggtctgtgtcttacaaattaaagagagaagcagggttactgaaacttcaaaaccccacaaaactttaaaaaatcattttatcatcaaacaaaatacccagatttctcagactggccaatggtatacggcagagtagaacatctggtcttgcrcctcaaggagctcatgctaaaarttggctaccaagacttttgattttactattgtagtttgttttgttctttatttcagtgtacctgaagtaaatagtagtgttaatgctagtaagcctctgaggcagtgtgattctcagactttttgkggggccatgcctgaggaatgacattctccttctggttcttccaggggctcagccataagccctaactcttctcctcctctctattcccttccccaaagaagtctgaatgcaaggagtctgcctgccattattataccaataaccttgagtctgtttctgcttatattttatatamaattatttactgtttattagttacctatttttaataattatttatactatgtctcagaaccattgaaatcctaaattatggttcttactaatcagtattatgagagaaaacacagattgcagttgagtccatagcataaagattttgtcgtctatgttcatgagaggatattggtatatagttttatttttttaattgtctttttctgtttttgataccacagttatactagctttcataaaaytggtaagcatgctcttttctacattctaggagaaaatgtctgcaattggtaataattctttaaatatttggtaggaatcactagtgaaaccatctgggcctgcagatttctttttgggcagtttttaaattacagatcctatgttctaaatagttacagggctattaaaattatctatgtcatattgggtgaattgaaatactttgtatatttcaattaactgstcaattccctctacgttgttaagtttatatgtgtagagttgtttgtatattcccttatcctttttcatgtttgtagtgattttgcctgtttcatctctgatattgtcatctgcccctcctttcttttttgtgtgaatcttgctagagatttktcgattttaaaaaaatcttcttggccgggygcagtggctcacgtctgtaatcccagcactttgggaggccgaggtgggcagatcacgaggtcaagagatcaagaccatcctgaccaacatggtgaaaccccctctctactaaaaatattaaaaaaaattaggcagggtggcgtgcacttgtaatcccagctacttgggaggctgaggcaggagtatcgcttgaatccggaaggcagaggttgcagtgagccgagatcacgccactgcactccagcctggtgacggagtgagactccgtctcaaaaamaaaaaaaaaaaaaaaatcttttcacagaaccagccttgttttattgatttttctctattgtttttctgttttcagtattaccgatacctgctccaatyttctgttttaaaaagttggctttttctgacattgctctgtcaggaaaaggggtagggcacagcctgtttactgccaagtgggggtcaaagtccaggttccccactccattgccacctaaraagggattgttccttggtggctgggtgggaagggaagttccccatttggcmtccactgayactgcaggggcaggagcttcattaggggctggagatgaaagccctaaatccctacatggccttttctgacacaaccccagtgagggtgtagggtgcctctttagcctcaggagcatagaagtctaggctccccattcagcctttgctgttgtgggttggggaggggcctcaggtttttctgtggtgtttgrctaaaggasagaagtcagygtccaccagttttctatcatatctcgctatgctgccctttactggtactttggttagagaaagcagattttatttgggctttttcagtctgtactcattggtgtttccaggttgccggcttcttcatctctaagtctgggatttatgaggcaaaaagaaaattcaagacactgatcaccattttgttccttccgagaaccctagccagtctgtcttctgagctcttttcagggtcttatgtttctctgagctataatgtccaaagtttttagttgtacttagcaggaggaatagggcaaagtacatatatacaatcttcctggaactggaattatccccaagtatattttataaccaaattgatttagtttggaccccatgaaaatgtagtattacaatattaaattagatcaaaattttaatataaagtcacttyatagatcattgttacataactaaactttcctcttttcttctagtattttaatggcaattcagatgcctctacaataaaagagaatcagtttgacccacctattgtggctagatatattaggatctctccaactcgagcctataacagacctacccttcgattggaactgcaaggttgtgaggtaaatggtaaggtacaaagatgcattattttctcactgccactcaaagaatcaagatttgggaggtataggagaatgagtagaatttttagttcttttcagtgacttaggctcctaggaaaacctttgtgaaacagaggttctactcaggtaaactctcagtgtgatctagaccaagartggttctgccartcagagtgccgacagcatctctgtgaagaaagtgcctggattatatagacacatcacaacyctccaaggaagggctctaatttsgaattacctccrtcagcccattttcaataagacctacctgagattcaaactaggcctgactcttccaaagtcctcaggtcactcaaacttcaatgtcatgacagtatctggcaacatcactgccatatatrtggtgttcaatgagtgtttttgaaatctgaattggcttcccaacttcctgaaaccacaattcttctttatattttctttcataccctgtgtaggtactcaagtcttttctatgttagctgctatttctcaggggctgtaatgtgacctgtggtayaaataaatccaggtaatcataaatggtcataataaaattctactatatatagcaaggatgtttaagagtcttaactgttcttcttggactcttaaagcagtgctttccaatattttttacttcaaagcacacaaagaaaataatatctgcctggcattctgaggtaaaagaatgaagcawtaaatctaaggcttggctgatccaggccccacttggctgctgaagggctggaggtgggaagagggatcaataaataggtgcactagaaacctgccrtgrcacacctgtcaggagttgcagtacttccctttgggtggagagaagccaccatgattcacaatggagaaagtagctgaaacctggaatcagtttcctgttgaagcagataatggcacagtatacccttggatggatatgrgtattttgccaatgtccagatagcagtagtctaaaacatctcccaaataaaacacagatcttgtatcggcaggaccactccttgaaacagttccataagtcattgcgtttttttctttccrtatggtataaatagatttgttcagatcctaataaactaccctaaaatgtgacattcaattctgctaacttatttaaaacatctattttttatacaagaagcattattttcttcttattcattttcttgatacttaggtaattattagcagtgggtattatttttaggaccctttgtttttttcatggagaaagtaaggcatcacttcaagaaaatttctgcatgatttaccaacaagaacaaagtgtcacagagatgatgggtggtcagccaggttcactcactagctgtgtttcttacagtcacaggtctgccttgctgcctatgatattcaaattacaccttggaaaaattccaaagggtacataactcgaattaccctctaagggttgaaacagaaaatattaaatagtgactgagggtccattgtatcttcttggtagcttttgttagaagaaacagagtatttttatatatagataatttaggattattgtcacctgaaagcaaagaccaaagtttccaagactctcagaaggaggaagtgagtttaaatgtttagaacatggtatttggtatcagattgtctgaactcaattcagtttctgattcttgtggctgtgttaccttagacaagttactgtgttttggctgtactaaaatggagatatttatgagcattatataatacatgtaaagcctgagaacagtatttggcmcttggattcaataaatcttcattgttgtggttattgtttttgtcatttgttggtagtaatattatttcttatctcctctgcagtgcatgaagccatgcagggaatattggtgtgtaattaatcamgttacttttcttttgataggatgttccacacccctgggtatggaaaatggaaagatagaaaacaagcaaatcacagcttcttcgtttaagaaatcttggtggggagattactgggaacccttccgtgccygtctraatgcccagggacgtgtgaatgcctggcaagccaaggtcaagtatactctatgcatggtgttctcttagggctccagaagaaagcaaaggccctcactaccacaaacatggaggatctgggaagcaggagtattttaatctgtttctgcagattaaaatcctaggtccaagagtccaggatgtctgtggacttgatagctttgactataactttgtctcagagagaagtcatttatcatctctgtggtttttggtctagtcttgatttaaaccaataataagcaaattaatttttctgcaaagggatagatggtaaatattttagtctttgtgggccatacattctctgccataactactcaactctgccattgtagcagtaaagtagccataaacaatatgtaaatgaatgagctggctgtgttctaataaaactttgtttacaaaaaacaggcagcgggccaaatttggcccatggatcatagtttgccaactcctcatttagacagcttacattagtgataaaaaaatgatttagatttgcaacatcatctcttattttttctttacaatttagcaatattttttcattttcctaaatgaaatgtcatctaaacttttttgttctcttccccgccctccttattttaagagctttgtgatattccttgaggcaactagaagcatagtaaaatgttgcaaaaccagagttataaaatcagtgatctaagttaaacaawcaccttccagagagttatactgtccctgatattagcccactgagtaattcaggtgatttaatttgggggtaactcttaatatttgactcatttttattaattctttaaatgacctgagatatcagaatggcatgaataacttgatgatcccttcagccaactaaatccaaattccctamtttctatcctcatatctccctcccttaagatacctacactccaatttcctggctttctatagaattccagggcctatccttaaattaggccactagaaaggaaaaaagaattgtggtgctggtggsgtaaatagaaaagattggattccacacagtcttgggaactgatatctgtgtcttgaaactcattctggcccaatatggaatcacagaatgttacagtagcaaggagcaaagcatctggtctagatttttccttttaattstaaatacacaggagattaaataattttagcttagtttggtagcagaatcaggactagaatcccattctcccagtaaacaggccatgctccttccaccatttgaagcagcccaaatacctcattttgcaattttgcagagggcaaagctgacacccagagaagttaaaataataaaaatagtgttatattacatttatataatttacatagcaatataaataataattaaagagatgttatccaattctttttcagatgactctttagacttgttcatggtataaccttgtcactccatacttcattttacaatcttttaaaaaaatttgcactctctataatttgctcttagtctttgtsatataacaagggyctcaaagataaaatgctaatttttaatggtgtcatttcaaagttagaattcgggatcagaaatatgtgttttacttaacccccttccattcacatgaaatgtctttatatggtctctttagagaggttgaaaatcaaagctggacatatgcagtgatgcacatagatgctgttctctccataactaaaatgtctctacctcttttatgcctgtgaaaacctctagctggttatactctgcatcactggtacaaccttgatatgaagacwcactaagataccacccagatgtcactagaggatgttatagacttaaaagttttctcatataatcattctaattcagttaatttgcttttaaaatacatatagcatgtgaatttttgtgtatacacatatatacacatacacctatatatacacatacacttatgtatgtgtgggtgatgttgaagaaacatatcaatattwtttcctttagaattgaatgaggttatggtagrcgataaatctcccaaaggtaaaaatttatcttagatgactctaaaactcagtttagaccttctgatctttctccaaacacatatcaccaaccatgtgattaggcattttgttaggccagagacaggacaataactgtactgygtatcaagctctacttatggttttatcaggtctctcaaatgttacatttatttgaaatattagaagaaattgaactatttctgmtctttgacattaacagggggaaagagaagttgtgttttgtaaaacaggtgaaatagagagagaatgctatccaattatttcccagataaccctgcagcaatattaccagagtatttaaagaaatttgcttaagaaaataatattcacagataatttagcagtttaattatttttccaaataaagctcatttattcattcatttattcaacaactatttattgaacaccaactgagtgtcttaacattgtggtgagtaccaggaaacaaaatgaaataagcctctacccttaagcagtaaggaatgctaagaaggaaacaattatagtacaatgtgtgaaatacttcaataaaaatttacacacatattgtggcaatgaagaagaaagagggaaagcttctaggagactgtgaatcctaagggataagatagaacaaaatccttttgagctctgtgcttttttgcataacttggtctaaaaaaaaagcaaaggttttaacmtcttccttatctatgtgtttttgtcattttcrtaggcaaacaacaataagcagtggctagaaattgatctactcaagatcaagaagataacggcaattataacacagggctgcaagtctctgtcctctgaaaygtatgtaaagagctataccatccactacagtgagcagggagtggaatggaaaccatacaggctgaaatcctccatggtggacaaggtagagtggcatctgggcaaagagaaagcaatctgaagactgtgctataatgagaataacagtattttgcatttgacaaatatgcagtgacatgtaccacctctttaagtcttctaaatcttagttcttmaggtgcctggtctcagacaaactcctggttgtctgttttggtttgttttatttctcactacaccaggttgccctcataggaggataaatatcattgtcataaaaaaaagagtgattttatttctggtgtgtgtaaaccttggggaacttgctgatgatggaagggggaaagttatacamtttagttgaggatataaggtacatgccaacaagaataaataaattaaaatgcatggtcacattttaaatgttagcaatagtcaaacatttattggtggccacttcctggcacttactatgcacttaygttgacatacatttttaaatatttacaatgacttctgtgaggtaaaatgttattatccttattttgccaatgaggaaatgaagaatcagagaataagtaacttgttcagtcatacagctaatacagacgggctgaaggcagaaatggttttgcagctgctccacagcaccatgtgagacttgtttatttttcactaatttaagtcagatcactggtgagatgaaatctatctggcatgtgatttcataactgatagaggatcatctctgtgagagtgttctatgtgttctttgatatgctcattttgagctaataggataaaaaattttctgggttgggcatgatggctcatgtctgcaatgccagcactttggaaggctgaggcaagaggattacttgaraggagtttaaggctgcagtgagccatgactgtgccactggactcaagcctgggcaacagaataagaccctgtctaaaaaaamacaaaaacaaaaaaccttagccatttatgttgtcattaaagattttctcttatttggctttcagatttttgaaggaaatactaataccaaaggacatgtgaagaactttttcaaccccccaatcatttccaggtttatccgtgtcattcctaaaacatggaatcaaagtattgcacttcgcctggaactctttggctgtgrtatttactagaattgaacattcaaaaacccctggaagagactctttaagacctcaaaccatttagaatgggcaatgtattttacgctgtgttaaatgttaacagttttccactatttctctttcttttctattagtgaataaaattttatacaagaagcttttataatgtaactccttgctaccagtaagtaagataatggctattacttctgcattaatttgaatacaggtaggaaaatatcaagaaccaacaagaaaagggcttatctttcttaatgattgaaaatgctatgaagtaatatttatgtagttaaaatgcttcattataactcttttaaatcctttacacactagtaaaacagatattactttaaataataattgatagacctggataactttcacaaacacatgattttttaatggtttttcttgagtgaagagaaaaacaatattatcaaatgaaataagtacttaaaatatcctgtctttcccatataacaatgatttttctgactttccatgagtaaaaaaacagccaagcatctttccagtagccccattgaaattgtgaatccgtcctggtctccctaaggactgcacacattgatattcaaggttggtggtcattagatatggaacagaactgaaataaccatggtagaactgaatgtgtaatgttggctttattctagctggtactacatggcacacagtttcaaaacataatttcacctactggaaagctcagacctgtaaaacagagcatgggaactgctggtctaaatgcagttgttcctgctcaaagagacctctggccaaactggcaagcagttaaagttttctttcagggccttcctctctatggcctcaacttcctcytctctcttcttccagcarcttcccctttcatcattcctttccctggggacttggcattcagtgatcctgtagatattgcacaactggggaacctttagacatccttaaaatcacatgagatagacagtcatttggggtgtctgaaataaaccaccccaaaacttagtgttaaaagagcaaccaaaaaaaatttatgtgagattatggatttgttacttagcttgatttaatcatcctgtaaygtrtacatatatcaaaatgttatgtataccataaatatataaaattttatcaacgaaattcataacaatctctcagaccacagagaaatcaaattagaactgaggactaagaaactcactcgaaaccacayaactacatggaaactgaacaacctgctcctgaatgactactggrtaaataatgaaattaaggcagaaataaataagttccttaaaaccaatgagaacaaagagacaacataccagaatctctaggagacagggctttgcttttgctgcattctattcgttgtgaacacaaattacaggccagtctcgatwcagtgtagaagggaactgcataaggaccacataccaggaggcataattcactgggagcatctttagaaactaccagagttacctgttgcccataccagtggggtaagccctatgaatgtatatgagagtttcaaacatccacaaaacattggctttctaatattygtattcccactattcctttcttttcatgattcatgtcattgtcccatcaacatttctaagatttccattccgttaagagcaaaagagaatgttggaaggtgggggaaaacatttctttgttttctacagggccagcttcttggatgtgtgtgatctgttcagttgcaaagggtcacatgctcagaaggaccgcatgctaaatttaatgctttgcagttaccctcttgaaatcctttattttttaagaaggaattcgacatttccatttttcaatgagccccacaaattacgcagctagtcctgggcttctctactctgaaattgggcaggatctctcttgatctagaatttactaaggcataataggggcaagaaaatcttatgaaataatggggggtagggaagagatgggaatggagcatgagatccagcttcgttattctctacttgagaaaaataaggccccaaagattaaacaacttgcccaaggatattgcttgttagtgtcagaactgaaaccagaaaccaaatgatcatatccctagacttttagtctgctttctcttccataaaatgaaacttataatgtttctaatccattgctcagacaggtagacatgaatattaattgataatgactattaattgatctggaaaatacttgtttggggatcaataatatgtttgggctattatctaatgctgtgtagaaatattaaaacccctsttattttgaaataaaaaagatacccactttttatttctctctctgawctcacttagatgaaattacaagtttgactacatagtacgtctccagtgacataawccactgtttgttacaactgggtgctttggaaagaagttaaatgactcacggtagaatcatgacttaagagaaaccaacagataaaattctaaacattattagtcattctaattgcaatttggaaaagaatagctgtgaatgtatcaaaaatatgaaaggactagaagaaacatgaaattatttctccagaattctttcaagttattaaaagaaataacaaacttcatgccatttttataatcattttgaataaacaccatattttgagttcagggccattttggcaaacccagggaaaagctcttgccaaatagcttggatgttcccaagagccatgaatatttcaccatttacttctctggacagaccaggaaggaacaatttactaggcagtgaattttggttttacgaaatattggcacatgccccaatgcagtgggcctaacacatacttaaaaatatctgatagctccatgttagcatttttcttgttttatatttcctaatggagaagtattttatggaaaattctgaatgcctaattctcccaagttcatatattctcatagcctagagatagggaaagctgtagacaaagacaaaatgattatgtgtggaataatatttacatggtcaatgcccagataacaaggtttttcatatccaagtacttaaattgttgggagagactacagagctttaagattttattatctctggcttgtatgaactgtccccaccaaaacatatacatgtattttgcatttggtacatgtaaagaaaacttgatattaacctctctacatgtaccatcattttaattttttaaaaagtattaagctcattctatcgacacagcaaaccactatgacaggcattgtaggggagagtatataaaggaaataaaagacacttctctggcttattcaaatacatcatctagttgcatagagaagacaaacataagaagcaaatagacactatgagcctattaagcctaacagattacaccctgagtagtaaagaaaaagacaattagatgagtagccttgtgggatggaatcagactgtgaaarcttttggagatgatttaacctaggtcatctgatattagatgtgtatgaaggcaacctgtgcagaactccaragaagagaggactgggataaggatcaataaaaaccaggataaataagagctttatgctcaaattcagggcccagttaagctttctctgacatacctactcattttccctaccctctctatatagtctaataatgacttatccacctccctccatctcctgtaccatgcccataaatccagtgtatgtgcaaggtcaaaacaaataagaattacctgggtagaactgatgatgtgagggtggggaaagacacaaaaacagatacaatacatatccctaatctccaaatcgtgaattacagatggtagtgaccagattaaaagtgggtcacctttggaaatattatagaagacgcccatgaggaacaggattctgacttgcttagggtgataggagaatgacactggagtggggagaagacgggtaaaagtaygttgtatgtgagaaattgactaatggagagatgagacaatcattgaggatgtttggacaatgacaagagttcaaagttcttatgcgatggttttatttttaccactggtccacatctaaaccacttctacctcatctgtactttcatgttttacacttagaagaagcttctcaatgtcttaggaatggtgtgcagttaatttcataccccacctgctttttattgacaggaaatttggtaatggctttaccgtcttagttatctccaccttgtattgaagttccttcctgctgattaaaaagactttctgaaagtctggaatgtggcaaccttgtttacagatgtgacaagtaaaaatgtttaaaaagcttttcttttatgaatagactgggagaaatagtgacaaaggctataattctatgattgcaatagtattggtacatagtaagcattctatcagtatttattattagcattataatgaaaatatgatatactatgaatataatggtattaattactaatattaatttctactattctctaatgctttttaatactgctcattacctctttagaaattgtagtaaaatacacataaaagttactctttaagtgtacaattcagcggcattaagtacattctcattgttgtgcagccatcaccaccatccactgctcattactttttattgcagctctattttctacccatacttgatgctcttcccagtaggtggcatgtctggttcaactgtactyagccagagttctgaagacattcacatagaggtcaagctttaattattcaggctaaacaaataattgaacagcttgcatggacttttttcagtgggtttaactgacctaattatgtttttctcagggrtagggactattggcattagtttacatcctgagcccacaggcctagtataggattcagaaattatcaaactatccacaaatttgaagatttaaataaaatcaagtaaaaattttctctccaaaaaaaaaatcaattagttgccaatgaaggagtttaaatgggagaggtaaataaattgtgccagaaaataaactagaaagaacagtcagcatgctaggttatagtagatattgtgaaaactgtacttctctgcaatacacaaagtaggttattaaaaattattggctggtgatgatagtgtggtttcatatttgccagcattatgaataatcttctctgcactcctagcagctagaattttaaataaaaagttatcatatttcttcaggtggmaaaataattgtgaaacacaatgttcttggcagaaaataaaacccaaatgactaaatacaacatatttttaggcatgtgtgaatgaatatatttctctctcatcttgtccccccaagacttaaggctgcttaaaaaaaataaaaaatactactagatgacatatgttagaagtagggaagaaagcaaaaccggaggtagaaacataaacaggaagcagaraaaagctaacaggaaaatgcatatcataaagctatcgaccttgctatgggtgaacttgggtttaagtgaactttttaaacagccaatgcacaaaaaaaccttatcagttataccatatggtgtccccaaaaaatgtacaaaaggagcacacttttattgagactgaagttaaaaataaacttctcccaaaggtccgcagaaagaggtcactatgtaatgagcagaatgcctctaacaagagcacattatataggctgctttctgtgcagaaggtgctgaggacttcccaccaaagcacagttcagtaaaaacaagtcttcagaggccactgctgtgtggtccatgtgcaggggctctttgctggtctggcttaagccaaaggtagattttacagcctctaaaaatcattttccttcaggcaaaggctcatatcataaatactgtttctctaaggcatgattttgttakctactctgtgacaatgagctcaagattgtgtattctgcaaggtgtaacaactgcatttttacaaaattgttatgttcttgcacaagattctatcataagcaaatggcaatagaaggcaaatgtttcagaacaattaatgcaaaaaaacgtaaatagagaaaattattt

SEQ ID NO: 10027 - DNA, 16213 bp, Homo sapiens
tgtttatatatggaaaagctttaattaattggtttaacaataagaattgcttaaatcaaacattttatcagaaaagtaaaaagtggaataccctttatttagttcatgtgacttaagtaatctttgggaaataaawacagttttaaagattattggtaaaataaaaaatcttcaaaaatgtaaacattttgtccgggtgcggtggctcatgcttgtaatctcagcactttgggaggccaaggcgggcagatcatttgagctcaggatttcgagaccagcctggccaacatggtgaaaccccatctctactaaaaatacaaaaattaggtgtagtggtgcaagcctgtagtcccagctacttgggaggctgagggaggagaattgcttgaacccgggaggcagaggctgcagtgagccgagattgagcgactgcactccagcctgggtgatggagcgagactctgactaaaaagaaacaaacaaacaaamaaaaaaaaatgtaaacatttggtctaaattatacaggtcagatattaagtttgctaaattctttaaggtcataagctgcttctttgactattaaaaattgttcaattttaggctgggtgcagtagctcacgcctgtaattccagcactttgggaggctgaggcaggcagatcacaaggtcaggagttcaagactaacctggccaacatggtgaaaccccatctctactaaaaataccaaaaaattagccaggcatggtggtgcgcrcctgtaattccagctactcaggaggctgaggcagtagaatcacttgaacccaggaggcagaggttgcagtgagccgagatcatgccattgcactccagcctgggcaacagagggagactctgtcttaaaaaaacaaaaaaacccaaaaaacaaaaaacaacaacaacaaaaaaaattgttcagtttatctactttggagcattagattaaatgtgttattggtacatgttccaaaattatgagaaattcctataattctaatatgacttagcgtatgttattaataattgttacataaaattttgtatgcaacagaagtaaccaaaayttcctagttaattgtggctttactagtggctgtcctaagactttttttttttttttttttgagacagattcttgctctgtcacccaggctggagtgcagtggcacgatctcagctcactgcaacctctgcctcctgggttcaagcacttcctctgcttcagcctcctgagtagctgggattatgggcacctgccctatgcggctaatttttggatttttggtggtgacggggtttcaccatgttggccaggctggtctcaaactcctgacctcaaatgttccacctgcctccgcctcccaaagtgctgggattacagatgtgaaccactgcrcctggccctaagactttttatcatccacagacaattgttgtcttgttttgatcttctttagaaggtagtttataatcagccataggactttaacaggtgcacttaaatgcaggtttctgataactttggagattgtgacattagaatagaggaaacaactttcagaactctcatggggagctgaaatgttcatagatatcaaacaaaagttaactgcataaactaaagaagactaaagcaatctttttgcctttgcttaaaacattgctgatcctttgttttattttttagagtcaaggcaacttttcttttcagatatttacagcttttaataatygagtaaagtatactcctgtgaacaaaatttggagtatatgcatctctctacttgatttctccagaatttggaaattatttgtgtgtattcttaatttatggcaatgcagttatttgcataagggtaataagaatctgttttcttttgcaacaggacacaattggagaaattgtttattttatgaagggtttgactggaatggtgtgctttccattaaggaatcaaacttgacttgtaaagcctataaaagccacttagcgacctgggctcataaccttgcctacacagtccctgtacagggtttctgacctgtggtaagtaaagaatgtcaccttctaaaaggtccaggagccccaagttatctggggacctcaaaaggagaggaagaatttacccaactcaaaggtatttgagggcacaaacccatggcagggctcagctttaaaaagtcttatccaagattctttctatggaacagagttccatcaaagccaattttaaaagcctacgtgamaaataattattcttgctgcactttatacaatcatcaggccaagtataataaagcacattggtcttaccataaaaatggtctttcataaaaatgggaaactggaragagaaaaattatgtttcaagaactatgatacacttgttattaaattccagtctcatcagttgtctttaagtttgtttctgcaatttaggctaaccctgcttagtcctgtgaaccaaccagtggcctctgactgctgctcagaagaaacaagagggatgggtaatgtaaaaatctgcatcaatattctaattctgggcatgtactggaatcatctagcaacctcatatcagcgtggttccaacagttcctcagttcatggaaagccttctagtttagtttacttgggataattttacttattttgctttatggttgtggaatgtatagctgttgtaatctttgtataggaatggaggacaagcttactgaatgtttccttaaactgaacacttatgaatcttccagagtatcaccttttgtcagaactcatgagttatgaatggccctcaagataccaatgctttttcttcccttcccttcccttcccttcttttcttttctttcagatggagtttcattctttcaggctggagtgcaatggcacagtcttggctcactgcaacctccrcctcccaggttcaagagattctcctgcctcagcctcctgagtagctagggttacaggcacccgccaccacatctggctattttttttgtattttttagtagagacagtgttgcaccatgttggccaggctggtctgaactcctgacctcaggtgatccgcctgcctcagcctcccaaagtgttgggattacaggcatgagccatcccgcctggcccataccaacactttccaactgagctcctctctaccacgaatatgagagattctaagagttaggcaaaaatatcatcgcccctattcatcctgaagaacttasagaagatggaccttcgtccctctgcaacccttaggattagtgcttctcttataaaaggaaggggggaaatgtcagaggcacgtgaaccagagcaagtctattttgaacaagagctgagtaaaatgagaatgagacttactgggctgcattcccagatggttaaagcattctaagttacagaatgagataggaggttgccataagatacaggtcatggccgggcatggtggctcatgccatgacagtttataaatgccatgacaatgacaggaagttaccctatatggtctaaaaaggggaggcatgaataatccacctcttgtttagcatatcatcaagaaacaaccataaacatgggcaaccagcagccctcggggctgctctgtctatggagtagccattsttttattcctttactttcctaataaacttgctttcactttactctatggactcgccctgaattctttttttcttttttttgaggcggagtctcgttctgtcacccaggctggagtgyagtggtgcgatctyggctcactgcaacctccacctcccgggttcatgccattctcctgcctcagcctcccaagtagctgggactacaggcgcccaccaccatgcccggctaatttttttgtatttttaatggagacggggtttcaccatgttagccaggatggtctcaatctcctgactttgtgatyccgccttggcctcccaaagtgctaggattacaggcatgagccgccgcactcagcctgaattatttctagtgtgagatccaagaaccctctcttgggatctggattcagacccctttcctgtaacaagattaggcaccaggagaaactgacacacatggrtgatataacagatgcctaaatggatcctatgggggaactggagctggaacagccctttagagttgtcgcaaagtgaggcaaagaggctagacttttatatccctccatcaatcagtgtttgacatgggccccataggagggcatgtaaccttcggtgaggcatctttctgacttgaagggcattgcccaatgagggaggtagctatgtggtatcagcagctggtatttcctacatgtagygaatgggcatattggctcccaagggggaatctgggtggagcactatagtatccattaaacctagtaaagaaatattatttctttactagtcacacagatgtgcccaggacagtggtagagcccacagggttacataaatcataatggtagccctcaagaacttcataaactgtatatggtattttaaaaagttgcatattgtytgtttccacctactagaacataagctctagragggcagagactatgttttgttcaccactgtttctccagtgtctagacgtagattctttgaatgcatttaattggagccttgagatatgaagaagtaggatgcggttacttcatgcagagcaagagtrgcatgcacccagagaaggccaggtggarctcagcatgagtgtgaaggcctcatgtcaagccatgtcaggggacacaaagatggagtattctctaacctatgtgacactcggcataagggaagtacaagcactcaatatgtgagtttcattcccacagtctgtggtctttagcccagtcyttccagatgcctattgagttcttcaagcatccaaatggtttggggwaaggcttcaggttctaaatgagaggctttgtgggttaccagctggagagtcagaaaatctggatttgaattcactcagccatgaaataattgtgtgatcttgggccgggcacggtggctcacgcttgtaatcccagcactttgggaggccaaggaaggtgaatcactagaggtcaggagtttgagaccagcctggccaacatggtgaaaccccgkcttttttttttttttttttttttttttgagacaaagtctcgctctgttgccaggctggagtgcagtggcacaatctcggctcactgcaacctccgcctccctggttcaagtgattcccctgcctcagcctcccgagtagctgggactacaggcgtgcaccaccacgctaatttttttgtattttagtagagatggagtttcaccatgttggccaggatagtcttgawctcctgacctcgtgatctgcctgcctcggcctcccgagaaaccaagtctttactaaaaaatatcaaaattagccaggtgtgatggacctgtagtcccatctacttgggargctgaggcaggagaattgcttgaacctgggaggtggaggttgcagtaagctgagatggtgccactgcactccagcctgggggacagagcaaractctctctcagaaaaaaaaaaaaaaaaagtttgatcttggggagttctaaggcccactagcctcatctgtagaatggaagcaatagtactactttgcagagctgacttcaggaccaagagatctaatgtctatgaagcggggtacttccttctatttgtcaggatgggggaggctagtcctgtgatgactgggaatgaagggtaaaagagacagaggttgggtaaactccaggctctgtgttcatarcctgctcccagacattctcttgttatctctctgtttcctagcctacacacgtgcacagacacgtagctgctgttcaggaactgagctaatggttttaaagtctgttccttatctttgctggaggcaggcagtagctgtgcagtgacagtgtgcctatgcagacagagggagcagtgaatagcaatagggtgtttccaccatggtcttcactcaggccccggctgaaatcatgggccacctccrgatacgcagcctcctggcccggcagtgcctggcagagtttctgggtgtgtttgtactcatggtaggtaggatcactgcgggaaggaaagaagggggttgggcaaaagttcctggctccttctgttgtccttatctctttctcttggtgtcccccttcctctcaactccctatcacttttcgtttttatcctctcgtctctcctaatctcctttcctctcctacttcatcatttttattcttgtcattttwattctttctttaataacaagtgtatcatagttcttgaaacataatttttctctcttcagtttcccatttttatgaaagaccattttcatggtaagaccaatgtgctttattatacttggcctgatgattgtataaagtgcagcaagaataattatttttcacataggcttttaaaattggctttgatggaactcttccatagaaagaatcttagataagactttttaaagctgagccctgccatgggtttgtaccctcaaatgcctatgagttgggtaaattcttttcttttttcccacattctttccctttcttcttcctccactttccccatytcttttcccttccctccttctgcttttctccttcccttgcttgtcttctgtgctcattcatctccttggctgctcccctggccttcccaacctttctccctgttggtctcctgggctccctgttcctcatctctcctcttctcagcagctcctcacccaaggagctgtggcccaggctgtcaccagtggagaaaccaaaggcaacttcttcaccatgtttctggctggctctctggccgttacgatagccatctacgtgggtggtaacgtctcaggtgaggagggtggggtctggtcatcagagcacgtgggatgtgcatgccagtttgtctgtctggtgatggtggaaacgcaaatccttctgtgactcgtggacattatccccttgaacagtgycccagactgaaataagcctttggccccaccagcccctcctctttctgtatctctccatcctgcttcctcacactaatgcttggctcacctagacagaaatcaatggcagggcacgaagggcagctgctatcctcttgtatcccccaccygaagtcctctgggggctcatctccactcaggacctctcctgtttgtaccccagatacacactgcatcggtgtgcttgggtggagccttgagacatagtgtgttgctgtggaaaaagcagacagacctaggttccaactttggattcacagtgtcttcttcttytttttttttttttttttttctttttttttgagatggagtttcactctgttgcccaggctggagagcagtggtgtgatgtctgttcactgcaacctctgcccctgggttcacgcrattctcctgcstcagcatcccgaatagctgattttacaggcacctgctaccacgcctggmtaatatttgtgtttttagtggaaacggggtttcaccatgttggccaggctggtctggaattcctgacctcaagtgatccactgcctcggcctcccaaagtgctgggattacaggcgtgagccactgtgcctggcccacagtgtgactttgctaagtcacttaacatctgtaacatctggagcctcaatttcctaagctgtgtgatgagaattacactatctgccttaagagctataggaaggagcagtagtgttgtctggtgacaatgcctggcagtgacacttaatagatgctctttttctttccttgatacttgaaggggcccacctgaatccagccttctccctggccatgtgcatcgttggacgcctcccctgggtcaagctccccatttacatcttggtgcagttgctgtctgctttctgtgcttcgggagccacctatgttctctacyayggtgacagagggaacagagggagctgtgccttgagagcacctgtgggtgggcaggggtgcctcagaatggttttggatgaatgagcaaagagggaaatcctgggtgttcccttcctccacagatgccctacagaactatacaggtgggaacctgacagtgactggccccaaggagacagcctccatttttgccacctatcctgccccctatctgtccctgaacaatggcttcctggatcaggtaagtgtgagggggagacctggggacactactttggtcctgttcctcggcaccccagcctattgttcagtctctgggtggagtgtgggttgggtctatcttggcactccccaccatccccaactgcctgtgttgcacaaagccagatgacatggaatatttggatgagagagggcagatggagcacctggcagctgacagggaaccctctgcctctgttgactccaaggttctgggcacygggatgctgattgtggggctcttggccatcctggacagacggaacaagggagtccctgcgggtctggagcctgtggtggtggggatgctgatcctggccctcgggttatccatgggtgccaactgcgggattccactcaaccctgcccgggacctgggcccacgtctcttcacctacgtggctggctggggtcctgaagtcttcaggtgggagacagactctcctggtgctggcctccactcaccttcctctgctaagggctctgtccctgggtccacagcactctgcctttaaaatagctctcttggcttcttaggacagtgttctttctccaagtcatattctccccctttctcccttgcttccctcccaacttttcactgaaacagtaagatttagaggttgtgttcttaggcatgccacattacttccatgcacattagtgacttcatcagcaaaattaatatattcagataattccctaaggcaagaggctggaccaagctctcctggggttccctcttctaaatactatgctttggtgacaaggcaatcctcttcctggtgtctaccaccctgggaacaactttagggcactctcttgttactgccccccgtccttggagaggggaaggctaagggagtcactcctgataccttcccactgtccttcttttgcagtgctggtaatggctggtggtgggtgcctgtggtggcccctctggtgggggccaccgttggcacagccacttaccagctgttggtggctctgcaccaccctgagggcccagagccagctcaggatctggtgtctgctcaacacaaagcctcagagttggaaactcctgcctcagctcagatgctggagtgtaagctatgattaggacaaccctcacttcactcatggaccctggagccagccactgaccccgcctgggaacaacagwcattcttcctctttgttaatgtgccagaacctgggaggcttctctgtttatctgtttggcatcccttcctcctaaactaagaaggatcctggacagggagaagtggaggaggataaggtaccaggactcaggcttctcatcccctcctcccgcaaagcggttttctgaccctcagggcctctcggaatgtagttgctcgaggtaaccgctagagggtgcgcacctggatgctggatggggacggctgcgggcatctgcagggtggagggggccaccatccagtgtagggcacaaccctggggactgccctccatagcctgtcccgactgccgactcctagctctcatcgcctcggcgcctcccaccttcaccctctcggggatgcctccccaagagggtagttaggggtggggaagccgcctccacccagggggcgtggtgggggcggagggaaggagggcggcggggcacagagacagagagcaaggctgtgaaactgaggcaccgttcctagacatctcggtgctgtgtcgttcattcaaggagagttgagatacagtgaaatgagccagggcgaggagggagggtgaaggaacggagggcgggcggctccgaggagcgagagtcgggctgagggcaacctggcgccagggaaaattctggttattcaccacttctacagctctcctgccgctccctgcagaggatgctcgttttgcagagaaggcagtgttcctctattcccttcttccgaattaaaaataccccctcagagcgatctagcctcccgaattgttttttcttttaagatgcggatggacgtacgtgtgggggcatcccagcccagccacgccgaggctcggaagggctaagaccctcccactgccccgcacaaagatggctgctccctcctccccgctccttctcccctccccaaaaccccctcccgccccccggcccccgccgccggctccgtcacttccgccccgccgtggccgaaactgacacaaagtagcgggccgaggccccgggggagcggggccgcagctgggggggcgggagcccgtggggagccgagccgagcgccccccgccccagcccccggcatgggcagtacggggccgccggggcgggcgccgagcgctgagcgctgaggtgaggcgaggcgaggcgaagcgggggcgcccgggagcgcggggccaggagggcagagggagatgcggccgcagccgcggggctggaggggccggggagcgggtgtagactggggagcaccgggggccaagatttgggagctgcggccagacggggcggggatggcggccgactggagacgaggggctgtcgggtkcccggggacggggcagagcgggggtctgcgtacaggatgggaggatggggtgccgaaggggcgcgtggagagcaggagagcggcrcragtgccaaggagaagctcgtgcagccttggccaggggagacccgcccagagagttgttgggcgagaggagtaaccgggacccgagggtttggtgcctggagaagggagtttgggctggtaggctttgtctcagtaaggtggaggtctatgcctgaggaaaactgagggtgtcaggaaggggcagtagctctgggagatgatagctgtgccgggagccctgagttctgtccttggtgagggaaggtggcccgagctcgtgttggtggccagtgagctggaggtctcgagttccatttcctcctgtttccctgacctgccatcctcctctgaaagaagtggccagcctttggggctcttgcttgtaagggagcagggaccggacctataggaggagctgttttcctccatggagcattgcctgcttgccggggctggctatttttatcccaaatgtggccgagagggggctggggctgggtgacggggcagggcaacgtggctgatgggcctgacctgctcagaaaacccaggctgtgtgagactaagaaggaaaagtgagaggggatccsagttcccaggtctcycctctcttccccttggaatgatggcccccccagaggggatgaggtctggggccaagcctgcttccagtctccccagggtctcagaggtagaacaactttcctggtccatatccagactcctgactcctgatggcgtgtgcagctcctacattaactctttcatgggactcaaactcagatgtttaggctgatagtgtttcttgatcccttcctccccaagggcggggctgcctgtagaacttgtgatgcccactcttgcatcctttaacctctccctgtgctccccaccctcccgtgactcatactcagactgggtggagaccctggctgggggccctggaggagggcttggcatctctaaaatatggatgaggtttttcttcctgagccaggcaccctggactgccatagttggagaaggtcagggatgaaaaggacttctggctttcaggattgcctgacttggtgtaagggcgggatctgagctagcgaagggagaactggtgtgggtgactgggttgtggccagaatctgtaattatagagcttagccagacaggcaattagtatctcttggggctgacaggttggtggggtgtgcctggtaggctaaaggcagagggaaccaaagaggatgaggaggtgaaaggccttccacccagacaaggaaagaggaggtgactgactggcagtttcctttgggccaggctggggagtaaggatgaggctctgccttgtaaggccaggccttgaaccttttaggagaaaggacatgggaaggcggaagcaggcagaggcttgtctcactggtgctccctaagcctgcaccctgtgccatactgactggactaggcttggggtgggagggagggaggggcaaactccccaccagggttgggaagacccctctgccagcccagaagggtggctgacccaggctgaggggaagctgtttagggactgtctgtgcagaaagtgagggccatgcctctaatgtgagctcccctggaggaggtgataatggaagccctagtaatggggggtggggatggcagggaacttataagcctttcgagaagggtggagcctgcccaccctgtttcctgatgccctgccaggtgtttcctggctcatgttccctccaccccaccctttggggaaactgctttctagtaagcacaagcactactcattgccgccagaacacatgagagcctccattgtccctgggatggataccttgagagctgttccccttttttcaatatctggcctcttctcctttccctacaggcatgggcttctgtaaagtctcagccccccatgtcacccaaggcaggggcatgatgggaggtggtggggaagtcccctctttcccaggaacccatcatggcagtaagaggagagactgggagaaggaggctgggggaggggcagggtcagagctggagaagagggtcttcaaaagaggtctcatgaggggagggaagggttatcctcagcttcctgacctcattcrtctgtcacttcttgcagggtctcccatgggattgctgggatcttgctgggtgagatggcagtgtgygcaaaaaagcgccccccaggtaagacaggcaaggaggggagatcccgggaaccatcaagagtgggtgttgttatggctcagggagcaaaagsaaaagggacaactggtatgggtytgagggagggtagcttacagcagcccctacccagcttgggggcagcctaggaaaccgaattcttccgcttgatcccaaarctgggttatctgccaggacagcgcagagcaccagccccacgccccgaaacacctgcagtcttatcttcgggcacctgcagctcctgctttctggcctagggagctgtgttctcatctctgcttggtcctctcaccccttccctgctcccctcgtttttccatctaccggttctcctggtttttccgcgggcgggggtgtgtgtgtgtgaaagcggttgcccccgacaacgccggcagtccgctcacccgcattggcccggcccgggggtgggaggggaggcggggctcgcgcgcgagctttcgcctacgcggcgcgctggcaggctgcggctcctgcagtcggggagcgggcgggggcggaaccctgggcgtgctcggcgtgtccggggccactcagcgcacgctggcatccgccggggggmatggggggcggcggcggcggcgcagctgagctcgcggtgtccccgagcgccggcggccgggaggatggcctgggctgcgggtggggcgcgcgcccgacggctggggctcccctctgagcggctgcggctcctgcacctccccggggagccgccccgtcgatgccactaaggccaaggacatatagacggtctgccctcccccactcaaaccgggatcatgacggtccccaaggagatgcccgagaagtgggcccgggcccaggcgcctccctcttggagccgaaagaagccctcttgggggacaggtaacgggaggcagcgcctggcagctctcccgcacccattatttcccccctccaatccctacattcacttgtccccagcctccccctacctgccttgatcctctttccagacccagagatcctggctccgaaggatccagtccctaccttcttcgtttgcatggtctttggtgattgcgcaggggacttggcccaagagagcccctctagggaagtttatgggagtgaagtggcttggtaggcagggggcactgtggcctgggttttgttactgcagtgtgctctgcaggggtcctggggtgtgtagaaagggttctggaatgctgtctttggctcccggacaggcttaaggcattaggtttgctgcctaaccaagttacccctttttgcagcatgaggtcatggtgacccccggggagacgggctggggaatctattataggacagctccttgttctgggacatgaatttgatgcctgcagtcccagacctgcagaggtttcagataggtttagctagataggtgtcactaactgagtgacagatgagccctttaaagctaaatgtgtgcagatggtacaaggaaggtccagttagagagcaactgtttcaattacatttcattcctccctcctctatctctatctcagtctgcatgacccatatccctgaaacgcaccccccacacctttttctacttgaagatgagctttgaaataaggtgatgtcatttcgggccagtcagaagcagttgctggtgacatgtgacaaccagaggctcctgtaggggggactgcacatggggctgggatgctcccgcagagcagctccagggcacagggagcctccttcttgccacctaccccactctctaaataagggagagagcagtaccgcgactagatctgcagtggtccccagggggaaggaagctttgcgttttcagcgctactccttgattatgacaatgtatgcattagtaatagcagcaaaaggggctggggaatcccaggactgtcagtggctcagattcctctggagtgggggtgggggagacaaactgggtgcttccagtggaagaccttgaagtttggtggtgaggaaaagagaacatgtcctgtcctgtgaatgtaacctggagagccgtgtggtcaggctgctggtgagaggtggactggagggaagaatttgatgaccccctcagttgtggagctaactccttaaaatgatattctgtggaaaaaaacagggaaccccccagcaaagtgttggtcyagacctcagtttgctcctcctgactgcagcatcattttgttgcagaagaagaaaggagggcgcgggsyaatgaccgagaatacaatgagaaattccagtatgcggtaagcgactctagaccacctgttccctctctctgtttggagaggggaatggggcaaggacaacctaccgttgggactgagggctgcctgggaagagtgcttgggggaggggaagcaacctcctcagccactctccatctgctatcgtgctgaatttttcatgccttcacctgtcagtgaagcagaatacattgacccccttgagactcccttctctcctcctctttccccctcccayacctgtgtttgctagcttttggggtagaggtctggggaagtataaagatgggggaggcagcctcagtctggttctsggttgggactggagactgctcattatcttctctcctactgccatagagtaactgcatcaagacctccaagtacaatattctcaccttcctgcctgtcaacctctttgagcagttccaggaagttgccaacacttacttcctgttcctcctcattctgcaggtaggtgacccatagtagattttttgcagytccccaaactgaataaagccaaggaagaggaaagggaatgaaggcatcagatggggcctcagaggcatacttctctttctttttttcagttgatcccccagatctcttccctgtcctggttcaccaccattgtgcctttggttcttgtcctcaccatcacagctgttaaagatgccactgatgactatgtgagtggttttcattcttctattttgtcccagtcacccacccctactcccagccccacccccatctcatggccaccttcattcagcacaatttcttggtgaccttgacatcccttacccggtccagctagatccatgatgtctttttgctgagcgtggggagagggaatcagggagt

SEQ ID NO: 10028 - DNA, 36634 bp, Homo sapiens
aaatattatttctttactagtcacacagatgtgcccaggacagtggtagagcccacagggttacataaatcataatggtagccctcaagaacttcataaactgtatatggtattttaaaaagttgcatattgtytgtttccacctactagaacataagctctagragggcagagactatgttttgttcaccactgtttctccagtgtctagacgtagattctttgaatgcatttaattggagccttgagatatgaagaagtaggatgcggttacttcatgcagagcaagagtrgcatgcacccagagaaggccaggtggarctcagcatgagtgtgaaggcctcatgtcaagccatgtcaggggacacaaagatggagtattctctaacctatgtgacactcggcataagggaagtacaagcactcaatatgtgagtttcattcccacagtctgtggtctttagcccagtcyttccagatgcctattgagttcttcaagcatccaaatggtttggggwaaggcttcaggttctaaatgagaggctttgtgggttaccagctggagagtcagaaaatctggatttgaattcactcagccatgaaataattgtgtgatcttgggccgggcacggtggctcacgcttgtaatcccagcactttgggaggccaaggaaggtgaatcactagaggtcaggagtttgagaccagcctggccaacatggtgaaaccccgkcttttttttttttttttttttttttttgagacaaagtctcgctctgttgccaggctggagtgcagtggcacaatctcggctcactgcaacctccgcctccctggttcaagtgattcccctgcctcagcctcccgagtagctgggactacaggcgtgcaccaccacgctaatttttttgtattttagtagagatggagtttcaccatgttggccaggatagtcttgawctcctgacctcgtgatctgcctgcctcggcctcccgagaaaccaagtctttactaaaaaatatcaaaattagccaggtgtgatggacctgtagtcccatctacttgggargctgaggcaggagaattgcttgaacctgggaggtggaggttgcagtaagctgagatggtgccactgcactccagcctgggggacagagcaaractctctctcagaaaaaaaaaaaaaaaaagtttgatcttggggagttctaaggcccactagcctcatctgtagaatggaagcaatagtactactttgcagagctgacttcaggaccaagagatctaatgtctatgaagcggggtacttccttctatttgtcaggatgggggaggctagtcctgtgatgactgggaatgaagggtaaaagagacagaggttgggtaaactccaggctctgtgttcatarcctgctcccagacattctcttgttatctctctgtttcctagcctacacacgtgcacagacacgtagctgctgttcaggaactgagctaatggttttaaagtctgttccttatctttgctggaggcaggcagtagctgtgcagtgacagtgtgcctatgcagacagagggagcagtgaatagcaatagggtgtttccaccatggtcttcactcaggccccggctgaaatcatgggccacctccrgatacgcagcctcctggcccggcagtgcctggcagagtttctgggtgtgtttgtactcatggtaggtaggatcactgcgggaaggaaagaagggggttgggcaaaagttcctggctccttctgttgtccttatctctttctcttggtgtcccccttcctctcaactccctatcacttttcgtttttatcctctcgtctctcctaatctcctttcctctcctacttcatcatttttattcttgtcattttwattctttctttaataacaagtgtatcatagttcttgaaacataatttttctctcttcagtttcccatttttatgaaagaccattttcatggtaagaccaatgtgctttattatacttggcctgatgattgtataaagtgcagcaagaataattatttttcacataggcttttaaaattggctttgatggaactcttccatagaaagaatcttagataagactttttaaagctgagccctgccatgggtttgtaccctcaaatgcctatgagttgggtaaattcttttcttttttcccacattctttccctttcttcttcctccactttccccatytcttttcccttccctccttctgcttttctccttcccttgcttgtcttctgtgctcattcatctccttggctgctcccctggccttcccaacctttctccctgttggtctcctgggctccctgttcctcatctctcctcttctcagcagctcctcacccaaggagctgtggcccaggctgtcaccagtggagaaaccaaaggcaacttcttcaccatgtttctggctggctctctggccgttacgatagccatctacgtgggtggtaacgtctcaggtgaggagggtggggtctggtcatcagagcacgtgggatgtgcatgccagtttgtctgtctggtgatggtggaaacgcaaatccttctgtgactcgtggacattatccccttgaacagtgycccagactgaaataagcctttggccccaccagcccctcctctttctgtatctctccatcctgcttcctcacactaatgcttggctcacctagacagaaatcaatggcagggcacgaagggcagctgctatcctcttgtatcccccaccygaagtcctctgggggctcatctccactcaggacctctcctgtttgtaccccagatacacactgcatcggtgtgcttgggtggagccttgagacatagtgtgttgctgtggaaaaagcagacagacctaggttccaactttggattcacagtgtcttcttcttytttttttttttttttttttctttttttttgagatggagtttcactctgttgcccaggctggagagcagtggtgtgatgtctgttcactgcaacctctgcccctgggttcacgcrattctcctgcstcagcatcccgaatagctgattttacaggcacctgctaccacgcctggmtaatatttgtgtttttagtggaaacggggtttcaccatgttggccaggctggtctggaattcctgacctcaagtgatccactgcctcggcctcccaaagtgctgggattacaggcgtgagccactgtgcctggcccacagtgtgactttgctaagtcacttaacatctgtaacatctggagcctcaatttcctaagctgtgtgatgagaattacactatctgccttaagagctataggaaggagcagtagtgttgtctggtgacaatgcctggcagtgacacttaatagatgctctttttctttccttgatacttgaaggggcccacctgaatccagccttctccctggccatgtgcatcgttggacgcctcccctgggtcaagctccccatttacatcttggtgcagttgctgtctgctttctgtgcttcgggagccacctatgttctctacyayggtgacagagggaacagagggagctgtgccttgagagcacctgtgggtgggcaggggtgcctcagaatggttttggatgaatgagcaaagagggaaatcctgggtgttcccttcctccacagatgccctacagaactatacaggtgggaacctgacagtgactggccccaaggagacagcctccatttttgccacctatcctgccccctatctgtccctgaacaatggcttcctggatcaggtaagtgtgagggggagacctggggacactactttggtcctgttcctcggcaccccagcctattgttcagtctctgggtggagtgtgggttgggtctatcttggcactccccaccatccccaactgcctgtgttgcacaaagccagatgacatggaatatttggatgagagagggcagatggagcacctggcagctgacagggaaccctctgcctctgttgactccaaggttctgggcacygggatgctgattgtggggctcttggccatcctggacagacggaacaagggagtccctgcgggtctggagcctgtggtggtggggatgctgatcctggccctcgggttatccatgggtgccaactgcgggattccactcaaccctgcccgggacctgggcccacgtctcttcacctacgtggctggctggggtcctgaagtcttcaggtgggagacagactctcctggtgctggcctccactcaccttcctctgctaagggctctgtccctgggtccacagcactctgcctttaaaatagctctcttggcttcttaggacagtgttctttctccaagtcatattctccccctttctcccttgcttccctcccaacttttcactgaaacagtaagatttagaggttgtgttcttaggcatgccacattacttccatgcacattagtgacttcatcagcaaaattaatatattcagataattccctaaggcaagaggctggaccaagctctcctggggttccctcttctaaatactatgctttggtgacaaggcaatcctcttcctggtgtctaccaccctgggaacaactttagggcactctcttgttactgccccccgtccttggagaggggaaggctaagggagtcactcctgataccttcccactgtccttcttttgcagtgctggtaatggctggtggtgggtgcctgtggtggcccctctggtgggggccaccgttggcacagccacttaccagctgttggtggctctgcaccaccctgagggcccagagccagctcaggatctggtgtctgctcaacacaaagcctcagagttggaaactcctgcctcagctcagatgctggagtgtaagctatgattaggacaaccctcacttcactcatggaccctggagccagccactgaccccgcctgggaacaacagwcattcttcctctttgttaatgtgccagaacctgggaggcttctctgtttatctgtttggcatcccttcctcctaaactaagaaggatcctggacagggagaagtggaggaggataaggtaccaggactcaggcttctcatcccctcctcccgcaaagcggttttctgaccctcagggcctctcggaatgtagttgctcgaggtaaccgctagagggtgcgcacctggatgctggatggggacggctgcgggcatctgcagggtggagggggccaccatccagtgtagggcacaaccctggggactgccctccatagcctgtcccgactgccgactcctagctctcatcgcctcggcgcctcccaccttcaccctctcggggatgcctccccaagagggtagttaggggtggggaagccgcctccacccagggggcgtggtgggggcggagggaaggagggcggcggggcacagagacagagagcaaggctgtgaaactgaggcaccgttcctagacatctcggtgctgtgtcgttcattcaaggagagttgagatacagtgaaatgagccagggcgaggagggagggtgaaggaacggagggcgggcggctccgaggagcgagagtcgggctgagggcaacctggcgccagggaaaattctggttattcaccacttctacagctctcctgccgctccctgcagaggatgctcgttttgcagagaaggcagtgttcctctattcccttcttccgaattaaaaataccccctcagagcgatctagcctcccgaattgttttttcttttaagatgcggatggacgtacgtgtgggggcatcccagcccagccacgccgaggctcggaagggctaagaccctcccactgccccgcacaaagatggctgctccctcctccccgctccttctcccctccccaaaaccccctcccgccccccggcccccgccgccggctccgtcacttccgccccgccgtggccgaaactgacacaaagtagcgggccgaggccccgggggagcggggccgcagctgggggggcgggagcccgtggggagccgagccgagcgccccccgccccagcccccggcatgggcagtacggggccgccggggcgggcgccgagcgctgagcgctgaggtgaggcgaggcgaggcgaagcgggggcgcccgggagcgcggggccaggagggcagagggagatgcggccgcagccgcggggctggaggggccggggagcgggtgtagactggggagcaccgggggccaagatttgggagctgcggccagacggggcggggatggcggccgactggagacgaggggctgtcgggtkcccggggacggggcagagcgggggtctgcgtacaggatgggaggatggggtgccgaaggggcgcgtggagagcaggagagcggcrcragtgccaaggagaagctcgtgcagccttggccaggggagacccgcccagagagttgttgggcgagaggagtaaccgggacccgagggtttggtgcctggagaagggagtttgggctggtaggctttgtctcagtaaggtggaggtctatgcctgaggaaaactgagggtgtcaggaaggggcagtagctctgggagatgatagctgtgccgggagccctgagttctgtccttggtgagggaaggtggcccgagctcgtgttggtggccagtgagctggaggtctcgagttccatttcctcctgtttccctgacctgccatcctcctctgaaagaagtggccagcctttggggctcttgcttgtaagggagcagggaccggacctataggaggagctgttttcctccatggagcattgcctgcttgccggggctggctatttttatcccaaatgtggccgagagggggctggggctgggtgacggggcagggcaacgtggctgatgggcctgacctgctcagaaaacccaggctgtgtgagactaagaaggaaaagtgagaggggatccsagttcccaggtctcycctctcttccccttggaatgatggcccccccagaggggatgaggtctggggccaagcctgcttccagtctccccagggtctcagaggtagaacaactttcctggtccatatccagactcctgactcctgatggcgtgtgcagctcctacattaactctttcatgggactcaaactcagatgtttaggctgatagtgtttcttgatcccttcctccccaagggcggggctgcctgtagaacttgtgatgcccactcttgcatcctttaacctctccctgtgctccccaccctcccgtgactcatactcagactgggtggagaccctggctgggggccctggaggagggcttggcatctctaaaatatggatgaggtttttcttcctgagccaggcaccctggactgccatagttggagaaggtcagggatgaaaaggacttctggctttcaggattgcctgacttggtgtaagggcgggatctgagctagcgaagggagaactggtgtgggtgactgggttgtggccagaatctgtaattatagagcttagccagacaggcaattagtatctcttggggctgacaggttggtggggtgtgcctggtaggctaaaggcagagggaaccaaagaggatgaggaggtgaaaggccttccacccagacaaggaaagaggaggtgactgactggcagtttcctttgggccaggctggggagtaaggatgaggctctgccttgtaaggccaggccttgaaccttttaggagaaaggacatgggaaggcggaagcaggcagaggcttgtctcactggtgctccctaagcctgcaccctgtgccatactgactggactaggcttggggtgggagggagggaggggcaaactccccaccagggttgggaagacccctctgccagcccagaagggtggctgacccaggctgaggggaagctgtttagggactgtctgtgcagaaagtgagggccatgcctctaatgtgagctcccctggaggaggtgataatggaagccctagtaatggggggtggggatggcagggaacttataagcctttcgagaagggtggagcctgcccaccctgtttcctgatgccctgccaggtgtttcctggctcatgttccctccaccccaccctttggggaaactgctttctagtaagcacaagcactactcattgccgccagaacacatgagagcctccattgtccctgggatggataccttgagagctgttccccttttttcaatatctggcctcttctcctttccctacaggcatgggcttctgtaaagtctcagccccccatgtcacccaaggcaggggcatgatgggaggtggtggggaagtcccctctttcccaggaacccatcatggcagtaagaggagagactgggagaaggaggctgggggaggggcagggtcagagctggagaagagggtcttcaaaagaggtctcatgaggggagggaagggttatcctcagcttcctgacctcattcrtctgtcacttcttgcagggtctcccatgggattgctgggatcttgctgggtgagatggcagtgtgygcaaaaaagcgccccccaggtaagacaggcaaggaggggagatcccgggaaccatcaagagtgggtgttgttatggctcagggagcaaaagsaaaagggacaactggtatgggtytgagggagggtagcttacagcagcccctacccagcttgggggcagcctaggaaaccgaattcttccgcttgatcccaaarctgggttatctgccaggacagcgcagagcaccagccccacgccccgaaacacctgcagtcttatcttcgggcacctgcagctcctgctttctggcctagggagctgtgttctcatctctgcttggtcctctcaccccttccctgctcccctcgtttttccatctaccggttctcctggtttttccgcgggcgggggtgtgtgtgtgtgaaagcggttgcccccgacaacgccggcagtccgctcacccgcattggcccggcccgggggtgggaggggaggcggggctcgcgcgcgagctttcgcctacgcggcgcgctggcaggctgcggctcctgcagtcggggagcgggcgggggcggaaccctgggcgtgctcggcgtgtccggggccactcagcgcacgctggcatccgccggggggmatggggggcggcggcggcggcgcagctgagctcgcggtgtccccgagcgccggcggccgggaggatggcctgggctgcgggtggggcgcgcgcccgacggctggggctcccctctgagcggctgcggctcctgcacctccccggggagccgccccgtcgatgccactaaggccaaggacatatagacggtctgccctcccccactcaaaccgggatcatgacggtccccaaggagatgcccgagaagtgggcccgggcccaggcgcctccctcttggagccgaaagaagccctcttgggggacaggtaacgggaggcagcgcctggcagctctcccgcacccattatttcccccctccaatccctacattcacttgtccccagcctccccctacctgccttgatcctctttccagacccagagatcctggctccgaaggatccagtccctaccttcttcgtttgcatggtctttggtgattgcgcaggggacttggcccaagagagcccctctagggaagtttatgggagtgaagtggcttggtaggcagggggcactgtggcctgggttttgttactgcagtgtgctctgcaggggtcctggggtgtgtagaaagggttctggaatgctgtctttggctcccggacaggcttaaggcattaggtttgctgcctaaccaagttacccctttttgcagcatgaggtcatggtgacccccggggagacgggctggggaatctattataggacagctccttgttctgggacatgaatttgatgcctgcagtcccagacctgcagaggtttcagataggtttagctagataggtgtcactaactgagtgacagatgagccctttaaagctaaatgtgtgcagatggtacaaggaaggtccagttagagagcaactgtttcaattacatttcattcctccctcctctatctctatctcagtctgcatgacccatatccctgaaacgcaccccccacacctttttctacttgaagatgagctttgaaataaggtgatgtcatttcgggccagtcagaagcagttgctggtgacatgtgacaaccagaggctcctgtaggggggactgcacatggggctgggatgctcccgcagagcagctccagggcacagggagcctccttcttgccacctaccccactctctaaataagggagagagcagtaccgcgactagatctgcagtggtccccagggggaaggaagctttgcgttttcagcgctactccttgattatgacaatgtatgcattagtaatagcagcaaaaggggctggggaatcccaggactgtcagtggctcagattcctctggagtgggggtgggggagacaaactgggtgcttccagtggaagaccttgaagtttggtggtgaggaaaagagaacatgtcctgtcctgtgaatgtaacctggagagccgtgtggtcaggctgctggtgagaggtggactggagggaagaatttgatgaccccctcagttgtggagctaactccttaaaatgatattctgtggaaaaaaacagggaaccccccagcaaagtgttggtcyagacctcagtttgctcctcctgactgcagcatcattttgttgcagaagaagaaaggagggcgcgggsyaatgaccgagaatacaatgagaaattccagtatgcggtaagcgactctagaccacctgttccctctctctgtttggagaggggaatggggcaaggacaacctaccgttgggactgagggctgcctgggaagagtgcttgggggaggggaagcaacctcctcagccactctccatctgctatcgtgctgaatttttcatgccttcacctgtcagtgaagcagaatacattgacccccttgagactcccttctctcctcctctttccccctcccayacctgtgtttgctagcttttggggtagaggtctggggaagtataaagatgggggaggcagcctcagtctggttctsggttgggactggagactgctcattatcttctctcctactgccatagagtaactgcatcaagacctccaagtacaatattctcaccttcctgcctgtcaacctctttgagcagttccaggaagttgccaacacttacttcctgttcctcctcattctgcaggtaggtgacccatagtagattttttgcagytccccaaactgaataaagccaaggaagaggaaagggaatgaaggcatcagatggggcctcagaggcatacttctctttctttttttcagttgatcccccagatctcttccctgtcctggttcaccaccattgtgcctttggttcttgtcctcaccatcacagctgttaaagatgccactgatgactatgtgagtggttttcattcttctattttgtcccagtcacccacccctactcccagccccacccccatctcatggccaccttcatycagcacaatttcttggtgaccttgacatcccttacccggtccagctagatccatgatgtctttttgctgagcgtggggagagggaatcagggagtgaactggtttgtgatggggtgtgtatgaggcgttaaccagcatgctctgagttctactgatcaacgaattccttcgaggcgggggaaggtgtcttacctttcagttttcttcttttcagttccgccacaagagcgataaccaggtgaataaccgccagtctcrggtgctgatcaayggaatgtgagtgcctgttggagacaagagctctggggacgaagggggtcccttaggaacctctttagctcctgacagcctcttcactgtcttctcgttgcctcagcctccagcaggagcagtggatgaatgtctgtgttggtgatattatcaagctagaaaataaccagtttgtggcggtaagggacagggtacccctctaggcctgtaggttcttcctcttctttgtgagaaaaggatgaatctttcctgatttactgttgcctcttaaacacccgtggcaggaatctttctcacaccaggggcttctgtgtcatgctgatatgcctggaactagccatttatgcacctggaactaagcaaaccaagaatgcttagtggaaggagccaccattacagcccactgggggtggaggtttgcatatttggacttctcattagtttttctctctaggcggatctcctcctcctttccagcagtgagccccatgggctgtgttacatagagacagcagaacttgatgggtaagtggcatgctcagtgtcagccctctccttctgtctctttggaggtaaaaagattgtctttgaatgaggttctcaggcctgggctctgtctgaatttggaaaaattaggggtaagaaaggctttggatgggatgtgtgaagtgttattcaaccagtatttgctgggctgagcagttatgcaccatgcttaggtgtcaccaggtagaatttagaggatggggagaggtgggcatggtgactcactcctgtaaatcccagcactttgggaggccagtgtgggaggattgcttgaggccaggagtttgagaccagcctgggcaagatggtgagacttcatctctataaaacaaacaaacaaaaaatttaaaaagtttaaaacttagctgggtatggtggttttaatgcctataatcccagccacttgggaggctgaggcgggaggattgtttgagcccaggagttcgaggctttagtgagctatgattgtgcgactgcactccagcctgrgcagcagagcgagaccccatctgtgaaaaaaaacatttagaggatgaggagggagcggggactcagagatactgtccttccagcgagaccaacatgaaagtacgtcaggcgattccagtcacctcagaattgggagacatcagtaagcttgccaagtttgacggtgagtaattttggagsagcagcctgaaggtagaggagtggggttgggttttgtttgggggcgttaaattatacattttcctttgggctttttgttgttattatgcaactccctggactgttttggggaggggagtgtttgtaatgtcatgtggctccctcttggttttgagtttataattatttcaaggggactttgtggctgatagctccccacttgctatgcatgttgagagaaattcagcttattcttttagcttattagctcagaataataatatgtgttccttataagacaaaccatacagagtgtataagaaaaagtgaatagaggtcggtaccatggctcacgcctgtaatcccagcactttgggaggccgaggtgggyggattgcctgaggccaggagttcgagaccagtctggwcaacatggtgaaaccctgtctctattaaaaatacaaaaattattagctgggcgtggtgctgcatgcctgtaatcccagctattcaggaagctgaggcaggtgaatcccttgaacctgggaggcggaggttgcagggaggcggaggttgcagtgagctaagatcgtgccactgcactccagcctgggtgacaagagcgaaactctgtctcaaaaagaaaaaaaaaatacaaaaattagccgggcgtcgtggtgtgcatctgtagtcccagctacttgagaggctgaggcatgagagttgcttgaacctgggaggtggaggttgcagtgagccgagatcgggccactgcactccagcgtgggcaacacagtgagacactgtctcaaaaaaaaaaaagaagaagaaaatagctcttccttcctcttctaccctgctgaagtagccacattaattgacagtcagtgtgtgctcatccacacttttcatacatgtttgtacaaacaaatattaggtcatgctgcagctttttttttttttttttwaatactcctgcccaggttggagtgtagtggtgcgatctcrgctcactgcatcctctacctcccaggttcaagcgatcctcgtgcctcagcctcccgattagctagaattacaggctcccaccaccacacccggctaatttttgtatttttagtagagacagggtttcaccatgttggccaggctggtctcaaactcctgacctcagctgatccacccgccttagcctcccaaagtgctgggattacaggcatgagctgccgcgcccggcctgcttcattattttcctgaagagttgcatcagctcacactcctcccagcagcatatggatgggcccttgcccttgcatcctcttcgctcagctcattttctctttgttttattgtcttgtggttaggctgtagactggaccttaagcagtggaattcttgtctcctgttcaggtgaagtgatctgtgaacctcccaacaacaaactggacaaattcagcggaaccctstactggaaggaaaataagttccctctgagcaaccagaacatgctgctgcggggctgtgtgctgcgaaacaccgagtggtgcttcgggctggtcatctttgcaggtgagcctcctagcatccaaagaaagaagggtaagagtgactcagccagccctcactcaggagtatgggatgaggtgggagaatacctaaggtaaaaaacctccagctgtgtatacaggcttcttatctagccagtatctctattccaccctggtgtcctgcagtctggggatcagggcagaagcccagaggcagatgtgttatttggctttcccagcccttcccattcttttccaggtcccgacactaagctgatgcaaaacagcggcagaacaaagttcaaaagaacgagtatcgatcgcctaatgaataccctggtgctctgggtgaggcgccccacatctggctccctgcccctgccctctcttctccttgggtgctccttttcctttcctctttcttctttggtcagtagacttcaggtttggctttaaagctgctagcaggtcagctacacaaaggcagtgtttattttaggctccttttagttggaagatgttatttaaaaaaacttcaggaacgtgcatgaatcaacaacttaaagctaaaacaaatcatcccttctctgattccagttatgatgatgactttgtgaagcatgtgaccttctgtttgcttttgccagggacaaggaggccttcatggggatggagagggaattaaaagaaaaatttccatttggaagaggttggcagggtcttttccccccaacttctaagaacgaaggatcccaaaggaaaagtttctgtttaagtttttggcagttcctgaatccttctcttgtttagctagaaatctgaactccttgttgggctctcctccccttcctgtgccccgactgtctgctgcctgcccgccacatgccagcttgtgaaggctggggctagcytctggtgagcttgtttccgccctggctttaaagrgtgtgcggaaacccagcctggtgggcgaggttgtctatcacataagggctccagtcgccccctggtggccattgggcaccaatctcctattttgtttcaaagcctaaacagcggaggcagctttggaaatagatgtaggaaattggacagtggcctggttttttaccagtctctccagagactccaaaatttataagatttttgactaatcaggaaatctagaccaggagtggtggctcacacctgtaatcccagcactttgggagaccaaggtgggaggatcatttgagcctaggagttcgaaaacagcctggacaccatagtgagaccctgtctttacaaaaaactgaaaaattagccaggtttggtggcatgcacctgtggtcccagttactctggaggctgaggcggggggattgcttggcctgggagattgaggctgcgttgagctaggatcatgccactgcactccagcctgggcaacaaagcaagaccctgtttcaaaaaagaaatctacgtttatgaagataagtttgtttcccaagtttaaaaaaaaaaaaggcaatcttagccaggtgcagtggctcacgcctgtaatcccagcactttgggagaccgaggtgggtggatcacgaggtcaagagatcaagaccatcctgaccaacatggtgaaaccccatctctactaaaaatacaaaaaaatagctgggcgtggtggcgggcacctgtagtcccagctacttgggaggttgaggcaggaaaatggcgtgaacccgggaggtggagcttgcagcagtgagccgaggtcgcgccactgcactccagcctgggcgacagarcaagrctccatctcaaaaaaaaaaaaaaaaggccatctatgtgagatagtgaacattaccgtggcttggcatttttgttggcttgtacctagcccaggtgaatagattatttacagtaagttttctggtatgttaaamgtagctcatccccactcttaccaactttgaggactctgraaggtttcaaggtgccagattgagagctaatcaactatttcagtttcttcatcatatagatgaaataatggtcagacagaaggccacatgataattggtgacagactagaacctgtcaccagttctgagctttttccactagagcagtggtgtccaatattttggcatccctgggccacattggaagaagaattgtcttgggccacacataaaatacactaacattaacaatagctgataagcttagaaaaaaaaaaattgcaaaaaaaatctcataaatttttttttttttttttgagacggagtctcactctgtcactaggctggagtgtagtgcaatggcattatctcggctcactgcaacctctgcctctcgggttcacgtgattctcctgcctcagcctccctagtagctgggattacaggtgcccgccrccacacccggctaatttttttgtatttttagtagagatgagagatggggtttcaccatgttggccagactggtctcgaactcctgacctcatgatctgcccgccttggcctcccaaagtgctgggattataggtgtgagtcactgcacctggccttttttttttttttttgagacaggttcttgctctgttgcccaggctgggatgcagtggcatgatcttggctcactgcaatgtctgcctcccgggttcaagcaattctcatgccttggactcctgagtagctgagactacaggcaagtgccaycaggactggctaattttttwaatgtttttagtagagacggggtttcaccrtgttggccaggctggtctcaaactcctgacctcaggtgatccatccgcctcaacctcccaaaatgctgggattacaggcttgagccactgcgcccagcccataatagttttttttttttttwtaattatttttcatttaacattcagctgttaccaaaatctcatagtgttttaagaaagtttatgaatctgtgttgggccacatgtggcccagagaccatgggttggacaagcttgcactagagcatctgagcttttgagggctcaagggatgaatacatcacagatgcacttggttttgagggcttcctacatgtcagcctcrcctgtgcttctcattcctccccagatttttggattcctggtttgcatgggggtgatcctggccattggcaatgccatctgggagcacgaggtggggatgcgtttccaggtctacctgccgtgggatgaggcagtggacagtgccttcttctctggcttcctctccttctggtcctacatcatcatcctcaacaccgttgtgcccatttcactctatgtcaggtatgtgccttctctgacctggggtctstccagggagtcaggcggtcccatagaacttttcttttctatgaagatgaagtccttgagaagtaacgagaagtcctcttcttcctgtactgtaaacatttgatgttatctgtttatctttgtgggcagagcaaactttttaccacagtttcctggtacttgggactgtattagagaaaaaaaaaatattgatttattcagcacctatttattacatgcctactgtgtacaaagaagtgtgctaggtgccatcacaaataaaagatgaattaggaatggatctccttccttctaggagcttacgtctagtaaaggaaggaaaatctaaacacattataaaacaaaataggaaccagtgctgtagaattcgacctagagtcttctatgtgaagcttggggatacagagatgtataaggtggcctctgcctttagcagcagcagatggatmggtcgaggaggggagatctggacagtgtcagactgagataccatgtgggaggcacagggtgcccggggactgggagagtgtcgctccctaagcaggtaggcagagagggagagatggcatttgctctgggctttgagtggtgactgggctggatgaaggtggagccacaatggagaggaggmtgagagggctggaagcaaaggtgtggagatgggagcctgggaatggcctatggaaatagttggccagggtcttgggccaagagcaagagctggaaacatagcttgctcctgattgtggaggcttttgaatatttgcctgtggactttgtatttactaaccattaaaagttattgaaaagactgggcacggtggctcacacctgtaatcccagcactttgggaagccaaggtgggcggataacgaggtcaggaattcgagaccagcctggccaacatgttgaaaccccgtctctactaaaaatacaaaaaytagccaggtgtggtggtggttgcctgtaatcccagctacttgggaggctaaggtaggagaatcgcttgaaaccggaaggtggaggtagcagtgagccaagatcacgccactgcactctagcctgggcaacgagcgaaactgtgtctcaaaaaacaaygaaacaaacaaacaaacaaaaaagtttttgaagaaagtcaaaagaatgtattctgtattctaaaaatgcattctaagtgttacagctcttttagaatttgtctagcaggttttccagttttcmctggaacccctcccccacaaaaagaaaaaaatgcattctaaaaaaaaactaaagaatgctttaggaagtattgactggcagtagtgtacagcatgaataggatcaaggcaacatgtaggatgtttgaggtaaagagaatgttagcagggacaggccagtgagaatgaaggggaggatcggaggaagacgaggcaggaggaatggccaggggaaaggaactttcttgcttagtgccttgcacttgagataagggaacctgtgacatttttaaggaaatgttttatggaggtgctgaaaacttgtcctgtctcccatcttttgttcatacagattccccaaatagccctcaactctctcccagcccccaatcttactgctggtgataataaatagaagatacagcatttctgtgctgagagaatatagttwaggcttttccagggtgtgaagaggagagttgggaggttctgggtttagtcctgcctcctcactggccatgtgacctcaggaaaatccacggtcactcagggcctcacttgatcttagttttcccacgtgaaacaggaacaggagtacttgtctcaccttttaataggatgtcttgatataagatattggcttagaagatacattttaaacttaartgactgtacagttactgggtggtagcctgctcattgtgactgttgccactcccttctgcattactatttaaatgcctttgtgcttacaacctaattttgttttcccacctatgggctttgctatctgtgttttgtatctcagttcacttgaagcccttgggagcagctaaagcagttttctttctgagtctcatcaggtcacagtgtgtatgtttcgggaggctaagagggggttgaagagctgtgtgaggaaaaggccctttggaatgtgaagacattcccatttgcctggtaatgggatcctgataggtgccttagtcaggtgggaagcagggctctcgatagggccccattgctcggctgcactggacctaaacatggccctttctggaaatgctaacagtgcatatgattagcaaagaagaggatacgaacagacctggagatgttaaaggcactataggggccaggcatggtggctgtcgcctgtaatcccagcactttgggcggtggaggcgggaggatctcttgagttcaggaattcaagaccagtgtgggcaacacagcgagatcccatctctacaaaaaatgaaaattagccaggtgtggtggtgtgcacctgtagtcccagctactagggaggctgaggtgggaggattgcttgagcccaggagtttgaggctacagtgagctatgattacactactgcactccagcttgggtgacagagaccctagctcaaaaaacaaacaagcaaacaacaaccaccacaatgcgctgtgccattgtgaagtggtggtgttctgcagatgcccagggccctctccctctggagtcagcacctcagccctgcccggtgttcagaatcaggaatgtagtgccccaagcccagggtggaaggagcgcacccagcctgtggtgggacagtgacgagtgggcttcaagccttctccatttcccctccccggtgccacccctctttgaggtggcgtctgtgttgctgtggcatgcacagcaccctcattatttctctctctcttttctctcccctccctctggcactttctcttgtttttctctgcatggtttctgtattattagtcctgaggtaagaactggccgagtgccttgtctacagccccttttcctcctttgctgtctgtcctgcccacccaggccctttgcaccttcttgtctggagagcatcaggagggtcgggtcggggcgttcctctgctggctgtgtgcagccggctccaccttcaggctctccttgccctttcccacccaggtttctgtgcccaggtgtcttctccgttctygtctctccccaggcggagggcctgcagcgaaggcccatgtgggtggggcacctcctcttcttccygacccaagcctcacctcttgtcccctgtgcagtgtggaggtcatccgtctgggccacagctacttcatcaactgggataagaagatgttctgcatgaagaagcggacgcctgcagaagcccgcaccaccaccctaaaygaggagctgggccaggtggagtacatcttctccgacaagacgggcaccctcacccagaacatcatggttttcaacaagtgctccatcaatggccacagctatggtatggtggcaccactggggactgggggcttgcacctcgcctggaaggacagtggaactggggccccacagtttccttaacattggttttttcttccttcctagttgggtctgaggggcctagaagaaagggtccatcctggccaggcacrgtggctcatgcctatagtcatagcactttgggaggctgaggtgggaggattgctcgagcccaggaatgcgagacmagcctgggcaacatagtgagaccacatccctacaaaaaatttaaaaattagccaggtatggtggcatgcacctgtggtctcagctggccagtgactcaggaggctgagatgggaggatcacttgagcctgggaggtcaaggctgcagtgagccatgatcttccactgcactccagcctgggcgacagaatgaggccctgtctctcgagaaaaatccacacacaaagaagaggtccattctgtgtcccatgtcaagaagcagatcctggctgggcgcagtggatcacctgaggtcargtgttcgagaccagcttggccaacatggtgaaactccgtctctactaaaaatacaaaaaatagctgggcgtggtggcaggtgcctgttttcccagctactcggggggctgaggcaggagaattgcttgaatccaggaggtggaggttacagtgagccgagtttgygccattgtactccagcctgggcgacaagagtgaaagtctatcaaaaaaaaaaaaaaattagattctgagagtcctccccttgtcctctcctgatgccctgaccctggtctcagctccaggaattaggggagctccttggctgtttgaagtgagacactggcctctgggcatcctggccaggyggaaccctgctagactctcccctgttgctgctcagggtccttgtgagtctgtggaatgtggctgtggttggacttcccagtgtggcccgtggctgtgctgctgggatggcctggggcagcatgtggggctgacttttatgcagagtgtggacccctcttgtgactgctttctgtactgactgatgcctttcggtcagtgtctgagccttgtctgctgctcaggtctaatgggtgcaaggaggcctgggaggtgtggaattggagctgccctgaggggggtgccgcctagggtagagacagggatggtgagcagtgggtgccggggctctttcatggccaggccttggggttctggaatctagggtgcctgatgcctcctatcccgcgagtcagcaatgtgactgagtgactcacactgtgacagctgctcagcgattagggttgaggggctcagtgcctacggggattctgcattggagatgtttttccatgctctggagctctctggctctgacattgcttctttttctgccctggctgtatgtaggtgatgtgtttgacgtcctgggacacaaagctgaattgggagaggtaagattcagtctccctaattctatgtgccagtgaaacagggtgcctggccagtaacagtgtagtcaggagtgatgtgttgtctggataggaaatggaagctgcttggagaaatgggtgttttaaggcagaactggtgatgacggaagtggaaattttgaggtccaccgtggacaggagcctactgagagttgggagggcagggatgaacccttccccgggatgcagcctggcactctagcctttcctaagagccttcttatgtgtttcagaggcctgaacctgttgacttctccttcaatcctctggctgacaagaagttcttattttgggaccccagcctgctggaggctgtcaagatcggggacccccacacgcatgagttcttccgcctcctttccctgtgtcatactgtcatgtcagaagaaaagaacgaaggtgggccgaggagccggctcgcactctcctgacctgactctgcccttgggctctgctctgctctgcaatgcggctgggctggggcttcctgggcggggcacgtggctgagggaagccacttatatcacgtgtattcttcctccccacccaggagagctgtactacaaagctcagtccccagatgagggggccctggtcaccgcagccaggaactttggttttgttttccgctctcgcacccccaaaacaatcaccgtccatgagatgggcacagccatcacctaccagctgctggccatcctggacttcaacaacatccgcaagcggatgtcggtcataggtgaggccaggcctggggtgctggggcgtttggggacagcattcaggcctggaatgggtgaagtgtgccgggtgactcttgatgtgtttatgttgggggtctttgcctgtctgaatttttctggcactttcttcacctgccccattcatagkgcggaatccagaggggaagatccgactctactgcaaaggggctgacactatcctactggacagactgcaccactccactcaagagctgctcaacaccaccatggaccaccttaatgtgggtgtgaggagaggaggggccagcctggggggttctactcttagtgtgggggaggcgacttaagtttgttttattgtgtaaatttaaggtctacaacgtgatgttttgatgtgtatatatagtgaagtgattactacagtcagacaacttaacacatcagccagctcccatagttacctctttttatgtatgtggtgacagtccctaactgtggaatgtggcacacacccagtctacagtgcaggattattcattgtcgccctcacgctgtccattagctctccagacttacccaggtgtgcctttccactctgcctccaggagtacgcaggggaagggctgaggaccctggtgctggcctacaaggatctggatgaagagtactaygaggagtgggctgagcgacgcctccaggccagcctggcccaggacagccgggaggacaggctggctagcatctatgaggaggttgagaacaacatgatggtacgggctgcgggacgggccaaggatgggcacggagggctcatgcctgcaattcttgtgccaggaatccttgtggtattttcagctgctgggtgcaacggccattgaggacaaacttcagcaaggggttccagagaccattgccctcctgacactggccaacatcaagatttgggtgctaaccggagacaagcaaggtgagagcccagcagggcagagccagttgcaactgacagtagccctgttggacccttgcatggagccgaggacatcaggcaggcaagtgtgctgaccttgttgggtgcctgtccgtagctcctgcgttctctcttggtagagacggctgtgaacatcggctattcctgcaagatgctgacggatgacatgactgaggttttcatagtcactggccatactgtcctggaggtgcgggaggagctcaggtaaacaagaagcccagggraggcggtgctgtgcgttgtgcccagggctcaggtgggggtttctggaccatttagacttgaatccctgctccccactgccrttctggaagaccacaaccgtatcatttccacctcgacaggaaagcccgggagaagatgatggactcatcccgctcygtaggcaacggcttcacctatcaggacaagctttcttcttccaagctaacttctgtcctggaggccgttgctggggagtacgccctggtcataaatggtcacagcctggtaggcatcgctatccttarcttgggcagtatctttccagtgagcacttctgtccagggcttttatatcttgttctaatttcccctgatttcagagaagactggtctcaaaggggactgggaggagctgagactcccaggtgtctcctggaaagacyggctctctcaggtttctctgtgctccaggcccacgcactggaggcagacatggagctggagtttctggagacagcgtgtgcctgcaaagctgtcatctgctgccgggtgacccccttgcagaaggcacaggtggtagaactggtcaagaagtacaagaaggctgtgacgcttgccattggagacggagccaatgatgtcagcatgatcaaaagtgagtgtgggctgtgcaggtgtgtaggctgggcttgaggctggggaggggcccactgaggtctctggactgcagaagaatgacgggaagggggttgtaacttggtaggctctaaagtgtgtggccggtggccatcttcaccctcttgtcatctcttgtctctgcagcggctcacattggtgtggggatcagtgggcaggaagggatccaggctgtcttggcctccgattactccttctcccagttcaagttcctgcagcgcctcctgctggtgcatgggcgctggtcctacctgcgaatgtgcaagtttctttgctatttcttctacaaaaactttgctttcaccatggtccacttctggtttggcttcttctgtggcttctcagcccaggtaataaatgttcccagtccactgttgtgcaaatctgtaaacctgagggcagaggttctgtcttgtttatcactcagtcccccagggcctagctattttctggtacatactcttaaaaaatgcttattaaaggaggagagaaggagcctcrgaaaatttcttagggttctctgtatgtgacatcagctgtcttcctgtgcctgatgtgtagcaaagaaaggttgcatgctcccttgctccctgttctcttccagaccgtctatgaccagtatttcatcaccctgtataacatcgtgtacacctccctgccagtcctggctatgggggtctttgatcaggtatgggggagtttgatgatcagatgggatgcggggaaggtcactgcttgaaggagtcacatagacgtggtgtgtgacacttgtgcccatttcctgtggccactgggaaggcagttctttcagccggggaaggtgtggctggttctccctcctggctgcagctgatctagaactctcttgggttgctgaactaagttagtctggrggtagctggcttgaggttggttctagctgccaaagactttggaaaggaggaggcagggacagagtcagagtctgcccttggtcatccagggtcaaaacggcaacctctgaggccccctatgctacatggtcctcccacacaggatgtccccgagcagcggagcatggagtaccctaagctgtatgagccgggccagctgaaccttctcttcaacaagcgggagttcttcatctgcatcgcccagggcatctacacctccgtgctcatgttcttcattccctatggggtgtttgctgatgccacccgggatgatggcactcagctggctgactaccagtcctttgcagtcactgtggccacatccttggtcattgtggttagcgtgcaggtatgaggccatccaggaactcccctcttctctggaaggagtgagccttctgtccctggggctgccctgggcaccacagttctgtttctgggggaaggggcttttagggcrtgcgcctgcctgactatgcctactttctgcagattgggctcgacacaggctactggacggccatcaaccacttcttcatctggggaagccttgctgtttactttgccatcctctttgccatgcacagcaatgggctcttcgacatgtttcccaaccagttccggtttgtgggtaagtccccgtggcctccttgaatcggtgaggaatcacagctgttctgggactaacaggaccatcagctaatctgcacattcaacatttcttatgtgccaagtattctgtttattttatttatttatttatttattttcgagaaggagtcttgcccaggctggagtgcagtggtgcgatctcggctcactgcagccttcgactcactgcagcctctgcctcccgggttcaagcgattctcatgcctcagcctcctgagtagctgggattacaggcacacgccaccaagcctggctaatttttgtatttttagtagagatagggtttcaccatgttggccaggctggtcttgaactcctgacctcaggtgatccactcacctcggcctcccaaagtgctgggattacaggtgtgagccaccgtgcccagctagcacagagaaatctgaataaagrgaaagggagcctgccatgtggctctctgggaactgtcaatccaggaagaggaaacagcaatataaakgccttcagccctggcctgggaggaggtcttctgcacgtggagctggggaggagtggaggaaatgagttggagggtgggggtgtggaatgagtcaggattatttaagcccttatgggtcagaggaagaactttgagtttttgaattttaatctaaatgtgagaggaagccattggagggctttgagcagagaaataccagaagcttacttatgtttttaaagggccgctcttacagtttcgtggataataaagtgtagggggcaagggtggaaatgggagactaggaggtgagagcagtcaccaggtgagcctaatgagggctcggaatagagtaaaaggccgtgagattccagagatgttttgaaaatggaaacaacaggccgggcgcggtggctcaagcctataatcccagtactttgggaggccgaggtaggcggatyacctgaggttgggagttcaagaccagcctgacccacatggagaaaccccatctctactaaaaatacaaaattagccggacttggtggcacatgcctgtaatcccagctacttgggaaggctgaggcaggagaatcgcttgaacctgggaggtggaggttgtggtgagccgagatcgcgccattgcactccagcctgggcaagagcaaaactctgtctcaaaaaaaaaaaaaaaaaatggaaccaatagattgaatgtggggtccaaagaagagagagaaatgaatcaagataaaaaacaacaaaaaarcagaaattaaaaaaaaatttttacagaaatgaatcaagatccattgcagggtttttagttggagcaactgaatgggttgtggcatttcctgagttgagaaagaccaggatcagatttggggaaaggaaacaatagttgagtttgggccacgggaaattcaagatgcctggtatgtcaagtctggcagttgaagcagcaggtctggagctttgggggagtttggagctaaatttggagatttacatttggagggtgagcctggagaagcgggaagccagaggtgacttaggctttgagagtagggaagtggagctgccagaaatgggaacggggaatgtctgcctcgtgactcccaaggccactgactcctcttcatccccagggaatgcccagaacaccttggcccagcccacggtgtggctgaccattgtgctcaccacrgtcgtctgcatcatgcccgtggttgccttccgattcctcaggctcaacctgaagccggatctctccgacacggtgagaagccaggctacctgctgtgggaggcagagatggggtggctggaaaggcctcrtgtgaacactgkggggctctgtggggccatgtggctgttcagtgtgttggtgctyatctgttcttcctggggacagacaccctgtgcagctggccacagaggcctctgcgtcagcctggtcccaggtgctgtgggtcggaggcctctgtgtcagcctggtcccgggtgctgtgggtcccttctccttggcgatatctgacacctccacgctgacagagggctcttccctgtgcccctctgcaggtccgctacacacagctcgtgaggaagaagcagaaggcccagcaccgctgcatgcggcgggttggccgcactggctcccggcgctccggctatgccttctcccatcaggagggcttcggggagctcatcatgtctggcaagaacatgcggctgagctctctcgcgctctccagcttcaccacccgctccagctccagctggattgagagcctgcgcaggaagaagagtgacagtgccagtagccccagtggcggtgccgacaagcccctcaagggctgaaggccgaggatggatgccctgtgccagtgaccagagcacccagggctggccagtcactgagggaacagygtctcggaactgctggtcctcattccttgcttcccgtccccccggtagactctgtcctgctggtcccaccacacatggctgggacatctgttcccagctgtaggcccttccaccagctggggagctagagggagcaggyccaagggcagagcagaggctgaggcacggggagccagccccactcggggaccagaagtggaaccaaaaacaagaaaaaactgtgagagattgtgtctgcccctgccctgcctgggacccacagggagactataatctccttatttttttactcctactccccagaggggccctagtgcctctgttcctgaattacataagaatgtaccatgccgggaagccagagacctgcaggggcctcggcccctcacatcgtgtatgtctctccttgatttgtgttgtgtccagtttggttttgtctttttttatttggcaagtggaggaggcttttatgtgacttttatgttgtggttggtgtcttaactctcctgggaaaaggaggctggcacacactgggatgccgcagcctggccggctgtggggtggtttgggaggatccatgtcggctctgcctgcagtgaccagtgctctgtggggcagaggagctgaccagggagggaggtacccatgagcagagggtagtgggagagtgtaaaggagggtttggtcctgtctgcttcctcaccttgagagtaaagtgctgccctctgcccccaacacacacacatatcaattcctggattccttagtcctgctggccttgggctggagcctaggaaagtggcccccaaatccttagtgagctaaagctgggtctgaaatttggtcagtggggaggggtagttttcttttcttttttctttttctttttttctttttttttttgagatggagtctcactcttgtcacctaggcaagagtgcaatggcacaatctcagctcactgcaacctccacctcctgggttcaagcgattctcctgcctcagcctcctgagtagctgggattacaggcacacaccaccacgcttggttaatttttgtatttttagtagagatgtttcaccatgttggccaggctagtcttgaattcctgacctcctgacctgcccacctcaacctcccaaagtgctgagattacaggcgtgagccaccacacccagctcagggaggcgtagttttctttaattttaaatttaaacccaagtttattggcagactcccttttgacctccctttgcctccccatctggtgctttcttgcatctacaccccagggccctgtggtggggctgcagggggaagctgtgcacctgagatgaggctggaacgggaattggcctmtctgctcccttcttcagtaagcaaggagccccgcccctcaggcccagcctctggcaagaggtggtggaatccttgtgccgggtagtagaggaggataagggcaaaaccaggcccaggccagtgcctggcttggtctggatgggacactgtcagagtttggccacagcctgtcctttacttcatccacacctatgaagctattccctaaataaggcatttcccaagttagtcgctacctaatcagccttgagaagaatcctttcctcttctttgatagtgggtcgggggattcttcaggaatggtttggagctgggagtgggtagggggattttaaatgttccatatgggagccccaaaggaactggatgggctgcagtgaggtgggggcgggtgggcagggaatgggagaggggaagtcttggcagggaaatcccttttggccacacagtttacaaacccagtatcatgtctgtctgtgtgtctctcaaggtgagagtctgatttttataccaaagaggaaatgattttttttcatattttgtttgtctatattatataaatatatatatacagttatatatatatatwttattttttggttctctctcgttttttagggagggaagaaagtaccaagttgcattgagctgtaattaaggaacattataatttatgacacatttctatacttgcaaaaattatatcattttatggatataagagaaaaatgcctttttataaaatttcratttctgagaagtgtgtaatttgtctcttttctgatgtttaaccaagactggtggtgaaagtaaagacagaaactgtctcttaaatgtaattgagtgggtagatctgggatatcttggacaaattggaatctgactggtgtgggatagcacctcatccatttgcagacctcccgggatctgagtttcagctgaagatgaagacggggcagtgggtggtactgagcggcatatcgtatggactttggctgggtgcctaggaccttgagctgtttacctttctccaaacgcaggccaacctgtcatccctaacacacgccagatggatgtgtgtgtagggaaagtacctggtaaatattgtaaggttttgttttttaactctgcgcttttccgcatgcctcacatcttcctggcttctcaagtgagtatcaaggaagctaaagtcttatattaaagggagctttcctccagggaagggagggcggatgaggatggggtcctaggagtcagggccagggttagtgctggcctgaggagaaagaagtatagcttcctccgccgatggccaatatcagcatgatccagccccacccgcaggctaatttccccctgasccagccagtcttcagttatggaacaatccttctcaaaaacgtagactgggtgtggtggctcaatgcctgtaatcccagcattttgcgaggctgaggcaggaggatcacttgagcccagcccaggagttcaagaccagcctgggcaacatggggagaccccgcctgtattaaaaaaaaaaaaaaaaagggtgggggagcggagggtgtatggggggaagatgtgaagataagatctgtttccctcttcaggagaaacggcccctggcgggaatcccgccacagaccgccaggaacaccacctgacacccacctccacccagggagaggctgtccagtccacacaagcctttctttggggtctgtctggaaccctgagctttgggcagcaagtggcatctggcttcagtgcccccacccccgaaacacagaaagaagccttaatcccttgaggctggtgaggccccaagtccacccctcccacaagacaggtcttcagcactgcgctggcctcccrttgggggtctgttcagccactgggaatgtcttccttggctcctctcgctgaccctggctctcctgcacccaggatcctattatgtgtgtctgaggggcagggccaatgtcattttaactttcattgcctcttggggacgcgttttctccgtcgcgatatagacacacgcctccacggaggctccgggcactcgggctccccgttttctcccctctgccgcaggcatccctggtcttccttccctgcgctgmctgagcacctgggctcctgtgggagtggcttccagcccctaggtccccatcgtcctagtgccttttctgagtgcgtggaggtgaagtctgtccgataccgcagctttgttccactgagcctgcttatctccaagggcgttcctctccactccrctaaagcagcacacacccatgggcgcccactgccgtcgggaggagctccacctctgaactctcacaattcattcagcatttggccatccatattcttcagttcttcccgcttccatctgtgctcccagcgaaaactacggcccctccctttcctcctggtcgcttgcttccatatgtgaacccttacttgcttcccaatccagcccggagcccgtggtctggtactcgtcgctttgccccggaacattccagccttgggtcagcccagcgtctcccagggtgagctgtggaatgctgaagggcagcacacaaccacggagcaagaggagcggcagctgcccgggctccctccgcaggcgcctctgcacggcgaggagacgctgggaacctcattctcctgcccctccctcaactcctgccaccgcctcccaccctgccctcagcagatggtgctgcctcctacttcacggagcaaataacttctgcggctttcctctcaactacaaatctcactgcgcacaggcacgccggcyttcccctttcctttcccctgcctggggaggctggactctcctgtcccgctccctgtggccccgcccctcccctcctcccaccactgcaccttccattgtccttcaccaggaccttctcttgaccctgccttcatttccctctccgttgattctttccttccccaaattagcctgctcagttttcttccccctcacctgacccctaacccctatcaactctgttgtggtctgtgtccctcccattagcctctctgttatctcttccactgcctgtaatctggcatctccttcaccagtccctgaaatgctttcactaaaatcacctttgaccttcatgttggccaagtccagaaggcatttccaggtctgatctgacttgcaatctcttagtcatttgactgtgttggctgccttctccttgaaactctgccctctgctgacttkgttccactttctcttggtttaactgctgcctctctggttgatccttctgtctccttccttggagctccttcctctgttcttcttccyaccatgccccaggactccatacttggctctaagcttttctcttctgtgcagggtccttgaaggtccccatgcaaacccatggtttaaataagatttgtttaaacaartaagatttaacaattaaatggagagtcaccattgttcacctctagattggacttcttccttccactccacgctccagacccttgtattcaattatccattggacctctccamtaggacgacccaccaccacctgttattcaacataccccacactgaacattgtttttcccaacacctgttgctcctcccgcatcctctatttcagtgagcagcacgcgatctcaccagtcaccaaagccagacacacatgtcctggagaaaaccctacaacctctgctctggggccaccacactgtaaatcatatatttcatcttctttgatgtggagcatgaaatgattaagctgcaatgtcctgagccactgtttcccagtgattgtgacccaggcagggtcacgacagccatatttctgtccccaaagcggggccatctaggttgggactcaaaacacaaagaaattctgccacaaaggttcaatgtcactttccttggccccaaaagagaaactggagagaycagagtgctcagattaggtaggcagctgcagcctcccactgtagccaccctgcagagcatgagggagggactcactgataaagcaccaggactacccactgcagtctctacttcagaggaagcaagccattgatggagatgtactaaacactgggctctgcggctgaaggaaggagctgagttctcctgcttatctctgctccagtgtcctatcttgaaggactgtgtcctgaccccagtgagaaacatgacctrtctgaccctcccaacccttcctggaaactttccagttctcagtgagttgctgggagctgccctgctggacacccgcctggggagggtgtagacttatcttgccgggctgagagagggaagtctttcccaatactagtctattaaaacacacactgggctgggcgcagtggctcaygcctgtaatcccagcactttgggaggccaaggcgggtggatcatctgaggtcaggagttcgagaccagcctgactaaaatggcttcaccctgtctatacgaaaaatacaacaaattagctgggcatgggggcagacgcctgtaatcccagctactcaggaggctgaggcaggagaattacttgaacctgggaggcggaggttgcattgagctaagatcaggccgttgcactctagcctgggcaacaagagcgaaactccatctaaaaaaacacacacacacacacacacacacacacacacacacacacacacacacacacagtggcccggcatggtggctcatgcctgtaaccccagcactttgggaggycaaggtgggcagatcgcctgaggccaggagttcgagaccagtctggccaacatggtgaaaccctgtctctactaaaaatacaaaaattagctgggtgtcctggcgtgcccctgtaatctcggctactcaggaggctgaggcaggagaatggcttgaacccaggaggcagaggttgcagtgagcagagatcgcgccactatactccagcctgggcgacagagtaagtctccttctaaaaaaataaaataacaaaacaaaacacacacacactttccctctctctctctctccaaaacgtgatggagtgtctcctcttaagaaaggagtgtttttggacacagaaagagggagttcctccagcctagcacagcctgagtttggcctgggctggaaattctgcagaaatcttccatcctgccactgggaataggacagggaggcctaagccgtgttttcggccccccggggcccagcagggacatgtgtgggttccaggactggggcaaggaggagaggatgcccaggtttactcaagggcaggcaggaggtgaggagggggtgacaggtggaaggaaaggaccatgtcccactctccactccttcctcatgggccactcttcatttcactcgcagccccgcagtgcacagctacaagctgggggttcayctcttcctggtcccctactaccttgggtgcagcwcttctgccaraaccttctgggcgcctgctgctgtgcctgggctcyccacgcagggagggacacccctggggcggaaggcaggcagctgcatagctgagtggctgcttctacaacacctggagaaccgctggggctagaagcaaacatgcagcagtttgggcct

SEQ ID NO: 10029 - DNA, 22870 bp, Homo sapiens
  misc_feature (12766)..(12766): n is a, c, g, or t
tgctacactcccccagcgccatgacagtttgcaaatgccatggcaatgataggaagttatcctatatggtcttaaaagaggaggcatgaataatccaccccttgtttaacctataatcaagaaataaccataaaaataggcaaccaggctgggcgcggtggctcacgcctgtaatcccagcactttgggaggccgaggcggaaggatcacctgaggtcaggagtttgacaccagcctggccaacatggtgaatccctatctctactaaaaatacaaaaaattaggccaggcacrgtggctcacgcctgtaatcccagcactttgggaggccgagtcgagtggatcacgaggtcaggagattgagaccatcctggctaacacggtgaaaccctgtctttactaaaaaaaaaaaaaaaaaaaaaatacaaaaaattagccgggtatagtggtgggcgcctgtagtcccagctactcgggaggctgaggcaagagcatggcatgaaccagggaggcggagcttgcagtgagtggagatggcgccactgcactccagcctggacgacagagcgagactccgtctcaaaaaaaaaaaaaatagccaggtgtggtggcacatgcctgtaatcccagctactcaggaggctgagtcaggagaatcgcttgaacccaggaggcagaggttgcagtgagccgagatcatgtcattgcacttcagcttggtcaacaagagcaaaactccgtctgaaaaaaaaaaaaggcagccagcagctatcagggctgctctgcctatggagcagtcattctttattccttcactttcctaataaacttgctttcactttactctgtggactcaccctgaattctttcttgcgcgagatccaagaaccctctcttggggtctggatcgggaccccattcctgtaacagtagtagcgagcggggtcttcattattagcatcattagtgccaccatagtgaacgctgtcgactctgacgttgagcccaagcccagccctgccccaagttccttctcctctggcctcatcccagccttgcttaagatcyagggccagaggctctgcctatctgtgccaatgctacaactcatgagagccggccctgctccataatcagtggmtactcttgtgacccctctagtctctctgcagcctggaggggccttgatttttttwkttttttttttttttgagacagagttttgcttttgttgcccaggatggagtgcaatggcgcgatctcagctcaccgcaacctctgcctcccgggttcaagcaattctcctgtctcagcctcctgagtagctgggattacaggtgcatgccaccacaccagctaatttttgtatttttagtagagacggggtttcatcatattggtcaggctggtcttgaactcctgacctcaggtgatctgcccgccttggcctcccaaagtgctgggattacaggcgtgagccaccgcacccggccaaggggccttgatttatcctgacaagtgggcctcctgaggttgaaggaaacctggggtagaggtgattcattgtgggatttccagccttcyttctgcctcccaggcccagcccagccctgatgcattggtgtgtgagtgcctgaatgtgggtgtacatgtgtgtgtttcagatcctgaccccaaactggccccacatcattcatcaggctttttgtgcatttagcaatccctccctgacactcacttggtcttgagtctgtgctgggcacttctggacagccccaaaaactcagcatctcctagatttggggagacaaaactggacaaagaaccttccagcactgtaagcacagcctaggttgaagggaagaacagcaggtcagggagctgggaggagtaaggggagcaaggggtaaccacagaggctccctggaggaagggtcctgccccagaaggtcacaaatcctacatagaccctaaggaaagagcctgccatccatgacatgcccctggcttaaaacaaggcagtctctgccccaactccaagctttaaagggaaatcaggtggggtgcagtggctcacgcctgtcatcccaacactttgggaggccaaggcaggtggattacctggggtcatgagttcaagaccagtttagccaatgtggtaaaactccatctccactaaaaatagaaaacttagctagccttggtggtgcatgcctgtagtcccagctactctggaggctgaggcgagrgaatcacctgaacctgggaaaaaagaagagttactaagaaaatcrtatggaagaggaagtatgtttactattcattaagtagaagtgtgtcatcataaaggtcttcatcttcatcgtcttcatgttgaataggctgagggggaggaagggaaggggttggtcttgctgtctgaggggtggcagaggtggaagaggtggaggaggtggaaggggagagaggagaggcagacayactccatgtaacttattgraaaaaatccacgagccaggtgcagtggctcatgcctgtaatcccagcactttgggaggctgaggtggatggatcacctgaggtcaggagttcgagatcagcctgcccaacatggtgaaaccccatctctactaaaaatacaaaaattatccgggcatagtggcaggtacctgtaatcccagctactcaggaggctgaggcaggagaatcgcttgaacccaggagatggaagctgcagtgagctgagattacgccactgtactccagcctgggggacagaatgagactctgccagaaagaaagagaaaaagagaaagaaagagaagaaagagaaagaaagaaagaaagaaagaaagaaagaaagaaagaaagaaagaaagaaagaargaaggaaggaaggaaggaaggaaggaaggaaggaaggaaggaaggaaggaagraagaaagaaagaaagaaagaaaggaagaaagaaagaaagaaaaaagaaagaaaggagggagggaggaaggggggagggagggaaggaaggaaggaaggagaagggaagaaaggagaaggaagagaaggaagaaaatatggaagaggaagtatatttactattcattaagtagagaatcatcataaaggtcttcatcctcaccgtcttcatgttgagtaggctgaggaggaggaagaggaggggtcttgctgtctcaggggtggcagaggtggaagaggaggaaggggagaggagaggcaggcacagtccatgtaatttttattgaaacaaatccagatataagttgaccctcacaggtcaaacccatgttgttcaagggtcaactgtactccgtatgacactctagtggtggacatatgtcattatacatttgtccaaacccatagaatgtacaccaccaagagcaaaccctaatggaaatgatgaactttgggtgataatgatgtgtcagtgaaggttcatcgattgtaacagatataccattctggtgctggatagtgataatacgagagtctgtgcatgtgtcaaggcagggagtagaactctctgtaacttctgctcaattttgtcacgaacctaaaactgctctaggccaggcatggtggctcacgcctgtaatcccagcactttgggaagctaaggcaggaggatcccttgagtccaggagatgagaccagcctggccaacatagcgagaccctcatctctataaaaaattaaaaatagaggccgatgcgggtggatcacctgaggtcaggagttcaagaccagcctggccaacatggtgaaactacatctgtactaaaagtacaaaaatcagccgggagtggtgacggggacctgtaatcccagctactcgggaggctgaggcaggagaatagcttgaacctgggaggcagaggctgcagtgagccaagattgtgccactacactgcagcctaggcaacagagcgagactctgtctcaaaaaaaaaaaaaaaaaaaaaaaaagcctgtaatcccagcactttgagaggccaagacrggtggatcacccragrttgggagtttgagaccagcctggccaacatgctgaaatcccgtctctactaaaaatacaaaaattaactggaagtggtggacgggcacctgtaatctcagctccttgggaggctgaggcagragaatcacttgaacctgggaagcagggctgcagtaagccaagattgcaccactacactccagcctgggtgacagagggagaccctgcctcaaaaaataataataawaaaataaaaaataaagctgggtgcagtggctcacrcctgtaatcctagcatttcgggaggccgaggcaggaggattgcttgaggccaagagtttaagaccaacctggccagcatatcaagactccatctttaaaaataataataataataaaactgttctaaaaaagtcttaaaattatttatcggccgggcatggtggctcacgcttgtaatcccagcaatttggtaggccaagttgggtggatcacctgagtcaggggttcaagaccagcctggcctacgtggcaaaaccccgtctctactaaaaatacaaaaattagccaggcatggtggcgcatgcctgtaacctgagctacttggtaggctgaggcagggaggcaggagaattgcttgaatctgggaggtggaggttgtagtgagctgagatcgtgccattgcactccagcctgggtgacagagcgagactccgtctcaaaaaaaaaaaaagttattgatgacttagattttcaacactgccttaaattttgcggcaaagaggatgcctcaacctagtccctgcctcagcccacaaccttcatatggttctaccaggcaaagctcctatccccaaatcctgggaaacgagcttggaggaggacattgtctcttactcccatgggaagtgtcccccattcactctatcacttagcaccctacatcctgagcttccactaygtgcccagcttttttctgggaggtccccagaaagaggacacctgaggaggccccaggggtggcccccaggggaatcccaggcctggctcaggctggacattcccaggcctgccctggctgagtctccagctggtgggtctcctggaaactccccgggctggttttgaggtgggagccccacagggaagcaatttacatacacaacagcccagtcatgtcaacctgccccatctgatgccagaataaaggggagatgggtccattctgcaggtctcagtcaygggcacccggagaagaggaaggacatttcactgtcagcccaggtgagtccagaagccagctcctggaacaatgccagggtcctgaacactcaagctcaacccctgctctcagctactgctggtggcttgaaatcaagggctggaactggatgagaggtgacagcccctggtccccatgggctcagagcaggcctcagcaaacactgtcctcggcccctgcacccatgctctgcctgagcctgaagtgttggttgcaaaaaaaagcaggaggcagtgccaacttcaggcctcagcaaacactgtcctcagcccccgcaccgatgctgtgcctgagcctgaagtgttggttgcaaaaaaaagcagaaggcagtgccaacttcaggcctctgcttctctcctctccctcaacacagccggtcttaccagtacagcaggcggcagctgagagtcccctctggtggccagcagcggctacagagccgtcactatggggagggacaggacttgaggggttgcctcggtccacctcactggagaatgggcagagtttatggagtctgaaccacctggtctccaggcccctctggggatgggcctggcttactgaccactgacctcagcctaggagggacagaagagactgggggagaccaggatgcccagatgaccttgacccagggtacgctgccccatgtccctgctgcctcccgcccacagctctacgagaggcaggtctgtcattcgccgctggactttgacagtggtcaaaggctctgctcagttctctgtgcctgtctccctccagcactgccgaggttctctgccgaggccaaccagaaataccccttggaagctggaatcctgcaacaatggcccagggtgtcctctggatcctactcggattgctactgtggtcagacccagggacaggtgagtcagggggcagagtcctgggaccaaacctcttggctctgcagaaggcgtactgctgtcccrtctatgtcttgccctgcatggagtgaggctggagactcaagctctcaaagaagctccagcatggggacatagatattcccagctccacagagtcaaggcaaggataagggaaggaatctggggcctggagagcaaaagtagggaaggcttcttggaggaggagacataagagctaggctaggaagaaagagaaatgatttkggggagaagccagaaagggcattttttgcagagaagagcaaagctacacaggttaggtggtggactggagaagaacctagattctagaccaggagagtgtgtcgagtaagacttcctggattcaaattctactactggccaggcctgtaatccmagcactttgggagatcaaggcgggcagatcacttgagatcaggagatcgagaccagcctggccaacatggtgaaaccccatctctactaaaaataccaaaaattagccaggcgtggtggcaggcacctgtaatcccagctacccaggaggctgaggccagaaaattgcttgaactcaggaggttgcagtgagctgagcactactgcactccagcctggatgatagagcaagactccgtctcaaaaaaaaaaaaaaaaaacaaaggcaaatcctgcctctgccacttccttcctgtgtgaccttaggcaggtaacttaacctctctgtgcttcagatgcctcatctgtaaagggacaccatcttagtccctttrtgcttctatataggccagggtacctgaaactgagtaaatttgtaaagaagagaaatttactttcttgcagttctgcaggctaggaagtcccaaatgccagtgctttgatcttggacttcccagcctctagaactatgagaaataaatgtctgttctttttttttgttttttagacagagtctgactctgtcgcccaggctggagtgcagcagcatgatctcagctcactgcaacctccacctcccgggttcaacagatcctcctgcctcagccccccaagtagctgggattacaggtgcccgccaccgcacccggctaacttttgtatttttagtagaaacggggtttcaccatgttggccaggctggtctcaaactcctgacctcaagtgatccgcctgcctcggcctcccaaagtgctgggattacaggcatgtgccagcacacctggccaaatttctgtttttcataaattacccaacctcagagatctgttatagcagcaccaatgtactaagacaggggctaaaaggacctacctcacaagagttgtgaagactaactgcgttaaattattaatatataagtcacctagactagtagctagcacatagtaaatgtttactgaaagttagctattatttgataacccatctctgaaccagctctgagcctaacttagcatttctaggtttgcagttcagccactgacatttccccaacatggcacaagcccatcctgctcttccccctgcctcccaggctattttattttattttattttattttattttattttattttaattttattttattttatttattttattttatgatggagtctcactctgtcacccaggctggaatgcagtggggggttcttggctcactgcaacctccrcctcctgggttcaagcagttctcctgcctcagcctcctgagtagctggggttacaggtgtgtgccaccatgcccagctaatttttgtatttttagtagtgacggagtctcgccatgttgatccggctggtcctgagctcccgacctcaggtgatccacccgcctctgcctcctaaagtgctgggattacaggcgtgagccactgcgtctggcatttttttttttttttttttttttgagacaaagtctcactctgtcacccaggctggagtgcagtggcgcaatctcggctcactgcaacctccacctcccatgttcaagtgattctcccgtctcagcctcccaagtagctgggattacaggcacacaccaccatgcctggstaatttttgtatttttattagagatggggtttcacggtgttggccaggctggccttgaactcctgatctcaggtgatccactcacctcggcctccsaaagtgctgggattacaggcctaagccaccacagccagtcccaggcatctttcaaaatacctttccctctaacatccccaatttttaacttcaattcatcacaaaagaccatccatctctccctctcacgatctggggactcttccacttttgtccactgcaatgtcactacctaccttctgccaccttcatctctcacctccacactgtctccccttttctatcctggcaccccaaaaatccatttccttatggcagccaaacaaatctaagcctaagaaaggagtcttagaatgccaggttcgtcacacctctgtcctgctcataaatctgccatggctccccagtactcacagacagtctgagctccttaaccaacaggcaatagtctgtgtacctcactttcctcatctacacaaggatagtgttgggggtcatggggttatcagatggagggctgggagcattgggtagatgtggaatcaatacraggaggctcaggaatgggtggggctgggctaacacattctttcctcctgcagcctccctgcccctgctcatggactctgtcatccaggccctggctgagctggagcagaaagtgccagctgccaagrccagacacacagcttctgcgtggctgatgtcagctccaaactctggcccccacaatcgcctctaccacttcctgctgggggcatggagcctcaatgctacagagttggatccctgcccactaagcccagagctgttaggcctgaccaaggaggtggcccracatgacgtacgagaagggaaggaatatggggtggtgctggcacctgatggctcgaccgtggctgtggagcctctgctggcrgggctggaggcagggctgcaagggcgcagggtcatwaatttgcccttggacagcatggctgccccttgggagactggagatacctttccagatgttgtggccattgctccagatgtaagagccacctcctccccaggactcagggatggctctccagatgtcaccactgcagatattggagccaacactccagatgctacaaaaggctgtccagatgtccaagcttccttgccagatgccaaagccaagtccccaccgaccatggtggacagcctcctggcagtcaccctggctggaaacctgggcctgaccttcctccgaggttcccagacccagagccatccagacctgggaactgagggctgctgggaccagctctctgcccctcggamctttacgcttttggaccccaaggcatctctgttaaccawggccttcctcaatggcgccctggatggggtcatccttggagactacctgagccggactcctgagccccggccatccctcagccacttgctgagccagtactatggggctggggtggccagagacccmgggttccgcagcaacttccgacggcagaacggtgctgctctgacttcagcctccatsctggcccagcaggtgtggggaacccttgtccttctacagaggctggagccagtacacctccagcttcagtgcatgagccaagaacagctggcccaggtggctrccaatgctaccaaggaattcactgaggccttcctgggtgaggaagttccccacaccctgtgatccttcccattacagacacagacgcccccaccccgtatattcagggaagttgaggactaggagagtccagagggggcaataagggatctggtcgggggtgggtgggacagctgcacaggtgaggaaatgccagagttgggccttgaaggatgaataggagttcatctcattttgttttgcttcattatatttatttgcattaatttatggggtacaagtgtaaccttgtttctcgcatagattgcrtagtggtcaagtctgggcttttaggtacccatcactccaataacatacatccacccattaagcaatctgtcatcatcctccctcctctctctccctcacccttctgaatctccactatctatctttccacaygctacatccatgcatacacattatttagctcccatttataagtgagaacttacggyatttgtctttctgtgtttgacttgtttcacttgagataatggcctccagttccatccatgttgctgcaaaagacattctttctttttttttttttttgagtctctctctgtcgcccaggctggagtgcagtggcacgatctcagctcactgcaacctccgcctcctgggttcaagcaattctcctgtctcagcctcctgagtagctgggactacaggcatgtgccaccatgtctgggtaattttttgtatttttagtagagacggagtttcatcattttatcagggtggtctcgatctcctgacctcgtgatccacccaccttggcctcccaaagtgctaggattacgggcgtgagccaccatgcccagccaacattatgtcattttttacagctgagtagtattccatttcctgccgaccactgtagacaacctcctggcaatcaccctagctggaaacctgggcctgaccttcgtccagggctctcagacccagagccatccaggcctgtaatatatatcatattttctttatccaattctcttttgatggacagttaagttaatttcttacctttgctattgtgaatagtgccctgatcaacatgtgaatgcaggtatctttttaatataatgatttattttcctttgggtagatatccagtagtgggattgctggattgaatgatagttccaatttattattattttttttgttttgttttgttttgttttgtttttagacagagtttcactcttgtctcccaggctggagtgcaatggcacaatctcggctcactgcaacctccacttcctgggttcaagcgtttctcctgcctcagcctcctaagtagctgggattacaggtgcctgccaccatgctcggctaatttttgtatttttagtagagacagagtttcaccatgttggcccaggctggtctcaaactcctaacctcaggtgatccacccacctcagcctcccaaagtgctggggttacagtcgtgagccatcacccggcttttctgtctttttaataatagctattctgattagagtaagatgatatctcattgtggttttaatttgcatttctctgatgattggtgatgttgagcatgttttcctttgcctattggccatgtgtatatcttcttttgaaaaatgtctattaatgtcttttgcccgctttttagtgggtttctttctttctttctttttctttctttctttctttttctttctttctttctttcttttctttcttgaattgtttgagttccttgtaaattctgggtattagtcccataccagtgcatagtttgcaaatattttctcccattctgaaggttgtctgttcgttctgttgattatatctttggtgtgcagaagctttttggtttaattaagtcccatttgtctactttgtttcttttgctctgtgcttttgaggtcttagtcatgaattctttgcctagcccaatgttcagaagcgttttccttaggttttcttctggtattttagagtttcaggtcttacatgtaagtctttaatctatcttgagcaatttttttttttttttttttttttttttttttttttttttgagacagagtttttgctctgttgcccaggctggagtgcaaagatgtgatctcagctcactgcaacctctgcctcctgggttcaagcgattctcctgcctcagcctcccacatagctgggattacaggtacctaccaccatgcccggctaatttttgtatttttagtagagayggggtttcaccatgttggccaggctggtctcaaactcttgatctcaggtgatccacccacctcagcctccaaaattgctgggattacaggcgtgagctagcgcatctgtccttgagttaatttttgtatatggtaagagttaggggtccagtttcattcttctgcatatggttggccagttgtcccagcaccattagcaccatttactgaataggcagtccttttcccattgcttatttttgtcgacttagttgaaaattattgtttgtaggtgtgcagctttacttctgggttctctatttcattccattggtctatgtgtctatttttgtaacagtaccatgctgttttggttactatagtattgtagtataatttgaagtcaggtaatgtgataccaggctcgttttgcttagaattgcttttgctatttgggctcatttttggttccttgcgaatttcaggrtagttttgtctaattctgtgaaaaatgactttgatattttgatagagattgcattgaatctgtagattgctttgggaaatcngatttctctttttctagaaaatgaggtctcactatgttgcccaggctggtcttgaactcctgggctcaagcaatccacccacctcgcctcccaaagtgtgggattgattacaggagtgagccaccatgcctgcccccaccyccaatttttttttgggggggacagagtcttgctctgtcacccaggctggtgtgcaatagcacaatctcggctcactgcaacctccacctcccaggctcaagcaagttgtctcatgcctcagcttcccaagtagctgggattacaggcatgtgccaccatgcctggttgatttttgtatttttagtagagaccgggtttcaccatgttggccaggctggtctcaaactcctgacctcaagtgatccacccacctcgtcctcccaaactgctgggactacaggtgagacccactacgtccggcccacccccaattttttttaataaaaataaaatagatttagttgagtatagttagttggtccccagggaggaccaatgtggggtgagactggaccctttccaaatctgagaggaggctgagggatggtctgtatgtgcgctttaatgmgggtggaggaacaggcagagaaacagttcctgaccccagccttcaacccccttgcctgtaggatgcccggccatccacccccgctgccgctggggagcggcgccttatcrgggccgcccgaagctgctgcagctgccgctgggattcttgtacgtgcatcacacctacgtgcctgcaccaccctgcacggacttcacgcgctgcgcagccaacatgcgctccatgcagcgctaccaccaggacacgcaaggctggggagacatcggctacaggtaggaggggcccgaccggggagggggcggggcccacgttcggggatggggtctgagtgggcggagcctgatgcaggggaccgggcttgaacccgaggaaagctggcaagaccaaggaggagtcctgataggtagagcaaagttggagaggtggcgtggcttaggctaggggcggggccttaatagggaccgggaatagctaaatcatgggactcsagtcagggtagagaactagtacaggaggcgggatctgggagaggagcgggacctgtggcagagtctgggtctggggccaggcagagatggcctaaaacagacaaggaggcctggtgcggwggctcccgcctgtaatctcaccactttgggaggctgagaagagaggatcgctggagcccaggagttcgagaccagcctgagcaatataggaagacacccccccacaccacccatctctacaaacaaaaaaaacttaaaaaggccaggcgcagtggctcacgcctgtaatcccagcactttgggaggccgaggcgggaggatcacsaggtcagaagattgrgaccatcctggctaacacggtgaaaccccgtctctactaaaaaatacaaaaaaattagccaggcgtgatggcgggtgcctgtagtcccagctacttgggaggctgaggcaggagaatggcgtgaacccggaaggcggagcctgcagtgagccgagatcgcgccattgcactccagcctgggcgacagagcgagactccgtctcaaaaaaaaaaaaaaaaaaaaaaaagctgggcatggtgttgcgcgcctgtagtcccagctactcggcaggctaaggtgggaggatcgctggagcccaggagttcgaggcttgagtgagttatgatcgcatctctgcactctagcctgagtgacagagcgagaacccgtctcgaaaagaagaaggaggccgggagcggtggctaacgcctgtaatcccagcactttgggaggctgaggcgggtggatcacctgaggtcgggagttccagaccagcctggccaacatggagaaaccccgtctctactaaaaatacaaaattagccgggcgtggtggtgcatgcctgtaatcccagctagtcgggaggctgagacgggagaatcacttgaacctgggaagcggaggttgcagtgagccgagatcgcgtcgttgcactccagcctgggctacaagagcgaaactccgtctccaaaagggaagggaagggaagggaagaagggaggggtggcgaggggaggggagaaggctgggcacagtggctcacgcctgtaatcccagcactttgggaggccgaggagggcagataacctgaggtcaggagttcgagaccagcctggccaacatggcgaaacaccgtctctactaaaaataaaaattwaaaaaaaaattagatgggcgtggtggcgggygcctgtaatcccagctactccggaggctgaggcaggagaatcgcttgaacccgggaggtggaggtggcagtgagccgagatcgcgcccttgcacttcagcctcagcgacaagagtgaaactccatcaaaaaaagaaagaaagaaagaaggaaggaaggaaggaaggaaggaaggaaggaaggaaggaaggaaggaaggaaggaaagaaaaaaaacccaaaaacagaaaagctctctgaattgggcaagaactgggcttgagaaaaggcagaggtggggaggagaagggcagaaaggggcgtgccagtactgaagggcggatccagagaaaccgaacggtcctggagtggcagctggtgtgagagtggaacagagctggatgggacacaggcagcgcgaccgcgcgggtcttggggtcggtggcccttggcacaccaacagaatcggggaggggagcggataagggcccgggtccccctcacgccgcatggtgcttgcttctccctcccctctgcagtttcgtggtgggctcggacggctacgtgtacgagggacgcggctggyactgggtgggcgcccacacgctcggccacaactccyggggcttcggcgtggccatagtgggcaactacaccgcggcgctgcccaccgaggccgctctgcgcacggtgcgcgacacgctcccgagttgtgcggtgcgcgccggcctcctgcggccagactacgcgctgctgggccaccgccagctggtgcgcaccgactgccccggcgacgcgctcttcgacctgctgcgcacctggccgcacttcaccgcggtgagtcttcgcagcctgcactacacggcccgccgcccctccgtctacacaagctccacgaggcccctgccccctgcctgtaacagctgtgcccgcacagcctcagccaggcccccaacttcccggcggcacgtctattcaggaaacctaggyccagcctttgcgggtcactctgcgggcaacatccctgatcctgtgacttctgcctatgcagcctcagctcagccccagacccagccagcctgtcctttycccagctcctaatacctctacctttccagccaaggcatggaccctgacacctgccaacagcccctctgccctcacaacctcagcctggccttcatgacttctctacscaagtcacaacctgtcaggctgcaccacctcatcctggcccgccgaaccttgacctcacccctgcccctacccgaaggccctctgtccacacaacatgaacctaggctgtgaccttttgccttcacaacctctgtccagtccttaatcctgtgttgcaattctctgtccagacaatctcaactctgaggttgcttgtttcgtccctgactccttaacccctgatgacaactcttatgccagcacaactttgacctgatgacctcatcccagcccttgatcgccatcactaaaacaattttagaatcacacctggacaatctcgtgctacctacatactgccactccatttcattaagctattgactagcacatccatctcggcctatagttggctttgtcctcactctctcactttgggccactgtcccctccctgatccagggttccaccaccaggagggcagacccagccacataccacaaccacccccaagcctcacactcccttgtctttttccagactgttaagccaagacctgccaggagtgtctctaagagatccaggagggagccacccccaaggaccctgccagccacagacctccaataaagacagcatggaaacaaagtctctgttcatgcatcatcatgcattgtcttagtttgggtcttcccaaaagcagaccttaagacaataattccagtacaagtagtttattgagaggagatcccagggcagggcacggcagctcacatctgtaatcccagcactttgggaggctgaggcgaggggatcacctgagctcaggagttcgaaaacaacctgggcaatagagtgaaatctcatctctgcaaaaaaaaattttcaaattatccaggcatagccaggcacggtggctcatgcctgtaatcccagcattttgggatgctgaggagggtggatcgcctgagctcaggagttcaagaccagcctggccaacatgacaaaaccccgtctctaacaaaaatacaaaaaattagccaggagtggtgccacacacttgaggtaggaggatcacttgggcctaggaggcagaggttgccgtgagctgaaatcacaccactgcactccagcctgggagacagagcaagaccctgtctcaaaaaaagaaaaaattatccaggtacaatgttgtgtgcctgcagtcccagctactccggaggctgaggtgggaggattgcttgggctgggaggtcgaggctgcagtgaaccatgattgcgtcactgtacagcagcctggagaagagagtgagagcttgtctcaaagaaaaaaaaagaaagaaaggaagaaagaaagaacgaaagaaagaggaargaaggragaaagggaggaagggaggaaggaaggaaggaaggaaggaaggaaggaaggaaggaaggaaggaaggaaaaaaaaaaaaaaaraaaaagaawaaatagagaggtgaacaacccaggtaccgatgcagggaactggaggcagccagggaataatgtgttttcaagcaagtttccactgtaggcaagagagctcagtctcacttcgaagccctgagggagagcataggacacatacctgagtcatcccacacaagggttgagggagctggggtatttatacactaattcccaccagttattatgtgagggctgctctcagggacatgttaattcactggcacttttggaatgcttgttacacagacatagtggactccatctgctagatacaaatggctgcaaatgtcacctcctcagggaagtcctccctgatttttccagctcaaagagtggcatttttgctcagcattcactgcagcctatttccttctaggtcctccttaccagctagaaatgtctcatgtatgagtttaggatcttatctacctccatcatctgtgagctccaggaaggcagaaaccaagtttggttagttctctgcggcctctccagcacctagcatgtaataggcactcgggaaacatttgttgactagacaaaggcttacatgaatcttttgaaactgatattatcgtcttgtacaaataaggaaaacgaggctcagagagaggaaatgacttgtctgaggtcacacagagggagaggggccagctggtactcggctcctggaccggatttatgctgactcatttattcctcagaatggcatttacttacctctggctttcaagtaaacatctgtggaagcctaacagagatacaagaaagtgctcccaagggcacagcttgatgaattttcacaacagcacacagccatgtaaccaggacccagctcaagaaatagaacatgttaagccaagcgtggtggcacacatctgcagtcccagccactacagaggctgaagcaggaggactgcctgagcccaggagtaggagaccagcctgggcaacatagtgagaccctgtctctttacaaaaaaaaaaaaattaaaattagccaggcatggtggcatgcacctgcagtcccagctactcaggaggctgaggcaggaggattgcctgagcccaggaattcaaggttgcagtgacccacaatcatgcctgggaatagccactgtactcctgcctgggtgacagaacaaggcttcgtctctctgggcacagaggctgatgctattcctgtattcccagcactttgggaggctgaggcatgaggattgcttgagcccaggagttcaagacaagcatgggcaacatagtgaggccccatctctacaaaaamcaaacaaacaaaaagttaaaaattagtcaggtagcatgcacctgtagtcccagctactcgagagcctgaggtaggaggatcgcttgagcccaggaggttgagaatgcagtgagctgtgattgtgccactgcactccagcytggccaacagagcaagaccctgtctcaaaaaaaaatcttattaaaaaaaaaagaacaygctaaatttgtgttatatgaattttacctcaattaaaaaaaaaataggccaggcrtggtagcatgtgcctattatcccagctacttagggggctgaggtgggaggatcacttgaggccaggagttcaagaacagcctgggcaacaaagcaagaccctcatctcaacaacaacaaaaaaattgtttttaataagccaggtgtggtggcatgcagctgtagtcccagctactcaggaggctaaggcgagaggatctcttgagcccaggagttagaggttacagagagctatgatggcaccactgcaytccagcctggatgacagacctcatctacaaaaaataataatattcatattatgtataatgtaatattatttatattactatgtaatataaatattatatttttattttatgagatctatattatttttatagacctcatttataaataataataayaataagggccrggcacggtggcttacgcctataataccagcactttgggaggccaaggcgggcagatcatttcaggtcaggagttcaagaccagcctgaccaacatggtgaaaccccgtctctactaaaaatacaaaaaaattaggcaggcatggtggtgaatacctgtagtcccagctactcaggaggctgagtagggagaatcacttgaatccgggaggcagagattgcagtgagccaagatcgtgccactgcacaccagcctgggasacagagcgaaactccttctcgataaataaatyaattaataataataagagtaataataaatcttgccatcttccagaagccccccttgtaccctcttcccagccaccagtgcctccaaaagaaactgataccctgcttgttagacatggttttgcctgctttaggactttatgtaaatggaatcacaaagtgtatactcttcattgttttggggtttttaaatttatttattattgctttttagagatggggtctcccgagggcagggaggggaaaaagaaaaaaaaaagttagatatgaggtctccctatgtcacccagactggagtgcactgcctattcacaggcrtgatcacagctcactgcagcctcgaactcctggcctcaagcgatcctcctccctcagcctcctgaatagctcagattactggcattttatggctttggttttggttttggctcaacattgtttgtgattcacccaagttaaatcattctttagtttgttctcactgctgtatgatattctgctgtgcgaagagatcacaatttattccttctcccactaatgggtacttaggctgcttccartgtggggctattatgcattgtgctgggggggcatatctattggacgtctacctagcaatggaattgctgagtcagagaagatccagctagtagtgttagtagatcctgccaaaccgtttcccaacatgagtgaatgggtctacactccggccaactgtggattagagttctaggtgctttgtattctcgccagcatttgttcagcctgtactcattttgcagagaaggcaacggaggctcagagagaggggcaagtgctgcctccccgtcagggaggcagtctgggtccttcttgctagaagcctggtaacccacctcctctcttctcctccctcgaacctccagcaacctgcccgcactgtgccctcccagcctggctgtggggtggggtgggacagagagggtcacgtggagttgggttccgagggaggaagccaggcggggtgcagacggctgctgattctggggctggtcaggaaaccaaggtaagggagggagtggaggtgggggcagggggattcctggaggcagagctgagggtggggagggggccgagatgagggcagtatgtggacagacactgggcactactgtcactctctcgtcccccaggagacccccccccccaaccatggacccaccgtcgccaagccggacctcccaaacccagcccacagccacctctccgctgacttcctaccgctggcacacagggggcggtggggagaaggcggctggagggttccgctggggccgctttgctggctggggcagggccctgagccaccaggagcccatggtcagcacccagccagcccctcgctcgatattccgtcgggtcctatctgcgcctcccaaggagtcacggaccagtcgccttcgactctccaaggccctctgggggaggcataagaacccaccgccggagccagacccggagccggagcaggaggccccaggtacatggttcccccaccctgagcttgggccgggctgggaagccggatgcttgggttttgtctgcctccggagcatcaaccatacagacacaggaagttgtggggagtgcaaaagcccagcaggaagccgctggggcccagctaccctgttccctctttccccctaaagagggtaggaggagttgccggggtcctgtgggcagagggtccatctgaggaaggaacagtgaatgtaaacccgtgatagtattgtccagaggctaaacggctcttggccccaacgggtctctccttcaatggctcaggcccatcctttcctacctggatatccatcttcagcctgcctcctactctcctaccttctagcttccgtgtctttgttctgagcccttaagcctcagcctctccatcagttcagtgagaataatgatctccattttggagagtatataattttatttgctcatattcattcatttattcaagcagaggtttgttgagcttctattgtatgtgccaggccctgatttaggcactgaggacacactagtgaaagagacagatgaccctccctgccccatggagctcacagtgtagtggaattgacaggaaatccatcaacaagaaaatgacagatgggccaggcatgatggctcacacctgtaatcccagcactttgggaggccaaggtgggtggatcacctgagctcaggagttcgagaccagcctggccaacatggcaaaaccctgtttctactaaaaatacaaaaaaaaaaaagtatctrggcatggtggcacatacctgtactcccagctactcaggaggctgaggcaggataatcgcttgaacccgggaggtggaggttgcagtgagctgagattgcactactgcactcccgcctgggcgacagagggagactccatctcaatggaagaaaaaaaaaaaaaagaaagaaaaaaaatgacagatggtgctaagtgtcacacagggggatctagaagagtaatggatatcacaagaattagggctcaggaatgtaacactagcctagggcccagcattttttttattttttttttgagatggagtctcgctctgttgcccaggctggagtgcagtggcgcgatctcggctcaccgcaagctccgcctcctgggttcacgccattctcctgcctcagcctccygagcagctgggactacaggaacccgccaccatgcccagctaattgttgtatttctagtagagacagggtttcactgtgttaaccagaatggtctcgatctcctgacctcatgatccgcccgcctcagcctcccaaagtgctgggattacaggcgtgagccaccgcgcccggccccaggcccaacatattttaagtgat

SEQ ID NO: 10030 - DNA, 15532 bp, Homo sapiens
  misc_feature (7547)..(7547): n is a, c, g, or t
ggaaaaaaatacttatcttttctatggcttggaagttcttctcagtgagaattcagcacctacaagcaacatcatgacactgcactagtggctaccaacacccaacttattctttctctttttaaattgtttatttgagaarcacaaaatgtatgtgkagaatttcctaaaatatatataaacaatgcaaggaaaaattattagactcatgcacaaaacatttttgaaacaattttactgasgtagagattacatatattaaaatgaacacatttaagtgtagatttcattgagttttgacagtgtgcayagctgtgtaaccaccaccataatcaagatataggacatttccataatctcaaaaagcatcctcatgccctttgcaatcaacaccaaacccaacttccawcccctgtaaccactcctctactttctgtcastaagataaattttgactgctatagtatttcaaacaaagagaatcaagcactttttgtgtgtatattctttccctcagtataatgcttttaccctagaggaaagaaaacacatgttcccacagaaacctagaaaggaatgttcatagtaactttcyttgtaatatcctcaaactagaaagaacacagatattcctctaagggtgaaagggtaaacaaagtgtggtacattcatacaattgaatactattcagcaataaaaaagaatgaactattgatacttgcaacaattggattgctctcaaggctattatgccaaatgaaaaaatccacttgcagaggattgcatactaaatgattccctttatgtggtgatggacaattatgtatcctgctttagtggttttacacaaacctacacaattgataaaatttcatagtaatatacaccaaaaaaagtatatgtaaaaccgaagaaactcaaataaggtccgtaagttaatagttaatagtattgtaccaaggtctattttctggtttagaaaatgtattgatttttgaagatgttatcattgggaaagctgggtaaaaaaatacatagaagctatttttttgtaacttcttgcgatttcaaaataaacatttctgtaataacttgtttgtttttttttggatcttagttagctttttaaaattatgttattttctccttggagaagtcgtacagcttgtattagattgattcctagctacttcatctattttacactctggtttttagaactttattttctaacttttttgctagacaattcactctttattccctttcatctggcttccccttctctcctttactgttcttactgtggacatgaatgacctctatgtcttcaatcacattgtcaccttccaggtttcattttaattgatctcttagtagaatttggcactgaatttgtgcatcatccttgatgtctctgggtgattttttttatgaacctcttaagtaccaaaggtaytggtggcccaaagataacacatctgtgtccctctggattcaatcagaacagctagactaatgctcatgcattcaggaagattgacaatggaggaagattcttggagttwgagcttggtgaactccaggctgaagcactaaggaagtctgcagtgtagggactctgtgggcctgaggaaccaaagaagatcacattggaaatcttttctttcttctctacagtagttcttgaayggatacatttttcctccagtcttgattaattcaaactaacatatcaatgcaacttaacaattatttattgatagtacttagtcccaataagtgcaagtttgttaatggcattattattgcttaataatgtgtttatttcactttaatgcagaataatattttctctggacacaccattctatgttggcatattaaagatatcatcccataacatctagcctccttcttattgagaattcagccgtcaatctaatgttctttggaatgtattatgtcctttgtcctctggttgcttttaacattttattattttctttgacttcctgaaattttactatcaagctgcattttttgttcttcttgcttagggcttttcgggcttcttgaatctctgggctgatgttttccatcagtactggaaagttctctaccataatattcatataactaaataccataatatattgcaaaaaagtaaagctttatacaaaaacatgaataattcctagaatgcatactgtatgattccatttacatcaayatttaaaataggtggccaggcatggtgtctcatgcctgtaatcccagcattttgggaggccgaggygggtggatcacctgaggtcaggagtttgagaccagcctgactaacatggcgaaaccctgtctctactaaaaatacaraaattagctgggtgtggtggcaggcaccygtaatcccagctactgttggtggggtaggggggagctgaggcaggagaattgcttgaacccgagaggtggaggttgcagtgagccaagatcgtgccactgcattccagcctgggcaacagagtgagactccatctcaaaaataaaaaataataaagcaggcaaaaatatagygtggtaaaactacaaaagaaaacaatggttagaattcataaaagaaagaatagtgtttcccaccagacaaggaaaaaagaatgtatttagagaggaccacttggtgtggggagttttctgtggtttgagcaatattcaactttctgacctggtttgtagttacacaatttgaattaaaatagtttaaaatattaatttaaatcctatgccttttctggtatgtgaattatatttcacaaatataaaagtcccacacctatgcacacatacacacacacacaggaaataacaagggagaaactgcttgggcaaactggccagggatagcctctctgaacacagaaagaccatttttattgtctggagaaagacacttcacaagtttgtagtaaactcaccaatattggcagctacgtgcctccttgggtgcactggcagtttgagaggaggtctctgggagtggccttcaggtacttgtgaatttaccttgcaaagtaggggaggagtccctaatttctccttagctgaggtcacccttaaaaagagtctccgggggatagctaggtttgttggtacaaaatattaaaatctaggacttttatttaatctgcaagctacaataggaacaataaataaattattggctgcttcttcattttgaatcccagacctacctccctggtcactttaatgtccaggatatcttctccaaccctcagtacaattgaaagaaattacctggggaattgtcaacatattgagagattctgagattcatagcaattcttaagagatggaaagtttcayggtagcaaagaacatacacagaaaaggctccccagaatcataatggctcctagaaactttcttggatctgcccatcttgtctgaatatttcctccatctttcatgtccctcaagaggatagaatgastctgatttcatctagtttgagtcacccaragctatgctgttcacttgcctgagggaaaaggaacaggytattctgatctgaccattccttcaaagcctgccagagaagaactgtcccctctctgcacactactagtataagtcctgtggtattagggaaactccaggggcctggccactggtgctgcagtagaaccataactgtggttcatctggtttacccacctcctcatatgtaaggtccgcctaagctgagatgtctttcctcaaatcctggtactcatcctcatcactaacccagttaacatattcaaaatgattattacataaaaacatctcagttaccaatgaaactcaggatgtgttgctgtatcccctgtgaagcrtagatttatttcttttaaaattaataactgattggaaggtgaatttccattcaaaaatcatcatttttttatttgcaggataacattggrgatgcaaactaaaagttctcagctataatctaaacatcttctaatcgtacacacagagacataactaagtacctcatcactctcagagatgaggtataagccagggcttactcttctggactaactgaatctccagaactctgtgttagagggaggggatcgtgaataaagggctttayaaacttcyatagggttcaaaacaatagggcgaaagggattcctgaatactttctgggcacaggtctggaatttatgacataagaagaatttggtggtggggsgtcccttaaggcaaaaagtaaaaggattagagtcmcaaagaaaaggagcagagtgaggctcagtaagaaaatcaggtattagggccacaaggctaggcagtattcatacatttgaggagatgttaggggtaagtcgataaaggagtttaaatataagcaaggaatacaggtggatcagtacaaatcattggctgggagaaggaaatttctgctgtaggggaagtggtataataatattatagaggtgtagttaggtaaggagacgtttccgacagggcagaggaagagaacatttcctcctttctcatgggtgccattaggcaaataattatggggttcctggaaggaaaggaggggagatctcaaaaggcaagagaaaggaatgtaaagatgcaagggaagatgctaaatttcagggaaatgagaggaaggaaaggaagacttctgtccgtgaatatgctcaacacaaaaatcgatgctgtcatgtgtgcgtgtgtgtgtgtgtgtgaataygcatgtgcatatgtgtgcacaagtgtgtatgtagtacattaatacttcatggtgttattttaaaacttcatcagggtagtcagtgccaggtcaggagttagtatataactctcttcctctgtgcatggaaatgccagtttgatcttttggcatgtgataataacctccaaaatatcatggatgcaaaaatcttttttatacattactcttgctgtccccaaccacttcagccagcatcttgcttagaccaccatcccacttggctgtagacctgcattgtgccctgttgcaacctgcatccttccagttgctgctcttctcatatagagaagatgctcctagcaatacacgctttgccctaagcatgggcacaagctcttctgtcagttctctacaatgacaatgaagactaagctgcaacgttcattacaatgcactgaatgcatagcaataactgaaggaaattaacagaaaacttaaaatgagatactagatayggctgctcttagaatccacaggttcaataccctggcctgccatcaagtgagaaggatcagcttacctctctccagatgaagtagtcttaaatctctctctcccaactaaagtctaagttgcagccaccaggaagcctcaagaaaggaaaacagttccctcctcagcttacatcttctaccctagggtctgcttctttccaggatgattgacagtgagaaactttactctcctcatgggaaccctctgtctgcctctgagcctaacctttctgtgccctctcttctccattcctagaggtatgtattttttaagtctgcgttcagccttcyttttgcctttctgcattccaatgatttatacttatgtattctctcagctttaatgaatgtcttgttgtagatgactctcaattctacccatccagcccagctttatccttgcattctcytacagtacagtatagtgaaaagaccatagaacctggcatcaaaaatcctgagtggtagaactggaataaatcagactcaggattgacctggccattacctctycccaccaagttgcaaggaagagaaataacagagtcattgatttccctaggagcaggttatgccttccaagaacttccacagagtccccacccctaacccttcgcaggaaagcccaaccttgcaggtgtataaataggcactctcgaagcttcgtgctgtagcctggccctccctctttccaaaatggacaagtccctcttgctggaactccccatcctgctctgctgctttaggggtgagtccctagggttgacagctggtaagagtcctgaatttaggaacaggtgagagcacccatgacagaggccttctcatgggagtcctatggcaactgaagcatgatgagcttctgttctaatgttatgccttctaccaggggtatgtcatgtccccaggaccttaactaaagctcttctcccttcctttatggggggaaataggtagattagagaggaattgagtggatkttcatagaagctttgagawggggtttggaaaatgaggtctgcagacagtgtatctctttttttttccaacagcattatctggatcactttcaatgagaaatgatgcaggtgagtaggaatagataagtggtatgagaaggggaaggtctgaggaggaaaagatgagtggggtgaggtgagcaccaggggccaaaaaaaaccaaaatacgaatagaccttgagttccaacacgcaacaacctcttccagcaggacagagctggcatgggagctgattttaggtttgacaaaataacattagcatcaactgacaaggtcaggagtgagcgtcagtgaagggcaaggaaaaggaaaaggaggaagtggaatgctggcttttcaggtgtcgcttggccaaatctaaagcgtggcaacttcaggaatttcagrttgtccccattgtcagattccaggcacccacaggtaagagtgccacacagagtcaattaaaaagaagggaatgaagcaaaaaagcaggtgcacttatctttctcctcctggtctgtgctgcatcctataggaatgggtagatgaatctgagaagccccgaagaggtgaagagatttagaaggagagaagaggtgcagagatgcccagtaggtgactaggcattagggggacagagtgggcctggaatggctccagtttaagagtgcaggatggaccctgaarggcagactataagaacccaatacaagagtaaatctcaggcacatttcagatgtgttttctttctcttgccagtacagtcaatgaaatagttgctgtgaaaaacaattttcctggtaagtatgargaggacctgtctgatcacctcagtcttgataatgtttcacttttccttattcctccaccttctttcccctcccatttttcaggctaaaattcctgagaccataaacctcaatcactctcttggcttagtgtatttccacagaggaagakgttcacgcttgatgggctctggcaaagccctgtggctctaggcagacttctaacccaaaaggggagaggggttctttcctggtagtgccatcttttctcacttctctttcccctctctctggccaagtgatagaaattrttcrgtgtaggatgtgccacctccagttcccaggagaaaagtgctccagaggaagaggaatatgcacagcaacaacagaagaggsctgcatggttggaaggatgttcaaaagtaagttgtgggttgggnaaaagaagaacgggcagaggacgtatacagggaygtatcagccacaggggaaaggagagatcttactttacttttactataggcagtctcatacctgggatggctgattccttcatccccatcatatgccrtaatgaaaattagayggaggtggtcactaaggagggtggggrcctacagctaagggattagcattttgagaagcctgaagaaaacagaggagaataaatcaaggtaagagaataggtgtaatctatgcccaatgggtaacagtgtgttgttgagttgtggagggggcttttggttcttgtgcctgtctgggcttccttacgratggttctaaactgtggaaatagaagggccagtgtcatcagtagactctggctgaattgccctggatggttaagatgagacatcatgatttctctttttccaccctttgtgctaaattatctcttggcatttataaccctcacttgaaccagtgttaagactctcaagagaaacacccagctttggcaatccctgaattacggctctccttactgccctaccccaaatgatcattttagactgctccatcactgcatttcttttgggaagcccccagcttgcaacatcttccagttctttayatttgaataacggagctttgaactacacaagattatttctatatgttggtgtggtctggagaaaagttttttagcagaactttcatggccaggcttcctgatctgttttttctcccctccacaggggatggtaatccctggttaaccttcatgggctgcctaaagaactgtgctgatgtgaaaggcataaggtggagtgtctatttggtgaacttcaggtgctgcaggagccatgacctgtgcaatgaagacctttagaagttaatggttcttctgtgactccaatttctgggtgaggttgttgcctcagcctcttcacaatgactttctaaaaaaaatcacacacacacacacacacacyacagaagaggattgcaaacacatggctccatcttctgcacacgaaaggaaagtccctctccttttctacagtctctgtcacrccccttaaaataagtaaataaataaccttgagagaaagaacaagatcaatatatcctgcaggttgctacaaacccttgtgctttcactgtatagccagttcattcagaaaaggaggaaagggtagtttaatttcaaaaaagaatcccttcctctttcctctgctgctttccttccttctgtggcagggtattttaatatatttttcaaatttttttcctttctgtgttatccttcttatcccactccaaagaaagcacataactgtggcctgaagggatggggagtagcaacataaaaagaagtggctcaagtcttcttggagtttgttcatgaatgctgatcccagggtgaggagaagattgggacatagaaaggaaactgcatcagaaacatgaacagagaaagattgtctrccttctagaatcagatctgtttggggctgggggttggagaataaaagcaggagaagtctatgggattctagaaatagtacctgcatccagcttccctgccaaactcacaaggagacatcaacctctagacagggaacagcttcaggatacttccaggagacagagccaccagcagcaaaacaaatattcccatgcctggagcatggcatagaggaagctgagaaatgtggggtctgaggaagccatttgagtctggccactagacatctcatcagccacttgtgtgaagagatgccccatgaccccagatgcctctcccacccttacctccatctcacacacttgagcttkccactctgtataattctaacatcctggagaaaaatggcagtttgaccgaacctgttcacaagggtagaggctgatttctaacgaaacttgtagaatgaagcctggaaagagtgatgaattatattatattatataaaaataataataaaaatataaagaaagctacctttcttctatacccaaattgtgtgtccttctttctctctcctccaacctcttcctaattcctttaacaaacatgtattcaaaacatactatgttccaggtactgctagaccctagtatgtacacagcatcataatccctatcctcatggagcttagactaatgggagagacagatcttaagtaaataatmataatagcttccacttatatgacaattactatatgagaggcactgctataaacactttttattttctgactcatttacccttcacacaaacctgaaagtcatactactccccatgtgggtcagtcagaaaccaaaaacagcaccagttatttttacagagactgtaaaattaagagcggttaaccaggtattgaaggatacaaaaagccaaagggagatatcgagttaacagagacagaaattgcaagaaacagctaaaacctgtaggtctagggaaacacaaggaaaatgttggaggtccmtacttctaaggtctaaggtaattaaggtaattagactagaccttagaagtgtgggggaaggaagtgcagatggaggatctcttgagcccaggaattcaaggctgcagcgagctatgattgtgcagtggcactccagcctgggtgacggaggaagatcccatctctaaaattaattaattaattaacttaaaactgtgagggagggatcccttggaactggaacccaaacatctcaggaacaaagggcctccataaagataaaatgcatacctctagggaaggggtactgttcagatggtgctggtatctctgtggggcaccaggaagctggttctgaaagtgttgtggggaaaaccatggaacaaaaccaactgtagctctgaagccaactgccactgcccaggtaaaaagctgttgagaggaagaggaagcaawcgggaaaagatgcatcccttgtccagcttgccagtctccctccagcacctcctattggcagaatttaacaaggatctagcttgcaaaaaccaccatcataaagcagggtatagaagtgtgaacttaaaactgagagacaatcatttaataaccagctcaatcacgtctttgacctttcaacatctgtacatacctttttatatatgtttggactccattgaacaagaaaggcaactttatgcttttgcctaaagagatgcatttatcctccatacaagtaaagatactcttattttttctttaaataaggacacacagtcctaaagtcatctttatctcagagtgatatcctagatattctttctgtgcaatgttaaatactcttgaaatccaataaattccacctgtcaattaccgtcaataatttttatgtaaaataataaaagggtagaggaaaacaagaagaaaatatgacaagaaaggaaaaagatatgcctaggtacccagtgtttgttttttttttaaccgctaataaggctgcaagcaayatttataacttccttcttctgctaccaattctacattttgttttccacaactagaacctcattgggtcagcattatctatctgctgggatgatgaaaatcttcattcttgaaaggttcaaattttcaatggcctggattttttttttcagtttcagagctttatatttactgttattggacaggaagaacaaggtagcacttcagagaatttcctgtattccagacacagtcatccttaccccattgtgcaacagccatgcaattcccttttaataatcgggatcagttttctcagcctgtagaataacctctatgcttatattgtggcatggtggcatcaggagcccaaaatggtcttagcattcaaatcaactaaagtattgttttattccctagtggaagcatttctcccttggtaactaagactccaaatgaacaaaaatcaaagttgcagggatgggagaatttattcchacttctacatcttgattcttggacttgtgtactctgactatgggaaaagcagaattatatattagttgctgattctgagcatataccgcattctaagatataatctaatcttttcagagtgtttgccccaacttacagttaaattgagatttcatttgaccattcattccattattccatcaggctggttgcttctgatgatggggtgaatggtaagmtaaatgatgtccatgggcatgaacatattgctatacttctttgtggtgaaataagtttcttggatggaaataattcygtgtttaaaacacgctgatggagaataaagcattccctaagtccacaattaatggtggcggcagaagcattattaacaggaacatccatatccaaaaatatctgtttattccagtgaggataaattctaaccatgatggaagtcaagctgttagcaactagccatgaattaatgtaratcygtccagactcaatggatgagacacccctgattgtggtttaatgcttggggagtccacctcccagttgttgccagaatatccatttgtaaatgccagtttctcctatctcagatcagttcattattaaacagaaaactaagaggccataggtgtgccatagaagagaggaggcaatggagcagaactacctgctcatgcaactaacttgtgcagtcctggctagcttgaacctgttctcttgttggcttcttctccttagtggcagattgctatcttacatgcccaatctatggcttcatgacccagaaaacacagttcatgatgggaagctcaggtatcatgattacttgatgacccattgtcagagaaactgattatagaagattaaattacttgccaaagtcatataaatagaaaatgacagaggcaagagtcaaacttaggctgtctgtctcaagtctttactcttaatgattatgcacaaataactaagaaataactataacaggtgtaggaaaaaatacagggtaataaaagtaagcagaagacaatgctaactggggtcttaggaaagctctttctaaagttacatttaagcttagaatcgtgggctaacctatttaggtcagggcaagagggaaacggttgggggcaaccatgtaccaaaagcaccttccttccaggtaaagggaacaggaggtgcaaaccatctgggtaaagaagttccttcccttcgtgaccgcttcctttgagtgttctttcttttttcttgtgaattcaatgattctctttagccttttggaaatcatcatggcccatgtgtttgttgttttgttttgttttgcatgtttgtttgttttaaggtacatctgccttaggtttaagattcggctttctattttggaggatagtaaactctctcctcatacacagacttacgagattataagaacagaaggcaggcagggcrcggtggctcacgactgtaatcccagcactttgggaggccgaggcaggyggatcacctgaggtcaggagatcaagaccagcctagacaacatggtgaaatcccatctctactaaaaatacaaaaattagctgrgcatggtggcacktgcctatagttttagctactcaggaggctgaggcaggagaattgcatgaacctaggaggcggaggttgcagtgagccgagatcatgcctctgcactccagcccgggcaacagagcgaaactctgtcttgaaaaaaacaaaacaaaacaaaaacaaaaaacagaaggcagactatttggcccccatgagatgaagatatagcatgatctctgtctctctcttctaaagtcagccctagataagctctgaarctgggtttctatgaatcaacaaaaccattagaagtttgagaagttctggcaggaggttgttcagttgtctgaagcagcgtgtttgtggcggggttggtggaggggtggtggcattgttggccataacctcagtgtattagagagctgtttaaattctgtgctcacttatcttcttcatctctgtgggactatatcacctgttactycaacacagaaattggcatggcccagactatattttggggtcaagagtrcagggaatattatcaggtcagaagttattagtctgctcatttcaaagccccaggakttgtacattataatttaggaaaactgcctcatcccagtgctacttctctttaagggtttaatggtaaatctcgaataaatcagttgyttggtaatatgtatgcaaacgggagttatcgactatttcatagtccctggaaaccatctctttaaggctaattccttcccyactctttgaactcaccaagactattggactaggatctggcctttmtaaaatccattatcaggtggagattttgataaccctggagaaatagaaatccacagacaaaaaataattataaactgaagagtacaattatgctcaaaaaaaagcactaaattagygtactaaacagtatgtactaactgaagccaaattattagaagtaggaattcaaaacaagaatgaaaatatatttagakataattaaaagtacaagttgaaacaaaaatcatcaaaaagaggtaggaatatttgatatwaagtataatcaataaagaacacaatagatggaatattaaaatagatcttaaaagatgaacaaagataggcagttggaagawcagaatraggatatcttccagaatacagtaagaaggaagaggacttagatgggagattttttattattgattcmatttcctcactattcatattttctgtttcctcatgattcagttctaggaggttggattttttttgaaaattattcatttcctctggattatccaatatgctagtgtataattgtttatagtagactcttactaacctttgcattgctgtagtaccagttgyratgtctcctctttcatttctaattttatttttttctctctctctttttcttaatctaaccaaagatttgttgatttttktatctttaaaacaaactcagttttattgattttttctatgtcttttctggtctctattttatttattactgctctgatctttattatttccttccttctactaactttggactatgaccatagaacaaaaagttcatagaatacaagttagagaaataggagaaaacatacacatattgaatgtatgaataccaaagayaacgacaaatctttaagcacatctagtgagaaagagccattcatctaccaaggaaattatgcataaagggagaagaatgaaatgccaaagttcaataccttaacaaggaaacatagaacattcttcagaaaaatagttatgtttaagtgttatttctagagtagcaaattattagtcaaaatatccagtttcatagaagactgcaacaatctttgatgtcttggtatttgaaagacccttttagtaaggaaaaaacataagtagaagatayatttttacacacttctctgcctggataggaacataagaatgatattttgaatgttctcaatgtacctatttatcagaacctgctttataacagaaaatactatgtgttttatgcagttgtagaatattttctcattcttatctttttaaatcctattggattaatctaatatttcttatttatcttccctgatagttcttaaattatatattctttaataattctyttagtagtcataattgaggttttatagtctaccttaaattagggcatttatcacstaattagcaatattagaatcttgtaagagtctgactccaggttagaaaagaaatattttgggtggctggcaagatggccgaataagaacagctccggtctgcagctcccagcgagaccaacgcagaaggtgggtgatttctgcttttccaactgaggtacccagttcatctcactgggaatgtttagacagtgggcgcagcccacggaaggcaagcagaagcagggtggggcatcacctcacccaggaagcacaaggggc

SEQ ID NO: 10031 - DNA, 270465 bp, Homo sapiens
taactagctaattgtgaccaagttgccaaatctttggttattccaaaagaagtcacatctctgaatttttatgggaaataataatttttaaaggattgtgactatttttattgacaccacatttcctataaaacatacctgtgaactggatgtcactggtatgtaacttctggcataaattaatgtacagggaataacactgcaataaacatggatgttcagatgtctcctcaacatactagtttcattttctttgaaaacatataaccaataattggrtttgtggatcacagggacattttatttttaatattttggggaacgtccacattgttttccataatagctgtactaatttacattcccaccaacaatgtatatgagtattsgtttctctacatccttgctagcaattgttattttttgtctttttgacatttaccattctcactgggataaggtggtattttgtcatggttttaatttgcatttctctgatgttcatgttgttgagcagtttttcatacatctgttggccatatatatgtcttcttttgagaaatgtctgttcagtccttttgtccatttttaaattagtttatttgattttttgctattgagttgagttccttatatattcagaatattaaccctttgtcagacacatagtttgaaaatattttctcccattctgtaggttgtttcttcactctattgtttcttttgctgggcagaagctttttagttcaatgtaatttttttgtctgtttttgcttttgttgcctgtgcttctgagtttttatttaaaaamttcttgtctagcccaatttcaagatgcattccacytatattttcttctagtagtttcaggtcttacaattacatctttaatacatgtagagttgatttttttagatgctgagagattggagactagtttcattcttctgtatgtggatatccagttttcccagcatcgtttattgaagaaactatcgtttccccaacgtgtgttcttggcaccttcataaaaratgatttggctataaatgcatgaatttatttctgggttctgtattctgttccattggtctatgtgtatgttttatgtccatcaacaggttagtggacagacaaacggttagtgctatcggtcatgcgatgaatactaaccaacaataaaaaggaataaaatattgttacacattacaccatggaaaatttcaaaataactgtgctgagtgacagaatctagaccaaaaacaagtacacattatgttattccctttatataacattcaggaaatatgcaacctcatctatagtggtataaagcaaagcagtggcagactgaggatgggtggtgtgaaggggtgggagaagtgtgggagggagccataggaaaatggcatgagcaatcttttggagaaaatggatatattcattatccgactgcagggattatttcacaggtgcatacatatatcaaaactagtyaaattgcaaaactagtcaaacttcacagtttactatatgttaactataccttaacaaagctgttttgaaaaattaaaaagaaattaatgcatagtgaatgtgttattagaactttaaaataatctaactaggtcctatattaattrtaacatctggattgtaggattttaaaagagaaaataaatctacaaactaggattgagtgactaattctagaaatatctgtttgtaagggtgtactttttggttcactccagtatcataagacaataaagtaaatatcatatagtgaaattccctaaaaatagacaatgcyacgttttgccaaaacatctatgaaagtatagaatattttcaaaagagtggaaaatatctgagagcacagccataaatttataactgttcctctagcatgttaagtaacattatacatcaatttatctactcggggtaggtcgttcaaactgatactaaatagtgtataattatccaaagcattcagatcaaagtaagtagtttcctagaatcttatgtttcattataatgggcagagtttaccttataaaattagtgtacacgtttgaatgtattaaattttatttyacacataaaatttttatcttttaaaattcctgtttatatttgctaacaaggcatatactttgttctctctgaattatttctgagttataagtagtttgagaaacacaaaaaaactccttgttgaagataatttccataattatttaaaaagtacattgagaaagatttactatggtttttaaaagatcatgaaaaaggaaagagaaataacacaaggtagagaattcatgaatagataatcactttccgcagacaataagcaatgttccaataaaccctgagaaataactaattacttttcyaagtgagcaaacattattctgtagtcccgtagacctgaaaaggaatctaaagatagtgaatagcaatgtgttcctaattttcaaaagaagattaaaagggccgctcgtcctcattgtttagctgcttcaaatcctatcaaaataatagaacctaaattagcaaaagaagcaaattttcactgtcctggaaaataaggaagtgagaagtagcttttgtttgtgaagagatgattggtctgagtaaattggatgactttgatgaaattacaaaaggaatataacccaaagcactgtagattcaatactttgataataataaacacttgaagccatataaattctcttcactatattaatttaagatggcttaaataataaaaatcagctgagaattttcaactgaaggaaaaacagagataggttatttaaggaaaagatacaagttggtgaaagctataggaattggaggtaggaccaactgaatcacagtgatttagaagtgggtgcatactgagaaactaaaatttcccaagtatctgaatttttagttatagcaaatgtgagagtatatgtaaatactagaggaaaatgaggtgagttcttggaaaataagaatagtctggtggaaaaaaaaagacttgatcaatgctgagttcaaaattgggcaaagatctgtaaagtggtaacgatatttcagaaagcctgcatatgggctggaatggagggaacagacagggcagggtctttargaataatccattgaaagggttgacagtcaatatggtttggctctgtgtccccacccaaatctcatcttgaattgtactcccataattcccacatgttgtaggagggaccaagtgggaggtaattgaatcatgarggcagtttccccatactgttctcrtgataatgaatacgtctcatgagatctgatggttattataagggggagttttcctgcacaagctctctttttttgcctgctgccatccatgtaagacctgacttgatgctccttgctttctgccatgattgtgaagcctacctaaccatgcggaactgtaagtccaataaacctctttctgttgtaaattgcccagtctcacgtatgtctttatcagcaatgyraaaacaaactaatacaacagtacaatatgacagtagagaattgttcctacctgattaatgtaccattactgcatttaaaatgtttgcaatgaatgcagcaaaaatggcaaagcccaacctgatttttaacaaggctgtattttaaattgtgattttcagtggtatataccctatttctctccagattacacatcccacacaattgaagagaaatcaacagaaaaattagatctktctccagtagtccaaagaatattcaaaggtttgggggactctcctacggctgcttctggcttgctctgtacccccagtggtaggttttccttggcatgatgctctatgaatccaaagttctccttttagaagtacatctaaatgtgagtatcccaatcatgcctcaggtggttttggttttttaaaaaatcacccaaggtctcttgatttctagtattaagccataaaatgggagagttctagtcttgttttgcaggacaacatcttcaaagagactctgggggcctgtggcacatctgagccagaaccaaacacccgacgtcattgttacagatacaaaagtaaataaatgaaaagaagctccaggtattggtgatttttatatctcgtgctgtcaatctgtttgtgtcagttattattttttcaagtacacaaaactgataaatatgagaccatttgggggaggttacacaaaaataagtatgcctgttggccacaatatgttattaaatagtattgtggtcctcagcatttctcaaactattgatgatgyttcctacattacagcgtatgttttcacaactcttttgaaattatagactttggctctgaggtatctaatccaacagtctcttttcacagatagaaagatagagactttgagaggtgcaatatgttggcccacagccaagtggtatacatacytagtactagcagagcctgcaatagggtccctggcaacaggcttctaggtctatcctcaaaatgtgctgctgccattctctctactgtccaccttgactattgttattggaaaaargagtttgagaaatagttgtctaaaagagcaatttgtgtgcacacatgggtgtgtattagcatttcaaataacaatgtatcaatagatatccaagggataaatacatttcctcttccacttgcttactacattgttgtgtattgaaaatttagtatttgaataaccaaaaaaattatctttccatttgctattctgtcctgacaatattatgatgagctgtattttatgtaaaccactaaagaggacttattttaattagtcattcaggttttatatcatttctggccaattttacacagttttagttatttaaaatgtagctatatgagattcaacatttaccagcatttcatatttggaaactatttwagaaatgaagtggccaggcgcagtggctcacgcytgtaatcccagcactttgggaggccaaggcgggtggatcacaaggtcaggagatagagaccatactgactaacacggtgaaacatgaaaacyttgtgttataatcaaacggatggactatgagggggtaagctgttaaacaatagagtaatagaaagggggaacaaaggcagaaatgagcctctgagcagtagtgagctgaggggcccagagttgatctgtttccctttattaatactttcaccgtgttaatacttttccagaaaccttgcctccaccatggccctaagtcctaacagatagcttaattttcttagaggaattcaaataacaataataaataatgtcacatagacttctaatgttttaataaaaaccttcagcaacgcccacatttttacgtgacaattttttaaagggctatgagggagccaactatgtcagcaaacagacatgctctgaagacagggtggtccatggcattcaaagtgtattcatttctaccgatggtgcttttcttgcataggttctgacttgtgtagatttggacttcaagctaaaataaaaagagaggaatatgtgtatacatgagaatgtgtgtgtaacgtgtcgatggtataaatagtctcttcctctctctctgaattgcatgcacttaagcccctaagaaaagatctcttacctcttatctaagtaaagcagaattttgagctttgaagctaaatgatacaatgagatcagtgtaaatactctttaacacaacaatatttgagtagctttgaaacagtcgtcctcatttcgttacatacagaacgttcgtgcttcctccctctcaggcaagaagcggagtccgtcgtcagcagttagcagagtccagtgcgagtgcacgtttyttaaccggataacttagttgcccctgccccccgtcgctgcgcccgaattcgcctccagtagaagacgttcagcgggcgacttggcccggcgcctgggatcggtggctatgcgttccccaactagcaccctcgctgtccttgtgcagtggaacgtccccaggtctgagaatgcacctcccgccgtgtccaccccggccgcgtctctcctgaaggcagatcttggaggtgcagccaggactcctagaggagcctcctccagtcaccatcgcgggtggggcgagccgggtctcctgctgggcttcccagccgcttcgctccggacctgcctggagcctasaaaaaacaagggctcgtccttgcactctcgccccccatggatcacccctagaaggtgctttccccaaccctcctggtgccaaggagagcaaacctccccggggatttgcccaaagtggtgggaggagggttaatatttgctttgttattcggataaggggaggcaagtatgccttgggtgtgtgtgtgtgtgtttgagagagagagaaagagagagagagagagaggtgtttttgcagcgggaaacaagcaggaagaggcacagaggccggcgcccctgctcccctcggggcctctgagagcggcacacaccgtaattcccttcccagagcctacagattcccacaaacaatgacatcactccgccgccgctggcctgattacagctggggggattttcctgggcgcgcggcgggccaggctgagatgggggagctctccggtgctgaaaggggcgggggcgcgggctcgctgcgctgcgctgcgctgcgctgcgcccccagaaggcggaggcggccgggccgggccgggccgggggtgggcgggggcgggcccggggcggcccagggcggggcccgccgcttcccccgccctcattggccgctggcggactcacgtcacccgagctggtgctctcccccagcccctagggaattggagctgaggaggagctgaaaatgcagatttagcatcaagcacagacctacactcgctctttctctccggtacacacagctccccacattckcacccctgcccgcgcgccgggccgcctgactgcacggcttcccctccagccagatgctggagaacacacactgattcgctgctttccaagaccctgttcagtctctttctctatacaaagatttttttaaaaactatatataagaattctttatttgcaccctccctccgagtcccctgctccgccagcctgcgcgcctcctagcaccacttttcactcccaaagaaggatgaagggtggttgtgtctcccagtggaaggcggccgccgggttcctcttctgtgtcatggtttttgcatctgctgagcgaccggtcttcacgaatcattttcttgtggagttgcataaagggggagaggacaaagctcgccaagttgcagcagaacacggctttggagtccgaaaggtaagctctcccatgcatttcgcatgttgtttcaaaacggggggacgggggggcagccctgcgcaatctcattgcagatttgcaagttttctctctttctcatgcgatgcagatattctgccatgggctctttaacacgatattgcctccggtgatctttcaccggttatgtaattaaaatgtccttcatctgtactagtaaggtcatcaaaataatttactgctctttgacttgatggcgaaaatargataacacctttcacaggatgccatgctccggggatgctgtccgaggtaccaagttctcgaggctgcctggggatggagggatgaagccytgaacagctaagcctggcgttggctacttggccagggamgtctcccccacccccatcccccggagaaagaatagtttcctacagacgaggctggacgtttggacactgcaattcmcctcggtgtttctcccaccccgcgccgggaggacttccctyccagggacttcggtccctgctcctctccgggaacaacggcttcctgactctagatttggaaagaaactggtctctaaaatcggggcggaacttctgcgccctcacccccgcccacgaccgcccacccctggagcgcacttctggttggctccctagttctcaactcccggctacaggagctggagaggtggattttgagggggattccctacggagaagtcgaggtgtcctctcctgatgcgtgggcggccagcctggctttcccactagagcgtggggatccccattccaagaagttgccagagttcgacagtttgagcagataggtgagcctcccagctttggacaccttggatctcctttggagactccagggtactcatcctgggaggacagagagaagggcgctgggtgggggctgtggctgacctgcgtgtctctcctgcaaaagatgtatcagggttctccagtgtccttaggggacctggcgcaggctggggtggagtgtgggtgcagagagaaggtggggcgaggggaacccaaaggacagagatgtggctaccagagggctgggtggaggtccctgagattttaggctccatctcgctcctgatcccaggaagagagaggagtgagatgagcggtgggtgcttttggttattggttttgccttgaagggccgcgcagaccgaagctcttattagtctcttctgtcctgacttcccaagcctcccgcctctctcccagccaccgccagggctcctccaggtgtgggggcctctccctcctcctaagggcgtaggcagtaccggaatttcgaccccagaagggtctggcgacgagtttgacagaggtctgggaagaggctctgggtccgccggtggcgcgcgggcgggtcttgcggaaaggaacttgttgctctggaaagcgtgggtggagcaggggaaagaaggcgccggsggagggagcaccccgctgtggttttggcccgtggcctgccggctgttttgagagacaccaacacaataaagaagccgaccttccttcttyactcccccccaccccaaacttggcaagacccaggacccaaacgccattataaaatataatagtgattattattagttatacggaagcttacgtgctggagtccttacatagatttttacttaatcttctcaacatctctgaggaggctactatcattattgagcctatggccccgttgaggaaattggttcagaaaagggtgcgagataaaaacaggcaagggcttcaatccagatctttcagaagtgaacccatgctctttactccttagtacccacccaagcaagctaggtgctttcaggggatgtggggcattgagataagttgaaaagggattttaattcttgagtgtgatcttgctgcagaaacctgtggctccctccccctcccccacaccttttcatgggtgcgggggagtgggagggagccataggtttctgaaaaccattgttctcagtggttttctcttctctttgctgccccctttgaaaatgtgcccttaggatcagagatcagataactaggcctctttgtccttcattctttcttggagaggagcacactgattttgcatcacaacctgaaacctgcagttcccatctgagagacctctctccttacttctccataacctctcaggtagtaccccacaaccaaatccagtgattttttttccccttttacacgtttaagtaacagggactgcctggtgcaacatctgcctagaataaacctccttttggatccatgtcttgtccattcttcaagacytaaattcaaacctttcctgatgctacagaccacagtgagctttccctcctccaaatttttatgcgactgataggcaaacactgcactacataagctaataaatgccatcacttttcctcattrtttcaggtatataagtaaatatgggttcagttgttgtatttctacttaaaaggtaaatattcagggatgatacctcctatatttctcatttcctccctgtaaccagcacattactgttttgccagccttgaargaaacttccttgtctgtatttattatcccaggtttcccagacaccgtcctatcttgctttcatcatactgttttgtacttttgccaacatttgttattgtgcatcttagaggcccttatgtccttctccttccttgctctgatgcttagcatgcttcccaactccctactgctccctgctccgaggctcagtgtcagacacaaaagattctcagtggttatttattcatccatatgaaaggtcagcaatggaggctagaagaacatgctttcttattaaattatctcattctaagctcacaaatctatgagagaaattactggcatcagctgtaattctcagatgaaaaccttaaggccttgagaagttaagtatctgcttatatctgagaagtaaaagaactcagacttaaaaccaaatttgcttaactgaaaaataattgcttttctacatcatgctgcctccaggaagccttccctgactgccaagaactcttcccttgagacacaattttaragctctgctattttcccttttctttttacttttattatatttatcatttattttctattaacacatgaacatgtcattagctaatgggtacgtgtatttatgtcttcaggtagactataaatcttccaagaggagaaatgacatactatatctttatatagtctccatatctagcatggtggcctgtatatgaatatttaattgtttgtcaattatttgattgattcttataagaccatgaacaaacatttgttttctctctaaaatgaaataaaagcacctataactttacctctgaaaaggttatggagattaaagctttctattttatcatgacctggccctggcccaaagacctatgtcyatcagaaaagatacttaagtctaggagagtgaatgagtttacagtaatgacaaargcattattccaaagagtgccttaaaattctcaaaatgctactaattttaattgatttgaaacagaaaacaaaaattatttattgaagcaacctgttgaagattaaccaaaaatcaagtgagagttagggtttaaaaagaacctgatattatcctaggggtttcattgtattatggtgtgttttatgttttatccacagaggacagatgctgaaatgattacacaagtaaaatcatgtgaccatttttataatgtgtgagaattttttaattttgaaaacaacctaataatcattatgctgccaggtagtaaaaaattaataaatttctggtcrcttcacttttattaaagtataatttaggaaagaacacagcttagggaattttcacaaactgagcacacatgtgtaaccagcacccaaatcaagaaataaaatattaccagtatccctaagtccttttctcactcacttgctttgttttcaggttttagctattataaatatagcttttgtggatattaaagtctacgtattttggcaaacacatatatggccttctacagggaatcctagaaatggaattgttgagtaaaaggatatgcatgcatacagctttataagaccatcagttttctattgctgtgtatcactaaaaaacttagtggcctaaaaccacacaagtttgttatttcacagttttcatgggtaaggagtctggcacattttagttgggtcctctgctcgagtcttcacaggctgaaatcaaggtataggctgctgggtcccatctagaggcatgaccaagaaacaaccctcttctgagcattttcacggctttaaaggaattgagtttcttgtggttttagacctgaagtctttattttcttgctggctgctgggccaggaccactctcatcccctggagacctctccatagccctctcacacctcacccttcaaatatctgccttcaggaagagcccactctccttgcaaggttaacctgattcgttcaagcccaccaggattgttttccttttggttcttctgatgaactcagagtcaactgatttaggactttaataacatttgataaatctcttcacctttgcgtaatctaatcacagaagtgaaatctatcatcttcacagtcccacctaggctgtccacactcaaaaggaagatgaytacatagggcatgtacatcagggagcagaaatcttgggggccatctcagaattctgccggctacagacaaacagccacatggctttcctaagtagttataccaatttacattcccttcagcagtatgtgagagttccagctgctccacattctcaccaacactagatattttacatctgttttcttttagccattctggtggtatgtagtagtgtctcatcgtgactttaatttgaatttccctgattatcaactgaagttaaacacctcttcatatgcttattgatgatttggatatcctcttttaaacacatttgtttcagatgctttgtcytgaaaagtttttcttttgggttgtcsatcttcactttttatttgtaggatttctttacctatgatggatagaaatttttggtcagatatatgtattttgaatatttgataccacccatttaatgatatcgtaatgtcacaacaatgttcaatccagattatatgcttttacttctactttgtcaggcagccaattgtaagtcaaaggaagaattatcttgcagtatttccacatcccctatcccaaagttstttagatcaaaattgacaatatttggaggaaaaaaataaaaacagcatatagatttgatcataagcattccctgaaagatttcaatctaagaagactttaagggacagttcttctggaactaaaagattttccacagtagctaagggaaaatagcaacctgtaaccttgcttccctagacatggctgccattcatgttgtgccttagatcgaatccaagctmatccctcaagacctgtctggttgacctagaccacagtgttctctatccatttggtgctttgatgatgtataatcgattcctttccctgataccagtcatagccatcagaacgctcactgtccccaatacacctcttgtggctgaagaaaatgaggaacaataatrttgaaaggtaaagatgacaggatttggaatcagatagcactggaaacttggctaggttactaaatctctcagaggctcattgtcttctgaaaatggttaataaaatatggtggctgtgaaaaataaataatgtagttagtgcatgtaaagttctgggcacagcactgagtgcataggataaaatagctattactgcagtagtaacaataagctggttgtgcactagtgacactcttttcctcaaaaaagtagctgtrggttatacttgtgagggagtgacaactgattgagtaaggaataggaacccagcccagcagcaatccacccatgggctagtcatgacccatgagatgacctggcccaaattcagtaaatttaattcattatagaccatggtaattatctcagccaattatactggattcctcaggaaatctgactggctagttgctctagagaggagaatgcagtacagttaccatgagaaagcccattcaggccatgggaaactcagacattttatctaagtttctaatagctttccaaccccagtttccagcaaaagacgcctgtaacaggctgaagagctaagcaccagattcattgctccttcttcatgggctgcagcaagaccacatttcccagcctgccttgtaaataagcgtgatcatgtgacaattctagcctgtgtaatgcaagcagaagtcatgtgtacttcttccatgcctgatgcataagaattctctatcgattgtttctctgtgttctgctctcctctggggcttgatgtaattgagaacagtacattttgacaccaaatgccaaagcagcatcacaagatgaaaggagcccaggtccctggtccgtgaattagaagaccttatatgagtgagaaataaactgctattacattaagacactgagatttgggagtactgcccaaactaatatgctgtcagtaaatatccctttgcttaagttgctagagtgaatctctaaacctcgaaggcaaaccgagccagatcacaacaaaaattgttccaaagttytgtgagagcacacatattttcacmatatactaccaaacaacttttcaaatatttgtgatttgtcttctccagcaacaaatagaacycattctacacactgttcttcctgctggcawccaacgtgccctactcataataggtgtttaatatgtgctccttgactatgactacagttggaccacaaggtggtgatttgtccataatctcaggttgaaggtgctggaaaaactattttttaagaaactgttcctgtagaatccatttctctataggcagccattcagctaggaaatagaattaagtgacaaccagcaagtgggcaactggcatgcttctttgtttctctaaaattccccaacttcgatattatcagtagtagaacagatgagctctttgaacaaagaaagtaaagtctgcagttacaacctgatcaaaatccaaaagaagggaaagaggggaaatacacctttttttctcaattgaatgaatatctagaaatcaatttctatttcagaaggtcttattagctatagatcataacgtcatagcacatcagatagtgatgctatagttaggttcacaataattatatattccactcaaactaactgctcaaagaggtctggctttaagaataaaacatgaaatctgaagttcaatttttcattgagttcagatccaacgtttcaaaaagaaactctgtgctgaatttgtgaattattatttgagatacaaataatcacgggrcagctcaaaaactgacatttctatttgactttccttattaaggtgtatttatttagctaaagtccacaagtgattaagaagtcaagaaattacatctgagtcaacacttcagtctgaaatgtatagttgtgtattaatggatggtttatatgcgagacacatatgaaaataatttaactgccttgacaattttttgtcactgaagctaatttgaccacaactttttggaaattgttgtgatgtgctgagattgtcgataaaaataattgaataaaacaagttcttacattgaaagtagaacaatgacacactcttaatttcytgacataaagtagacttcagactgttacagcgtattggcagtttctccattagaaaattgacaagaatggggagaaaactgtaggatcctggggttgctctttgtttacaactttaaatttgacattaacttccataaatatccaattgttctcytagtttttcctaaatagattcatttcatgctcattttgtatcaaaggcaaaagagtccaaagaaaagtgaacaatatacagaatcactattggaagcatcaagaacataaagataataacttaggtttaaaacatttgcaaagtgttgtaagtcattagagaaaaaagttttgacctggaatatttgggtttcactcttctaaagttttaagtagagggcaaagagatkgtcagccttgctttctgtgtaaacacagtgtctggcaaaactaagtctacaggaaatatttgttgaatgaattacttgattgatgttggtattagatgtagtagacaattgaatatctttcctcttaagatttaaacaatgacacacacaaacaaaaaagtgaatccttccatttgtgagatggtaaacatctcaatgtcaagacagtatttttacacattgcaatattcmtgaataccgtgagtggacataatcaaattaaatcacgagataagttaggaacsctgataatatgaaaaatgtaataactttgatatttttgtcagaatcactcatcattattttaaaaaataccaagtaataaaaaaatacaagaaggtcttttttaattatctcaaatctcattattcagaaataaccattaccagctttagataaactctattgcagatacttctgtatgaatatgtatagagagaagagagatatataaattgttttatagagctgagatctcatcatatgtgctattttaagttttaaatcattcagtttaattattataaaatttaacagaagagaaaatcaaaagaaaactatggaaattgttaaacttcagataaatatgctatacaaaggagatattatttcytaatatacctccctaaaattcataagaaattattgtgtctcatatttaggagtttgtagttacatattttatacatacatggtagataggttacatatatttaattacatgtttacttatttaattacataattcaacttttgtgagttatggactcagtgctttgtaaaatggggaaattagcatcctgacactttctctcagcttccctacttccacattccaatgtttgttaggtatatcattatttttgcattgtgttacatataaatattaaccttctactaataaccataatttatagtattgcttatattagttctttcttaaaattctaatgttaccacaagtccttttatcagaacttcaattacaaattcatttttattcatcttttsagtagctaggttttactgaaacatgaagaaattagcytaagcatgaaaaaggagctgtctcagtttcagattaaaggggaaaaaattggcaggggaagtcctgtttttaggtcacagaggagaatgtggtgataatatccacttaggaatcacaattatttcagaggattaagaggcaaggtcaatgttcagagggaaggaagaggtgttaggatgggggcttcaaggagatggaagttcagacactgctagtagacatgagagagggagtggacaaaggacagatcatgatttctgggcagtactgcagaggcaagtgggaaagaatggatttatggtggcaccagcagacatcttaagmatgtcttaagcaacattcagattagggttgagaggtgagagaaatggaatcttccaaataatagagtgtcaatgaaatagaagaataggtaaattggaaataacagtgagagagatgaaagggagagagctatggttggtgagtgggatattgaagctcaaggctccaaaaattgagcacttccagataatgatgaagttcatggaagtgaattatcaaagtaaaaaggagatgaaggtgatcaagacactaaaagtaayatgcacaaggatttgttcacatacacctcattcatgctatggcaagaaataggattgtcaaggaagactgttgagagaaaacaaagcgaagtcctaggacaaaatgttggagaactttggacatgaaaggagaaagaggaaccaggagaggagtcagaacttggacggttagagatatggaaaaagaatcaagagcacacaggcctgtgaaaggaaaggaggagagagttaagaaggaaagaaggaagcaacctcagccactggttttagagacaaagtcattgttgaaataggaggagtcaccctagcacagtggaagaggagaygagtgttaatttgggtccccagatgtaggccctggaataaggacttaaatgcaagtagtttacttaaagagtgattctacaaaatactggtaraggagtggggaattgagataaggaaaggaaggcaggaataaagggtacatcataaagcaagttgtcactgtgggtaactggaactcaatcccactggaaaactgggagctggtgtagaatatgtgcttcagagttatcctgcctgaggggtgaggaagttggggtatttatacacgcattgcattgacatattaattaatgattgagagttactccaggctgatgttaacactccagcattttgtcctggcatatgctcagacagagcagaatttggccatccagaaaaatacttgcaaacagatgcagaggctggcacccacaaaatggtaaggcctatccaagaggatctgagtgtgaaagtaaacatgtctgctacaggaaaaaagcccaatcatgaaggaaagcatcaagtgtgatgaagtggaggtaccaaatatagaccatcccttcaagaggtatagtggttaaaatagaaaaatagtgttacagtcacttgatgtggttttaaaggtatttatgaattaataatttcttagcacttgtcagaccacttggagattgctatcccaccagaatattgtgacatacctagccaatcaagtctgcattactctaactggtttttccagtcatttacatttttacaaatgataattataattatgaaattacagcctttcagaacaggaagggatcctagaaagwcattaatttaacccttcatttaataaatgaaggaaataaatgagggaaagggcatcraacactatgtttgtatgcttaactattccaaaaagcatttgagccttgttgctcattggcggtggtttagacaatgcattattgatatcactgaaccagctttccagactggatgagatagacaactagattgggtgagactcctataagtgattagccacatacaccaacttggtctgaccatactaattcatttcaggtcctcctgatgtgcttttttggtttgtttttttaccattttacccgtagaatttttataaattctgattttccaaacaaagctattcatagactcaaggattccacaccaacaaccattgggtttacacttggtaaaagacagaataggaatttatacttccttgactactcccttagtgactaaacagtgctatatatttagtaagcactcaataaataccaaaataaatactgagaaaaaaatttaaaggcttagcatcatcattagattttcactgcacacccagccgatgtctsatgagatggtgcaatcaggaaaascaagtatgctaggaagggttataggaacatcctatttagtgcctgtgttaagtggatttccttaattgcccttaatagcctaaaattttgtgacttaatcattaagaatccagtgacagaggagaataaggtgacccacaaatcctattcctctttgcctttagcttctcctctatttctgtgggaagaaaaaatatcacttttatcagggcaccaccaattctcttcagtgatgatggaagctcaaacccaagaaggtagttgacatccaagagtcaattctagtcagttccagctgactatgtttctaggaactgtcagccaagaatgggagaccaagagagaccttgaagaacctaaaatgtgggaagaaggatgggaaacaagccatttgtgatctcttgaagttcagtagcagcagcactttaggcagaggagaagggacagggatccttggagagttgtgtcttaaatgaggtttgtcattaacccaaatttggacccagcagccgaagccagaaacaaaccattctggccataaactagaaaatgaggagaggaccaaagaagagttatgggagtttcaagccaatggaccaagaaattagcaagagctacagtcataccacagggacgtatagaaggagaagattattaaggtcattcaacaaacatatactgagtaagttcagtaaacaaacataatgcaacacactaagacatggatttgggaacaagtaagcaactgggattcaatcttactggcctaagatgattccaatagatagatgaaaaatcaaaccccaaggtgaaaacactttttttttttttttttttttttttttttttktgagatgaagtctcactctgttgccaggctggagtgcaatggcgcgatctcagctcactgcaacctccgcctcccgggttcaagtgattctcctgcctcagcctcccaagtagctgggagtacaggcgcacaccaccatacccagctaaattttgtatttttagtagagacggggttttaccatgttggccaggatggwctcgatctcctgacctcgtgatccacctgccttggtctctcaaagtgctgggattacaggcataagccactgcacctggcccatgaaaacactttttaagtctctgcttgtgttgcatttactaagtttcattggccaaagcaagtcacatggccaagtttagagtcagtgtgggaggagactaaccaagggaatggatacagggagatatgaacaaaacatggatccaatttcctactacaggcccctctgacagttacaacttatctgtgttgtcccatcaaagggtgaggaggctgggatgtttaacctccagctaccatttcttcttggttgatggttgctcctggggaacttcaaatctctcatacttctgcctgctgtaagtagaccaagcatgcttccactgccagagaacaccctcaggagagcggtgcctgaaagacattggcatctgtatgtactctgtacaggtgacctccagggtggaccaagggaaggcaggcagtgcatcaatatcatgtgctacacagaggacctaaagttacataaaattgaggttcgtcagaggctagaaagaaacagtttgtgagtgargctgtatgtcagatcccctctacgtgtctcattacmtagrtgtcactctagacttgatataaatcagtggttcagtctttagggggtacatcatagtttgaatcccattgtggactgttagcccagccctaaaatagttggtgtttgtggctaatccctcataggagtgtcacacaatctagttgtctgtctcattcagtctggaaagctggttcaattgtatcaacaatgcattgtctaaaccacagccagtaagcaacaaggctcaaatgctttttgcaatagttgttaggcacataaacatagtgtttgatctgctttccctcaygtataaaatgaagggttaaacgaatgtctttctaggatcmgttcgcgctgattacagacaaatgggagtgctccatgtaaacaagtccagaaagtttttgtgatagatttaatatatagtgcatgtgaggccgtgactgtcagcagaaggaaagtcttcacaaagcaggcaataatacattgaggtaaatttacaatgaggcttataatttcaagaggtttaaaggaagaggtttataaagaaaaccacaggatgtgcaatgaaatgggcacggtttttcggaggattgcaagtagttttgtctgtctagatgacaagagactgggagatgaggccaaagaagtgacctggggtcagttcatgaccagtcacccatactatgctgaggaatttggattttgcaggtaggtggaaggaggcatcgaagggtacttgggaagtgtggcaggatggccacatacaggacatcctaggataagaagttgagctaatagtgacttggagaagccttgatctctgcctggtttctttgtcctgtggaatcactaattctggcaacaagtagcacatcatttaatagatgatgccactaggaagtcaggttatatgtctttgattccattgtcactggatgatggcatcagtgatactaatggcttgattaattattgtccttgtagtcacactgaacggctggtagagcagccagttctatccatgaarwttagtccagctaagaacaaaacaattaaatgcacctcccctgacatataaatatatgaatgcagaacaaatcccgtaacttagaagccaagaagaaaagaaagaacagtggtgtatcaccatgatcctagctcacctaataggcacattactccctgatattccaaagaaataatgctcatttttaattttttctttctggratgatatatggaaatgttgcctgaggctagaaagaaagtttgtgagtgaggctgtatgtcagataaccactacctgtctcattatctgggtgtcattctagacttgatataaaacagttgttcagttcttagggggtacatcatagtttgaatcccactatggacagtragctcagccctagaataatggataaccatggacaacacaagctrcttcatactgttttcctgcttatggggaagagtggatcctggaattacagaagagaattgagcattatccgtggagaacaaatgcttaggaatggcataggagtaggcagggctggcttacagccaagtgtactgagtgctaagtcagtgacttacccctctctcccctagtttcccttccacacagcctcttacaaatcagctaattacagaagaacattcatacatgagttcttattttattaacaagtgtgtgttgagccctatgaagatgaggcacattgaaaggggttgattctacagacagaaagataacaggttcaagtttatgcccaaggamaagcacacttatagttctatagttctatagtctagtttataagaattcatacaatctgaggtctctattttgctattgcaaatgtctactttatgtgttggggtgtgacaaactgttttagcaattggtctctcgttctaaatgcaaaggaccttctcagaccatgctaacctggtgacacatcctaataagttgaggctgaatgagatcttttgtcacatctggttactcaaagacatgatgtcctcactccacaggccttgtgctattgagagaggagctgaagtcacacataaataatttaggctcctccactgcatgaaaagcatctgtttaaggagctgtcaagctgtccacctctctagtgaaatcatatttactttattcatctaaataatgtggcttgtttgccttctgtgtgaaattgtcttgcactgtttctcattggtgggttttatgggacagcatatgattttctgtgcatccatatgccactctacctctgggaatggaatggcttcttgttcagtagttttgattattatagccctttatagcttatgagtcattgggtttactcaaaatgtccagctcctcatyctcatttttttctctatggcccagccatgcccgtcctgaaaaatttttaaaaaggaataataaaaataaataaataaaagtcatgtactctatatttcatttccaatgagttgcttcttgtttgggtaattttttattgtattagagacaaggccttactctgtcacccaggctggagtacagtggtatgatcatagttcacagcagcctccaactcctgggctctagtgatcctctcacctcagcctcccaagtagctaagactacaggcacacaccacctaatctgactaggtttttattttttctaaagacaaggcctggcaatgttgcccaggctggtctcaaactcctgggctcaaatgatcctcctgtctcagcctcccaaagtgctggaattacaggccaccatacctggccttgtttggataattatagcaataggagtccaccgaagtaagttgtgtttttttagttatttggcattctcacacttggatgctcagaaacatgtgagcaaatagcactgaatgtacccacaattatgtcttgtgctcagtttgtaagtcactattacgtaggtgagaccagagcagttactgtgaagtggaggtagctgcatttaagactgtgaacagcgcatcaagaagcacacaccacaacgtgtgtaatgcccctgccatgatacatcacttcaatctaatgatgagaaagcagatgatcccaattgagagacagtctgcaaaataactggcctgtactcttyaaaagtattaacgtcataaaagaaagacagatagactaagaaactcttccaaattaaaaaaagaaatgacaaccacatgcaacatgtgatcttggattgaactttgggccagattttttatttttttttccataaaggatgctattaagacagttggcaacatatcagtgatgtctgtaaattagaaaatgatatcacattagagttaactttctgatgttgatacttatactgccttkttcttagaaaacacacacacaccatctacaacttattctcaaatgattcaccaaagtaatacgtatatgtargaaaataattttttaaatgcagtaaaatgttaacaattggggactctgggtgacatggctatatgagttattttcactattcttgcaacttttccataagtctgaaattatttcaaaagtaaaaaaattactgctaaaagaawaaatgtgtacattgatgcaaaactaacattgaggtctctccctctatgaaatagagctgggttaaactttgtcaccaacaatgggtttctgtcccagctctgccactatagagcagtgtgaccacatccacataattcaactttttgaacctcatttttctcatctatgtaatccagatgtcaactagaaatacctggacccttgagatgtagataagatccactcaaatccccataatgtaccctgtagaagtcttaacccttcccaatattcctttaaattctaggagtggagctagattttcrttttacttctggatacagttttctacttctaccaaaactttccagttaataaattatgtctccttcctacccaaacaatcattcttcacaatggttactcaagtgtaaaattcagccaactcccttgatttcccttcaccaaaaaactcttaccattcacccaaggcatctgtgactagaatgtattttcctgaagatgtcacaggtgccaggaggggatttatgttgcaaacacaaagaactttaagtaagcacttgctttgaggagtcrtttcatcccctcatcactgggcacgggcggtggcctcttcctgcccagcytcacatttcttgccagatcctcgccaccttcttttatctgccccttggtttctttagtatctcctcctctcatgggtgtgggcagattyttcccaggcagagcaggtcagatctccttgctctctaggcacccatgacctcaggtacccaccaaccatcacagaattatcccaaatagagacagtttcctcccgaagaagagctcagatgattacattctcaccctcagagtctctgcaaagtgagacatagtgctagatacacgtggaggtcatctccagtggaaatatgctgagattctatgaagtgcacctgctttaaaaaaatggaaattactttttcaagcagacagatatcaaacacaagttcctttcctctagccttgttatctgtgtggaatttaatagggtaccaataaggtttcactaacaaattacactttatacgaccttgccaaatgcagcattcttgtgggttattctagctttttaaagggatatcttgcttgtgaagatactagcatgtaattttctagcttagacatctacttttcacccccttttctcctttatttagaaataactctgaacccaaagctgatgtttgggagtagttaacttcttctcttgttttctatagctgctccaaagagcttggacctgactacagaccaaagtaacagagaatgctagcctcatctgtaattgatargatttttttttttgctagaatatctgagagtatttttacctcgtgttcaatctcatgagtttcttttcattccatatctcttatgatgtgccttctgtcttgtgcttagcagagtcctagacagctcagagctaacaagtgcaatgtgcatcactcattggatcacarattgagtttggccagcacaatgctttcaatctgtttgacttgtggaggagcacgtaccctccagtttaccacaatcctcaccactttctattgtctttkacctgattcgcttagttagacagcctgcttgacccccaatatattaaatgtcttaccaatgcccaaagaactccataaccttagtcatccacactgaatagcacaactacttaataactcttgctagaatctagaacctcctgatctttttaatttactcagcagstatctatgacatgatactctgcacctaggacatgagcaaaaccggtgttgtccccatagagcttgcaatccaggcattccgaggactgtgttctgagagataattctttccagcataccaagataattttgaaagatgaatatttaggcaacatgtcagtacctcaattttctttttcatttaagattcttctgctccctactactgtattcgaaaccagcytagtggatggctcttcctataagcaagaactatttccttactataaagtgtgtacaatccacttggctgtgggttggagcggctctattagaattgactggggatattcagttggaggttgacaatgagaacacgacaaggcagatgatcagagaaattacagtaattactcacaatcagtcttcgatagtaagtcacaaaattaaaaaggagaatgtaagtcacaaacgtaaaaaggagaatgtaaaagtatgaaccaagagaggttccatgttcctggtttaacagtggaatagtaaatgcaggatatcctccagaaaatgcctgaatgaatggtgcctctactctctgctatggaagttagttgggtccaacgcattccatgggggacgtggtccaaagtggacctgaagagtgtggtctgtcccctagtggtcctaggctgtcaatcagactatcccatccttgcctgggagagcagctgttgtttcactgatgataaataattctgcttgaaaaaaaaaaagtggtttctctttagtgatggaaatagatacttaatttgtgttttagattagacatagtcactcttatgttgttgataattaagaaataaaatcactctggaagttgttcttctctctccctttgctctgaagttgaaactcaggcctgtctattargtacctttagaattatcactgagatcattttaccttgcamacaatccagggaaaycagtaatcatctctgggcagatatcagtaatgtgcaaaacccatttcctacttgacttggaargagaaagaaatgttaggaagagtgaaaaatgaatggggaaaaagaacacatcagttcttctccacatggtctctcatyctccagcagcctaccccagacctaaattcaaatgagcttccctttctctcccatccctactcctgggcatcatgttctgcctataagagattgcatgcaattgaaggaaataaagaacggtctctgagaaagtcaataaaatgcagagcttatccctgttggtaaaattcaggtccccaaatgaaatggacaagcaattatcaactgagccagttttcaatccttggtgattgtttcgtctgccagtttttgtttcttaaacctcttgacagcagtccctcttacaaataaaattataaaaatcctatatagcaaatgatgtccagtgttctaccaaactagatcccgactaagcctgactgaggaccatgaaaaccagcacagtggacaaacacaaagaaagcagccaaaggaaaagtgaagagtctgatccgggaagccttaactgttctgagggttctgaatccatttgagaatctgtaataagcagtagactctcctgagaacaagcgaatgcacagatgcacaaaatttggaatggaggccatgccaaggtcacagaccctctggagcatctacagattccctaagggaagagaactctagtgtttaaaagaagcaggaaataggctccatgagaatttaacacttctttttatctgttcacaattggttgccagttccctggagttccctactgctgggaaaatggagtgtgtgggttcagagaggtgctatagcttggagccatagttttcaatgggaaaaggaagtaagaggaaaagaaagaagacaatgagaagtgttgctgagatccatacatttttgtggcataatgagaatttctaaaaactctgcaagtctgacttagcagcattattatactgtcacccagcctgaatcttcaagctgacaatttgctgcgagttcttcrttcacttctttttctccttccttctggaaccatgcatattttgccttaagagaacaaagtgatgatataaaaaakgtgtggtgtgtgtgtgtgtgtgtgtgtgtgtgkgtttcaatgaagaaaacatttcaaaacatactaaatgmccgcagtatgagaggcttcttactaggatactcaggtgaatgtttgggaatctaccactgtgttcaatatgtctttgctatttgcaagatttgcagtctacttaagaatctcaggaatgcatcgatcagccttacatccttgaggtctgtgtaggcagcaagtaccttatactactgtaagtcacatagcatctgtctttctctccctgcggtggagcttatgattgcacaaagctcttaagcagctgcttctcagatgctcagaagacagtggatcttgggtctgcactccaaaagcaagagacaaaaaaggcccagaaaaataaccaatgcctacaggttagtcttttgttaggttcatgatcagtcaatttacctgtttattgcataagagtaagctcgtcagaggttcaaattttagctttatgagaccaattagctccattttctttcatagccaagaaagaatcccaaagaatccagactcaagggtcccaagatcacagcagtggggatgtcacccatcaacctggctgtcyttgagtcccactcatctccatcaggaattccaggccaaaatctcatggattcctagtcatggttacaaaggggctgggacgtagagtaggaccaccacacaagcagtgtggatttacactcargagagctgggatttctgcagagagctcccattcatctggtcaggccctggcaccccctgagccacagtgtcttctctaaaaaaatgaggcagctagaccaagccaggtatgcaactcagtagcctaaggtaacacaaccgtggaaagggagcttagtgtgtgaccataggaagtgcaggggtaggtgggttctgatttgaaactaggaaatacatgacctttctgaggtcattcaaatttaaattttaaaatatttttacatttttaacttgcatcttggaaataatttagactttaaaaatgttgcattaagtcgggcgcggtggctcacgcctgtaatcccagcactttgggaggctgaggcgggcggatcatgaggtcaggagatcgagaccatcctggctaacatggtgaaaccccgtctgtactaaaaatacaaaaaaattagccaggggtggtggtgggcrcctgtagtcccagctactcgggaggctgaggcaggagaatggcgttaaccygggaggtggagtttgcagtgagccgagatcgcgccactgcactccagactgggagagagcgagactctgtctcaaaaaaaaaaaaaaaaaaaagttgcataaatagcacacaggtacacctatgttcatggcagcattattcgcaatagccaaaaggtggaagcaaatcaagtgtccatcaacggatgaatggataaaccaaatgtggtatacagggtggaatatttaaccgtaaaaaggaaggaaattctgacacatgccacaacatgatgaaccttgaagacattgtgcttaagtaaaataagscaggcaccaacagtcaaatactgtatgattccacttatataacctaattcgagaaatcaaattcataaagacagagtgtagaaaggtggattccagggctggggggggaatggagagttactgtgcagtaggtacagagtttcagtttgagatgattaaaaagttctggtaatggataatagtgatagttgcataatgtgagtgtacttaatatcactgaactattcacttaaaartcattaaaattgaaaagttgatgttatatatatttatcacaataaaaacattacttttaaaaagaagcagagtttccatatacccttctttattcagcttccccaaaattaacgtcttaggtaaacatagcaaaattaccaaaggcaggaaataaacattgatataatactattagctacaggccttattcaaaatgttccagttgtcccactagtgtccttttttctgatccacgattcaatccaaaatatgattatatttaatagttatgtctccttagtttcctctaatttggaaaagttctgcagctcttttttgtcgtttatgaacatgatgactttaaagagtactggtcagttatgagtttgtctgatggttctacctgaataaatacacgttatrtatttttggtgagaaaatcacatgaacaatgtgcccttcttartgcatcatagcatgactcatcactggtgaagttaacttagatcgcttgggtaaagtggtctctgccaggtttctccactataaagatacatttcccattgtttattattgtatctcacctattaattttagcatctattggagatgtttgccggccacaattactattattatgacattttctgaatgatgatattcaatgtccatcatttcttctacatttattaatggcaattccactgtaaggaagagttttccctgcacctcagtttacatttaatttcttattttaaaaaaacactaaaacaagccagaatcatggtaagatatgttcctctgatacccactggcacttaacaactccaaattttctttctagtgttaaaaattctaagttctaggccagatgcagtggctcacacctgtaatcccagcactttaggaggtcaaggcgggcagatcacttggggtcaggagttcaagctcagcctggccaaaacagcaaaacctgatctctactaaaaatacaaaaattagccaggtgtggaagtaggtgcctgtaatcccagctactcrggcggctgaggcaggagaattgcttgaatccaagaggcgaaggttgcagtgagccaagattgcaccactgcactccagcctgggcaaaaaagtgagactccaaaaaattaaaagtaaaaaaaaaattatcagatccataatgcttcctgcaataagaaacaaaaggtcaaatttcatactacctgatagtgttcaaagtagaaagtttttggaaagcaaaatacagcacacatacattttcttcctctcccctcactttttttattttattaaatcttaatattatccagagtatatcagcagggttaagtagagaaaacatttaagaaccattgagcctggaattatcacacgaaatatttatgttaaatttgccatggggaatatggcttttagtgaacaggaactaaatcacaaaagctacaatgttctaaaaaatttttattcacagaaaagacccctggttaagttggctatgccttgaagatcatccagtatctgctgatctgagtccaggcctgtccccctgtgccagggatgtcccttgagagcctttatctgagctgctccaagacggtgtcatcagttgacagacagaaccaatattattgtagagttttatgttaacacagcygtgaaagctgaagaaataaaacttttttttcagctagctacttgtttctgtagtccattgctgagtaacaaaccaacccaaaatttggtggtataaaacagcaattttattatactcatgaatgtgggaatttgtaatccaggcagggcacagtggaaatggcttgtctgtggtccacgatgtgtggaggctcagttgggaagactcaacagctagaggatgactggtatggctggagttggaatcatgtgaaagcttcttaatatgtgcatttaacaccataaatgggatgacttgaaagctgcgctcttccaggattgtcaggcaaagcactacacatgcttctcaatgttgcctgggcttcctcataacatggcagcctgagaggagttggacttcttaaattgtaggtcaggactttaagagcaagtgtgttccagggaacaaggcacaagtctaatggccccttatgacttagattcagaagtcacatggcatcacttccaccatactcgtaattaaagtgatcatgttccccagatgcaagggctggaatcatggacctcatttcttgatatggggagtgtttaaaaaaaagctgtggctttaaacagccacactcttcaaaattaaaacactagaaaaatataatttttaacagaagtggaaaagagtctcttaagctgactgccctcccctttctccaaaaagtctaagaaatattccccaagtatccctctgattgaaataacctctcctttgggtttccatagcagcttgtgaataactctgctacagcacattctattctaacaataaaaagagtaacttatgcttgagtgcaagatattattccaagcacttttcatgcattatctcacttaattcccataacaaaaacattttataagtaaaaaatctgaggcccacaagggttaactaacttgccaaaggtcatagcgctgttacgaggaagagcgagaatttaaaccaaggcaatctggcttcagaactcatgttcttaaaccactccaccacagagtactgttaatagattgctgtgtgcaaatcttccttccctgtgaattgtgagctatttgtaggctgagaccatatcatcattacctttgtctctccagcaccaaacacagtgcctggcttatgacaaggaacacaaaaatacacaatagaaaaatgcacaaaagagaagaaactaaaatgtcaataaacatatgaaaagatgctcaaactttcaaaacaattaaaaatattcaaataagatgaaacattttgcctataaattggctgcagttaaaatatcattaataaatgtcaatccagtgttacttagagaatgggaaaaaggatatttttattcttatttacttttcggtgaatcttggaatatacaaccttatagggaaacttttctgaagtatctatcaaaatgataagtgttcataatctacgacttagagattgaattcctaggatatatcctacaggaaaactctcatctatacaaacagtgataatcacaaagctgttcatcatagcatttttaatagcaaattgattaagatatagttcacatgccataaaatttatcctctaaaaatttgcaattcagtgatctttagtagagttgcaaagttgtgcaatcattaccagtatctaattttagaatatttttaccacccttaaaataaatcctggaccattaacaatcactcttcatttctgtcccctctcagccccaggcaaccactaatctaatttccagctctatagatttgtctattctggacatttcatataaagaagtgatacaatatatgaccttgctgtcaggcttctttaacttagcattaagttttcaaggttcwtccgtgtttttaccatgtgtcattgcttaattcctttccatttagaaataatattccattgtacatatatatcattttgtttactgttttatcaattgatagmaatgtgggttgtttctagtttttgactatcatgaataatgttgctatraacatttgtatacaagaatttgtgtaaatgtatgttttcatttctcttatatgcacccrtacatggaattgctgggtcatatgacaagtctatatgtttaacattttaagtaactgccaaagakctttccaaataggctgtaccattttactatcccaccaacagtgtatgagggttcaaattcctccctatccaggtcaacacttgctggtttgggtgcagttgggcaggggttgattttacccattctagtgtgtgtaaagtgatatctcatggttttaacttgcattctctgatgtctaataatgttgaacatctttctgtatgtttataggccatttttacttcttctttgaagaaatgattcctctaatttgcacatttttaattggatttcttgaatttattgttgaattgtaaacatttttaaaacattcctgtgcgagatccttatcagagatatgattttcaaaatttttctccaatctgtgggttgtcttttcgtttccttcgctatttcttttgaagtacaaatattcttaattttaatgaagtacaatttatgttcttacacttttggtgttgtatctaagaaaacattgcctaacctaaagccatgaagatttatttatatgttctattctaagagttgtacaatattagctcttacatttgggactactaatcattttgagttaaattttgcatgtggtatgagataggaatccaaattcatttttttcatgtgaatatctaattgtccaagcacaaaactgtgcttgaacagactattcattctcattgaattgttctagcatccatgttgaaaatcaattgaccataagttgattatcataaattatttctggattcagttttattccattaaactactatatgtctctcctatgccagtaccatactactttgattactttagctttgaagaagtgttgaaattgaaaaatgtgagtcttccaactttgttcttctttattaagattattttggctattcttggtctcttgagtttacatttgaactttaggataagcaaaaatgacagctgagattttgaaagtaattgtatagaatttacagataagttagggagcattgccattttaaaaaatccgtgaacatgagatgcttttccatttatttagatctttaatttctttcagtgatgctttgtacttttcagtgtayacatcttgcacttcttttgttaaatttattccccagtattttacttatttgatattattttaaattgacttrtattcttaactttatgcttggattgttcattgcttgtgtatagaaatataattgattttgcatgttaatcttatattctgcaaccttgctgactcttttgtcaattctaataatttttctggattcattataaatttctatgtacaagatatgtcttctgcaaatagagatagtttttcttctttctttccaatcttgatgcctttatttctttatcttgcctgatggcattagctaaaatctccagtacactcttgaatggaagtggcaagagcagataactttgtcttgttctggtcttaagaaaatcattcagcctttcaccattaactatggtgttagctgtgagtttttcatagatagatttatcagattgagaaagttccctttcattcctaatttttttttttttttgagacggagtctcgctctgttgtccaggctggagtgcaatggcgcaakctcggctcactgcaagctctgcctcccgggttcatgccattctcctgcctcagcctcctgagtagctgggactacaggagcctgccaccacgcccagctaattttttgcatttttagtagagacgaggtttcactatgttagccaggaaggtcttgatctcctgaccttgatatctgcccacctcagcctcccaaagtgctgggattacaggcgtgagccaccgcacccagcyttcattcytaattttttaaaacgtatttattataaaagaatgttgtattttgtcacatgtttttctgcattgggatgttcatgtggtttttgttatttattctattgatatatttattatagtaattgattttcagatgttaaaacaactttgcattcctggggtaaatcctacttggttatgatgaaaatcctttttatatgtgactggattcagtttgctactattttgatgagcatttttttgccatatttgtaagggatcacaatctgtagttttcttttcttgtggtatytctgtcttttcttcatgtcagggtgacacaggcctcaatgaattagttgggaagtgattcttcctcttccattttttggaagagtttctgaaggactggaattatttatttaaacattagtagaactaatcaggattagtagaattcatcagtatttattttgcagaaagttttaaaattactaattcaatctctttactgctattgaggctctctgataaatttttaaattctgttatgtactttttagctccagaatttctgtttggttctttcttcttattatttttatctctttrttgatattctttatttgatgattcamcattctaacactttcctttagttctttagatatggtttctttgaacatatgtctgggtatagtgatatctatatataatatcatgtgaatatttatagttatatagtttagtctttgtctagtaagtccaacatctgggcttcctcagagagtttttattattttttcctctatgtgtggagcatatgttcttatttctttttgtgtctcacaatttttcttgaaaatttgacattttaaatactgtaatatgacagtttggaaaccagagttacctctccccaggttgtttgttgttgtttctaggttttgttgtttttactattgctatttgttttcctgcacccccacccctgtttttttttctttttttttaattatactttaagttctgggatacatgtgcagaacatggaggtttcttacataggtatatacgtgccatggtggtttgctgcacccatcaacccatcatctacattaggtatttctcctaatgttattcctcccctagctctgcaaccccacaggccccagtgtgtgatgttcccctttctgtttccatgtgttctcattgttcaactcccacttatgagtaaaaacatgcagtgcttggctttttgttcctctgttagttgactgagaatgatggtttcctgcttcatccatgtccctgcaaaggacatgaactcatccttttttatggctgcatagcattccatggtgtatatatgccacattttctttatgcagtctatcattgatgggcatttgagttggttccaagtctttgctattgtggaacttaaataaatttacaagaaaaaaaacccatcaaggagtgggcaaaggatatgaacagacacttctcaaaggaagatacttacgtggccaacaaacatatgaaaaaaaatgcaccaccactggtcattagagaagtgaaaatcaaaaccaaaatgagataccgtctcacaccagtgagaacggygatcattaaacagccaggaaacaacagatgctggagaggatgtggagaaataggaatgcttttacactgttggtggttagtgtaaattagttcaaccattgtggaagatggtgtggcaattcctcaaggatctagaaccagaaataccatttgacccagcaatcccattactgggtatatacccaaaggattataaatcattctactctaaagatacatgcacacatatgtttatttytatttgcttatttaatgtctttctggactaattctataaagtctgtaatttctataatgtgccattgaatctgcttggttaacttaatagttagccaatgacagggcagaggttttcttaaagaccttgaatcaataargctttttgtttttaccctttgctaaggggctctgttgtgtatatcgggacatatcctcaattctcaagcaggcagttttaaactctgctatggccttcacctcctgtttttaaagagacatcaagtcaactaaaggtgagcacttagggccttcttagatatttcctggttgtgtgtacagctctgcccatgtgtatggccttctaagtgtccaggaatatattagagctttgtaaagccttcaatggacatcttattccctagattcttttacaaaggtttttgtccagccttttatttgccccagttcatattgctacttcaggaaattgcaaccttaaaaatttgccactgattatttttgacaaattccctggggagtaggacttttccaactgagcaaaccctgggacagatcaaataacaacaaatcctataaatggaacttttccagatagcttccaggcaattatttagrgatggagctttttaaataactctaaacccagtctgcaccctctactatgtatttggctactggttttcacagctgctgtgattgtgaggttgttcatgttcaaagatgctgcagagctatgaagaagaggatggtcatagggcaatctaaaacagcacagagtttgccattatcactgagattcaacttttttattgaataaacacccttcgggttgctgcaaacctcttgtcaatttcctgtgttctgaataagttgatttggcaatttttttcagagttctatttgcttttctatagcagtagatttttgaaggttcttattctatcatacctgaagtttccccaccccaacacacagcattatctttgaatgtaaaaaaaaatggaagcatcttaatatgcatcaataatggaaaggctaaataagtcatggtatagcccatgtaatggaataatatgcagccattcaaaagaaggaagtagtctaggtgatgaagtaatatgtaccataaaccccatgacacgtgtttacctatgtaacaaaccttcacatgtacccccaaacccaaaataaaaatttgaaaaaaggaggtagtaagtgaaagtctgtgatagcatctgagtgacaagagaagaaccactttgcataatatgtagtgtgtgtgtgtgtgtgtgtgtgtgtgtgtgtgtgtkttaagcaaggaagaagatctaaaactcactcatttgactattaaggaaataatcatttgctcttacaagtaggtargcctagaggaaaaaaaacaaaaaggtaacctaactccaatactgccaaaaaagaaaacatgaagaatttttactttgttatctgtgtttttcggttttctaaatttactctacattttctttatattaaaaataaaataataataataaatattctttaagaaatatttgagccacacygaggttctatgtgatctaaaaatctcagattggccccatctatgttagaaaacttttctatcaaatcaaccacatctgcttcccttttcttccaaacactggatggcaacacacacaccaaaactttcaawagccaatactttgagtagtggaatgctttttgatttagggastcttttgagaatctgatgaaatcatgtgtcctatttccaaaaaaagtacatatttacattatttgtctataatttgtaagcattcaattaaattaattaatcaggttaagaactgcaaacagcatgtcttyatcaatgtgaagacgtggagaaaagggagagatctgggaacttcaagcccctatatttatacagaagagaaaaagatgcccagagaggaaaccacttgcccacaatcatactgatggtaacagacctgagccacatccaggcctccaaactcccaggtcaaggctcttcccaccaagttaccttgaatcatagaacaaatgattggcctgtttargttctccaagactcttagaggccctgtgccaaagacaacctctcattactgtgacttctctgactggttctgacctgatttcaaggatccttgagataggaaggtagagggaaaccagacctgccatccaactggtatttactaaatttagatgttcacactgtgctcagcctgataaaaggcaccaagggttcacagaaaaagcccaagacacagacagacagttgaagatctgtcacagacagctatgaagacatgactacaaaacatcgcagcataattctgaagcaaccaggtggtacctggggtatgcacactagaccaaggaaggcaaggagaatctgatgcaggtgtgaatgtaaaggcaaggctccatggaaaaggaaagggaatcaaagratgtgcagaaagttaaaaaatgggggaaagaatagaaggtatttggggagcaggaggagagtggacaccacatgaacaaaggcaaggagaagagaaggaggacattgatagggaaatagaggaccaggactgacaggaggtttgccagtggtttccttgcatacttccctaccccatggagcccctgcaagcagccccagctttggtgtccctgtccctgggccaaccccagaagctaactatgcctatgtctacttgactctccacagcttccctttgctgaaggtctgtaccacttttatcacaatggccttgcaaaggccaagagaagacgcagcctacaccacaagcagcagctggagagagaccccagggtgagttttccccagaaacctgcctcccaatctctgctgccatggctgagcccaccaagggggtgtggaggggctggcarggaattttgaagtaaaggcacttaatgtactatgatagggcaaatgaatgctttgcagagtcatatcagggactctctgctcctttgtctctgcataataaataatcacaggcccctttgtatggctggaggaagaggaaattgggataccacccttttactggctatcttctcctgagttattattgggtgaggacttcgggttgcctgggaacatgttttggcctgtgatggatgggaagacaacaagcagtttaatgagtcattttacggaaggtttctactggtgaatccacatgctcagaggaggttgccatgccccacgttgtgaacggaaagaatgagagagccagtcagtgagcagctcacagcaggcagtggacttctcagtatccatgcatgactgtggccatgagactatctcagcctttctttttatcctatattttcyagcactgatctaatttgccttcatgtctcagctgtctacttgatgttcatcacccccatttttttaatcttcagtctttaccttgctcttggactccaggtcccattttctactccctgtgatggctcaaattcaactttcccccaatcaaacatatcatcttagcaacaaagtggcttctctcccagtgttcccacttcttgcctttcagaataggacctttagtaatcatattttccaccatcccccatacctacacactcatccaattgggtagattctgatttctgttacaagaatcactaggaaggaaagtatgtaataactcagacaagttgttctctgtacattgaaggcagcgtaacctctttctcaggactctcagggaccagctgatgaaaagcgtgtcagatgtttgagttaaggactttcacatgagattcttttgagctgatagaatctgaaaactcattcttgtggggcttttcatgtgaacatttccctgggtttaatttgggcttcwattaggaattcagataaaacagtctctcagcagattgccaaatgacaggccacaggcaattttttctttaacttctcaagagttcccaccttcyctaaagaggaatttctgctctaggaagccactttaactttacttttgcagtaacaattaagctgcctgtgctgccagccaaggccaagtattcttaaaggatctgtcatagaagccggcaccaagacctaagggagaagctctctattctatgtgataataaccttggccttggctataccaattcattacctggggatacccttgggcagtcatatggacagggatcttgccctgaacccaaggtgggcaccagtagacaaagatcaccctggtgcaccgtgacatttgtcttccctacacttcaaccctatgccataaccttgccatttatgkccagttgttttccttttagttatgtattttcttaaaagtcccattggctactcttcttccacgattaaaggcgttgctccaagattattcagaaacatataaactgggggcagaatgaaagagacatttaaaaggcttgggctgggaaagagaactgaggcacagtagaactcaaaagtccctgtttggtcagagagactatttagcaccactggcytgagcttttcccattctaacacatatgatctctgaaatgctgattcttgaagtatacagtgacacttttaaaatataaaatgggactaattgggtaataaaaagaagagatcagtcactggtgattctaatcatttgtctttctcttcaaaatattatctgttatcaccaaaaggggtgcctatttccccttcattatctattataaggatccaggtagccaattgcctctatctggtagttgtaaccatctgccttgcccatgaagaccaacagaaaatagcagaaaaactaaagaagaccaagtatcctatatcttttccctatcttgtcatcaaggttaaatgctggggatgttgtcaataataaactcattctaggaaaataaataaagcacaaaaatctcataatttttttcaaaacgaaaaaaaaaactgctaatgatgactgcctttttccaaaatattagattaaggtctgagtctttcctgcatgatgttctcgtggttgtctaattttggcatctgctgatagaaaaatagagtggcaactattctgaaccaaaaatcattgactatgaacagtgcaaagatagtaaactaaagattctgccttgtgggtttatagctgttaaacaaaagggtaaataagtctagagtaggaataccccaatttgggggttctcaaacacattcaaacaggttgcaaaaagaaaagtaaatgaaagaaaaagggagagaccaagtagccagaaggaggtccaggcttttatgtcttacatagatgtggcaagttatgctttataaacacagaatttaagagtaagttgttttagcattccctgaaatgtactgtctcctagaactgctaacgttaactacggttgcagccccagcccccagcttccttctccttcctgtccctgcaccacttcccagcctgtctcactcactgtctacaggcttgtggtaaggaacacaaagcccagggagggtggtctgagctgctattcgctttcagggcttcatctactgaggtagctttttgaccaaagaaacctccaagctctgctagcaacccaagaaataaaaaagaaaaaggtagaaacccaaggtactttttggctttttttgacttcagaccagaaatttcaatgatgtttgcctctcatgtaacaactaatttttatgctaaaaggaaaacagaaaaaaaaggactagaaagagctaaagtgctactttccatgtgctcatctttgttcatcaatatgcagacaatagctaagaaaacagattctgatgtagactgtgttaaagatgttcgcttctctttccagttcttcctgctaaaagattagctgactgccaagtatcatcatttagatgctaaaaagcaaaagttgtgtcttgtttatttcagtaatatctttgcacagtgagatgttcaggaaatgactgagcatgtcaaatgaatgaatgattactattttttcttcagggttttaatccatgtaatagtattgcycttctcattttatattttcctccgtatcccaaaatttgtctccattaggaaataaaagtactatatagtcttctccctagcacctcttttacatacattcttaattgtgggtaacagaaaccaatgactgtttcattacttccaagttttatcacaaagaatcccatgaagaaccagttcttaatttccaaaacccaatctgccttcttcctaatcatattcacagtcgtggtacaggcaccaaagcgggacaatgtgtctggaaggttttgataatgaaaataatttgaagaggtaataaatcaattcaacactgaaatgaaataatgaaactaaaaataccttctcaacatcagggtcaaaaacaaatattttatgcccaaaagctctgtaagatttgttcaacattagctagaacaataccaacaaatcttaaagccaaacctatcttcagtccctggtcaacatatcaaaacctcataaattctacaagtacctgaaaagcttccgaagagtagatttatttaagataatatttgcttcccagmtctgtcaaaccatacttgcacatctgaaatagaatattaaagtgaaatatattttaaaaacatgaaggactcataattctatgagtaacacacactagtcttatggaagcaaaataatttaattaaaaaataacctgaacttcatttcttgagagaggttatatttgagaattaaaaacatttatttcctytactaagcaattttactagaccatacaattattcctcatttttaaacatgtttcagttttacaagtcagaaacttctatcagtccaataaaaactttccttgcttctctcatctcaaagaatggatgatatttcctttgtgttctatatttagaagctatatctttctagcttctttcttatccaaatgtatccacatgtttaataaccataaaaggcagccacacgttctggtagtgatctgtttttggtctttaagggtctattcttgaatatatctgtggagttttcaagatactgccaataacccacaaaatttagcttcactggataatataatcacttcagaaatctcataataccactggagcaaaagaaaagtttcctattctttaaaatcaactggacatgatttatatgatttgtgtgtattgtggccaaactcttctttcctttcaattatagtagttaattatttgattatttattataaattaaaagggaagagaagggaaaatgctgttatcttttggaaagtctattttcttttctttctttctttctttttttttcctgagatagagtctcactctgttgcccaggctggagtgcagtggcacgatctcagctcactgcaagctctgcctcccgggttcaagtgwttcttgtgcctcagcctcctgagtagctgggattataggtgcgtgacaccacacctggctaatttttgtatttttggtagagatacggtttcaccatgttggccgggctggtcttgaactcctgacatcgggtgatccacccgccttggcctcccaaaatgctggaaagtctactttcaaattgaaaatgtcacggagaaaaatctcctccccctcttttgtcttgaccacaccttcctccagtggataactaatggaatttgaggtgacctctacttaccatcaccatgactgcatgagagcctcacagtctgggggctgggtaaaaatagaaattagatagttttagtgcctttttaagggatttatacccaaagaataggctgttttttatccttatacttgttaactctaagaggatraggtctgaggttgtgaggtgctgctctgagaaacatatagaaattttccaatttatcttccaaatgttttattgaaggaaaaaaataaagcatatagatttgattatattttacttattaagaaacatagtcatggtaagtttattaatattatgagaaacacaaaagggaaaatagcattttgtatttttctagaactttttattctacagggcatttgtggctgctatttcttcatattctcatttccttgtagcataaattggacaaagggtggattctgagttccccaaattctcatggtttgtaaggagacttaaccactccatggtgctgctctacactgatttgtattccataattttccctgctcctctgcacaaagagaattatagagcaggaagagtcttaaggaaacattgattcagcccttgaccttgaagcattaaaatataattttaccattgaggcaaaatagacccagagagagagaaggtgacttccctggggccacacagctataactgataggaagaaaataaaactcgtgactcctctcaatacgaagtctgatttaartaaaaaactaagtgagaattgatactgcttatgaatstgtcgttctttaaacaattgtttgcactaattagtcactgaattttctcaattaaaaataatgtgctgaaaagaagtgaagttrcctcctgagtttatgtcacttatgtgaattcagtgagctcagctataaatggaaaagtgaaaaagaagagggaaataaaaagggcggcacttgagctcactgttctgctcaatttgcttatgccctggagtggccttgaactgaaggcagctgagtatgcagttggcctcggttccctggtgaccctcacagtggaagcatttcacctttctgggggtgagcctgtagcatttaaagttaatacttttgatacaaaatatttcctaaacgcaagctgacttcttcatttgctgtgagaacaatgggacacgaccagggtccattgtgaaagggaaattccacccttgtgatgtattgagacacaatatcagtttctaacccttaaggagttttcaaagttaattttaaccatgcataagttccactttgcacactttagaattcactccctaaggcgtgattcttctaggaraaattaaacaaagatggggtcttcattttggatttcccagaaacagactctgagatgcagagttgtatgccagagacttcttggagagcaaggaagagaacactgggcaaagggagaagctgagcaaatgggctttcaacaggggcctcagtcaattttacaggaaactcagaaacaggggtggcccttcagagttaccccagtgtgaggcaaaggaaccggacctttgtgcccccataatgaccagttattggcatgggtactccctcaaaggaaacatagtcttaggtaaatcacgtcctgctaccaaaggcaattctcagtgaaagaaactctgagccacatttagcagctggaggaaatgtgtgagggccctaaagaggaaatctggagagtgcaccacagttttcattacacctgccatgcccacttcactcaatttgtctgtaaattcacatttgattcaagaggcattttctgggatctttgacctttctggaagagtggacatggcttcccagatcaggagctctccgtgcccaatccagctccccatccacccctgctgcccttttccagagattgmactgaactaagaggggaaaacatgaatctgtaggcacatgagctggaccatattttgaacacaaatagtgaagccaagagacccaagtgaaacagtttctgacctascctcccatctgtggccaaattcattttctagataacatgccaagaggtcagcgggtgtaaaccattcatgagtgatgcaagttgagagttacttgacagcatcaggaaaaggagaaatgcaatgggggaggtatgcataagaagcagggcagaggtatcttcatggatgccccaacctgtgggaaaaattcatctgttctaatcctctgctttcagaatgtggcagggaggactttcagcatctcctctgggcattgcagatatgcctggcttcccaactcaaagagctgctgctggtgctataattaactatttgtggggaacaggggagaattatttactacagctacagaaaggcacagggaaagctgctaatgagtaagcctggtttttttctagatgctgtttttttctagatgttcatttttaaatgatgggtactgttcgtgctgtcatgcttcctaaaggaaaagygggaactctctgggaggcatcatgctagcaaagccagagatctcttggaagttttaactttctttgggagaattcttacaagccctggtatasagaaaagttaacacagagaaaattggtggctctgtatcgtctttacaattcacaaggtgaagagtctctaatggtgggctagcaaacctttaggacttcctgggaaaatcttagatgtttgaagggcaaaattctcctgatctgcctcacctgattccctccccaacyttccccaagatgcaaaaggaaatgcatttatatatccaatgtgtatatatataatatatatatatatatatataatgcatttatatagcctctrttatatctwctaaaaatgattatatgtgtatgcttattaaattcataatgtaactctcttatttagttgttggctagaaaaccarcattcattcagcaaatagttatcaagtccaaactatatacagggcactcttctgcatactgaaatataacagtgaacaagacaaagtcctcctcccagggggcttgtatactagtggcaatgaaggagagaaacaaaaaacagatgaccaagcaattgtrtgaatggtggtcaaaatgctatgagaatgagtagagcagagtatgggaagagggagagccatagaggggtgtttctattttataaaaagcatccaggtttggctagtctgggaaagtggcatttaaatatagacctgaaggagatgaggaaggtattcatgtggatatctggagaaagggcactccagacagaggaaccaccaaggaaaaaggcytggaatccaagacacacctggtgtgttccaggaacagcaagaatgcgagtaaagctgcaaaggaatgagccaaggacagtggggaaggagatgaggttagagaggaaaaataaagcaagatcatgggcgacatgataagctggggaaagaactttgaattgactctgaatgagatgtggcttctgtgcctatgggcaaataatagacaatggggtagaggtatggatgakggacaactggactagagagatccatgcaaggygattgcaatatttcagaagagaaaagccagtggcataggccaggatagaagtggtggaggcagtgagaaacaaatcagatctgggagtatgttgtgaaggtagtcttcaaattcgttgatgcatttgctgatggattagatgaggaatgggagagraagtgagaaggcaaaggtgactcctaagttgttggcctgcattactatagaatgaaatggcacttatgcatatggacaagatggtgagaggagcaggttgatggggagtggttagggaattaagagtttagttttaagcacgttaacatttgagatttgtattaagtaaccaagtggagatratgtgaaatgaacagatggacttaaggatctaggagagaggtcagagttggagatataaattgagaggcatccatctattgttagtgttcaatgccaggagactagttgagcttacctacgaaatgagtgtagatatagaagagaagatttgtgggactgagccctagggtactctaagatttagaagtcaaagagataactggggaccagcaaaggagacagaaaagcagcaagtaatctagaaacaggatcagaggtcaagagaagaccaactttagccattgtgttctagctcgtctacattttaccatagtaacttggccatccctataattatttcttattagaggtatcaatgtttcttcacttttcccctctctgatctatttttcaaacgctttctcaacggatattgaaatacatggttcacacatgaacttatgaaattaaaggatactgatgtgtttgggctgggtagtgtgctttaaagcagcaggaggtcacatttgactcagaatgttgagaatctagctcttaaacctgcaatcccaactaggcactaactcagagccaagaccgcgttctgcaagctgccaggtgaagttaccaggaaacagcctctgtttgacatgtcaagggaagaacctgaattgggcacctctttttaattttgagaaactataaaagccatgagaaagatcatgtttgactgtaaaccaaaaagaaaaaaccttaccctccaattaaggaaaataaaattataagttgttgttgatttaattctgatcatattttcatagatttcagaaagatatagtttttwaaagaatttcctgttaagattcaaaattttttctaggatataatttctcactcctcaaacctctgcttcaaaataaattttattcaatatttagcataaggagactataaagttccttaatggtgacataaatgaacagttataatcgtatgtctatctagctactgaatatttctaagataacgttttgtgaggcaaaagtggtttgaagttggtgatgcctcaaaaaaaawtttttttaatactctttagaactctttctgggtattttaaaattggtttagctatttttcctttttgatgcctattgacatgtttgtgatcacatctctttctataaacaggtttcacggtcttaaagccaaaccaagggaattttgaaaatgagtggaattgaattcctgccatttccagtaatttcaaagctttatgggttcaggagaggataacagtgcagccaggtctagaaatgagtaaacagcagttaggcaaagagattcatgtctgaataacaacccaattgctggagtttatctaattggtttgccattatctgtaccaaaaacattgtgtttttcatcttctctacgatgagcatgtcccatttagcaataaagaacttattgcttgagagaaaacaggtaagacaaaatagttttccattccccctgaaaagggagagcagtccatcccaagtaaagaatagtttaatggatgttaatttttaaggacaacttagagaatcaacatgagaaagyttcttctcccaacagaagcaaagmaaagcaattaaaacctattgtgtggaaagagacccaaataattgtctattagggagaaaaggaacatgatagagtccaatttgaggtcattcttgagttccaatacttacactgacaccaattaactgtgctctccttgaacaaaccgttgtttcccccagtcttcagttctcttgtctgtaccatgaggagtgtggactagttagtctgtaaaatgccctctgaggtcctaaatctgagattccagggactaacctgaagcctctccaactggttaatatcaaagccacgactaaaacccagcaattctaaccagtttgtgatccttcctttacatgtctttcttttcatctgagaaatagggctttttctttaaaccaatgctataaagtgtttgcaagaactagcatttatatgttggtatcctcaacttatagaacacaatttcaaatcctgtactgttcaaaccaattcaatagtaccctaaaattccatttcttgtctcgggggaaatattagattatgagatagaggttattcatccacttcaaagataatagctcctctatcatgttttataaattgggatttggtttaagatttccctggtatcatgggtgtgaaggagtgggggtccttaaaataaaaaatartgtttgaaaacctttgatagctaaacaagttcgattctttagcctagtcaatcagtgtatccaacagggataacaagcttgatgcctacacaggccatgcaaataaattacaaattgaggtgggtcagttgtaagcaaaacagctactcaagcaagagaataaacrgcaaaatgatcttctcctctgtgtgaggaacacaacagasagtggtggggactgtggtgaacctgagtgtacacaccctcttaaaaggaggaagcggattcttattctcagctaattgttacctccaataatggacgccctggttgccacatctacaattttgaagaaaagtagcaactaccaatctttgtaaagattcttttatcttttwaaaaaaattagtgattaaattaaaatttcttaacacactgtccaatctaaagaaaatacatcatcagaacaaatttttccatgcactaccaktttgcagtccctactctacaacaccccaggacaggatgaaacytgatagaacacctctatgactagtccgtgacttcattatttgccaaggtagtccacataaaagttcttcyttaagggaattccaaagctacttccttgtagcgttggttcataatccacattctcctttctgaggccaaattaatctatcttccatgtgagaacccttcaaacatttgaaaatagttatcatgccccctggaccttcctagagtaagcattcttagttctttcagatgttttcattgaatttggcacttctttcccatgccttcctgattacacctctctgaacattactggagaacaatacattataacatccaggtctgctctgattatttcagagtagtattgcatgctcacttcccgtatctcccacattttaaaagctattcttctattagcacatcttaaaatcattttagcattttktggaagtcatagatctcacattgattaatagtgaacctacaattagctaaaatttctaggttcttctaaaatacactcataatccatccttgaaggatcgaggtattggttctaaaacaaggaacctttaaaaaggatttattttttgaattttcatcttattagagttcattctgacctgtcaagattttattagatttggattcagtctcctttccactttcttgtcatctatgattttgatcagcatcaatatcttcaacagttcttaagaaaaaagttaaatagtacaaagaaaaatgacaaagttcagaaccctctgccaggatgatatgaatctattaatatagactctaaggagtatttcacactgaccccatattaaaaggaaattctaaagcacccaaagttctgaaaaatcattcaagttaaatgaaaaaacagtgtctcaccagggaggctatttgaagactgtttatatggcttaactccaacactctgaatctggttgatttgtgtgtgtatatggctctctgagaaatcagtttatttgccatggaacaatctaatttggtcattcacatgactaaaagtaccagaccaacatgttttcaatccagtcccttgaggcaatttgaattctgttgataacttgtccacacacctgctactgatggatgtttcgtcatgaaattttaatcagagagccaaaatcaatgggtaattgttaatttcaagggtgccaggtgacactcaagtgtagaccaaaccaaatttttataaaacttaataaagtgatttcctttaaatgagtaagtcaagatatctcagacatagattaattcagctaaggatcatattctccagagctgaaatattaactatcattgaacttctatcagtgcttccaaaataattattctaacacttattcatgtgacatgggcaagtcatttaaccttcactaattgtcttcattttatcatctctaccattaaataacaatgaaagtccaaatgactggaaataaattgccttaatttttaatccctatcatggaattacaatgaaagtgcaaatgtctgccaatacatgcctaagacttcaaagctggaagtatgactccatctaaagtacatgttaatttcacaaatacattataactttgccaaagcagaaaaggtgatagtgtcacctactccttttgcatcttcttagttctctacttgttttccttgcctgcccctactccatgaaaaatatgggtgtgaattaaatcagtgttccttaaactgtgttaygctggagtccttgggttttcttccagaacgttgtgaataataaagatattagttaggataaactagattacgctgcagtaacaaattaacttttaactcccaatggtttaatatacaaatgtttccttttcactgtgctacaagtcacaagtccagcatgagctggatagatttgattaatataatgctgttgaaagtttcaccatcttgaaacgccactatcctagcacatgaattccaggacactggaagagaaagaggaagtgaaagcataataagctctacccacttgtaaatgcctcagcttgaaaatgttacatatcactctgctcaccacccattagcgagaactaggcaaaatgaatgtcttaatgaaaagaagctaagaagtgtggttctcccatgtgctcaggaaggagagacaaactggatttggggagcagtagaagtcccttgcatagtgtattttttattcaaaacaacaataaacatgtgaataaaagcccatattctattattctgggtgatccttgggattgagactttcccataagttcagcactcatgtttataattgtattggcagcaatactgccatccagtctctggctattgagaaarggtgggatacaccccgggatgcttctgttgtcctaaaatgattggaacatctctcttcatgtgtgaccttctgcaatagggcctggctcctcctctatccrtaggtagagtctatttattcacccatgtgaaggctctgtaacattttatckggtagaacgtggtgggagtgatactgggccaattctgggcmtagccagcccctacctgacctggtagcttctactccttcctcagagaagctaaagaattgtgattaccctgagaactccatgctgtgagtaggccaagccaggtggagagattgatataccgtggggagagagagaggccaaggagcaccaagataccagaactatgagtgaagaagccatctcagaagtggatcttttagccccagtcccaactgctgttacctggagacaaactacccagtcatgtctttcctgaattcctgacccaaaaaatcttgagccaaataaactggttgttttaagccattagtatgtggtgtaatttattatgcagcaatagataacaagaagacaaacgaattttcccagcagtgcagaggggatgagtggtggagaactgagtcatggcataaagcacattaaaatgaaccccaagacactacaccccagcagtctacagcatagtcacattgtgttttaatcagcattgcttctttggctattattgtttttgtggtgtttatatttaactcgtaaacttgtcttagttttatagttgtataggaaccataatcattaggagttgttattctatcttattttgtgcatattatttatacatatatatatatatatatatataatgttgggcgactaatgaaaaatggttttcttataaaagagtccctttcttgtttaaatttattcgagtttaagaaatcaatgcatttgaaaagatctaaaagaagtaggcttttccaaagtataaactttggcatgaaacagaagcaatgcatcccttttggtgcagtgatatcagcaggtaacagcatacgtagtgagaggagaatcaaaggaagaattaggagttccgagttctaatcacarctcagccatttattgtctatgtgggctccaggtaaccacttagttttatggtcctcaatgtccccatctgtgaaatgattaatgacattacctgtgcttattacatggggttactctggcaatcaaatatgatagaaagaaaggttcgaaaactgtggacttttactattgttcatagagattcargctagagtcttaagttttgtgctgacaaatctaaaagtaacctgactaaaaatgtgtagcaactgagtttaaaagaagctcaaataaaattatctttaaaaactcaatccaatgtaagattaaataggaaatacattggatttacattttctttgaagtataaggaaacgtgcagtctgctgggatccatcacactgcttggtctggaaaaagaggagggtgaattcaraactcttgtccctctctaaattcttgtaacyttctaatctctctggagtgtaaacttgtggccaagattttgagctctggataaattctagttttaatctcaggtccaccactcactcacttgccagttacataagtttacrttgttatttaacatctcacaaccacatctatacaatgtgggtaataataatattacttatctgaaaggttgatgtgagcattaaatgaaatgatgctagggtaaacgttcaaaagatgacagccatgaccaataatattttgttctctagcattcgattacatggtgactgatactgatctctgaaacttgcctatgtagtagcatttttgttcactgctgtcctttagtaattctacataccataaaaaaattagttatgcatggtggttttattttcatcttaccaaaatgatagtttacagttttaaaaatcaaatgcaagccttataattaaaaacagaagcattttgctccagctttctcaaatccctcagaggcattatccaccaattctttaagtgtttcttgtgctaattaactccacattttaaaataatatgtgtatgctgaaatgtgtggatttgcttcatttcagatgttgtctatgggctttcttctatggaagatgagatttaacttttaaattcaacacacacacacacacacacacacacacacacacacacacataccatgtttatattttttctggcttttgaatatagatgtatcacaagatggggctaggttaatattcagtgttcatattattgtgagtccttaagtactatttacagctgagccatttataccaataacatcccttcctctctcaaacagctttttgtttccctgtagttaataatggccctgtgatgccctctctcaccactcctattcaacatagtgttggaagttctggccagggcaatcaggcaggagaaggaaataaagggcattcaatcaggaaaagaggaagtcaaattgtccctgtttgcagatgacatgattgtatacctagaaaaccccatcgtctcagcccaaaatctccttaagctgataagcaacttcagcaaagtctcaggatacaaaatcaatgtgcaaaaatcacaagcrttcttatacaccaacaacagrcaaacagagagccaaatcatgagtgaactcccattcacaattgcttcaaacagaataaaatacctaggaatccaacttacaagggatgtgaaggacctcttcaaggagaactacaaaccactgctcaatgaaataaaagaggatacaaacaaatggaagaacattccatgctcatgggtaggaagaatcaatattgtgaaaatggccatactgcccaaggtaatttatagattcaatgccatccccatcaagctaccaatgactttcttcacagaactggaaaaaactactttaaagtttatatagaaccaaaaaagagcctgcattgccaagtcaatcctaagccaaaagaacaaagctggaggcatcacgctacctgacttcaaactatactacaaggctacagtaaccaaaacagcatggtactggtaccaaaacagatatatagaccaatggaacagaacagagccctcagaaataatgccgcatgtctacaactatctgatctttgacaaacctgacaaaaacaagcaatggggaaaggattcccgatttaataaatggtgctgggaaaactggctagccatatgtagaaacctgaaactggatcccctccttacaccttatacaaaaattaattcaagatggattaaagactwaaatgtwagacctaaamccataaacctagaagaaaacctaggcaataccattcaggacayaggcatgggcaargacttcatrwctaaaacaccaaaagcaatggcaacaaaagccaaaattgacaaatgggatctwattaaactaaagagcttctgcacagcaaaagaaattaccatcagagtgaacaggcaacctacagaatgggagaaaatttttgcaacctactcatctgacaaagggctaatatccagaatctacaatgaastccaacaaatttacaagaaaaaaacaaacaaccccatcaaaaagtgggcgaaggatatgaacagacacttctcaaaagaagacatttatgcagccaaaaaacacatgaaaaaatgctcatcatcactggccatcagagaaatgcaaatcaaaaccacaatgagataccatctcacaccagttagaatggtgatcattaaaaagtcaggaaacaacaggtgctggagaggatgtggagaaataggaacacttttacacagttcatgggactgtaaactagttcaaccattgtggaagtcagtgtggcaattcctcagggatctagaactagaagtaccatttgacccagccatcccattactgggtatataaccaaaggactataaatcatactgctgtaaagacacatgcacacgtatgtttattatggcactattcacaatagcaaagacttggaatgaacccaaatgtccaacaatgataggctggattaagaaaatgtggcayatatacacyatggaatactatgcagccataaaaaatgatgagttcatgtcctttgtggggacatggatgaagctggaaaccatcattctcagcaaactattgcaaggactaaaaaccaaacaccgcatgttctcactcacaggtgggaattgaacaatgagaacacatggacacaggaaggggaacatcacacaccagggactgttgtggggtgggaggagaggggagggatagcattaggagatatacctaatgctaaatgacgagttaatgggtgcagcacaccaacatgrcacatgtatacatatgtaacaaagctgcacgctatgcacatgtaccctaaaacttaaagtataataatgatataaataaatagataaataataatggccctgtaaccccaacactttgggaggccaaggtgtgtggattgcttgagcccaggagttcaagaccagcctgggcaacagagcaagacctctgttgcstttttttttttaacttgctcactttcctatctccttatgtctaatttttcccctacattgtctaatagtttcctaaattttttcagtatggtcaaaygcatcccctaaacgatccattgctttatttggttgtcatccaccctagagataccatcctttgacttcacgatgtagtggttgctttctggaccagctcacacctcttaccctagcacttccttcactattatcccaggaattccctgttggctggatagtgttggattcctctttcctggaaccccttcatttccctttctcagattatttccgcattccgatgcagaatgtccttcatgagaggcgactttttargacttttaatctgcgttcaaatcaattaatagtttgacggttatcaactattaggttgggaataaacatctctcagaaatttgcaagtgtttctctgttatctttgcctacaatggtgccattgggaggtcaagatcattctaattcctgtttcctggtattcctctttctctctagaatttgctcttagttctctgcattttgtagtgaaactcgtttctcttatttgatttttttgtttaagttcatttttttccatgaaagctatgtttctattgacatgacatttgagtattcattgcaaagctttaaaatgtgtgtggcccagtggtggctcacgcctgtaatcccagcactttgggaggccgaggcgggtggatcacctgaggtccagagttcgagaccagcctgaccaacatggagaaaccctgtctctactgggcatagtggtgcatgcctgtaatcccagctactccagaggctgaggcaggagaatggcctgaacccgggaggcagtggttgctgtgagccgagatcgcgccactgcactcctgcctgggcaacaggagcgaaactccgtctcaaaaaaaaaaaaaaaaaaagtgtgtggcccatccacatgcaaatatccttgtttctctgataaaattgctgattgtattcttgaagtgttgattcaataagtgttttcaaaacaacacttttttatttttttattttatttttaattacaaaagtaatgcatatatgcatttttatgctaaacatccaaacaaatgtagaagacaaaaaaaaaaaacacacttgttccaaatcaagcttatatcctccrcagaagaaaacactattatcaatttaatgtgtagctttcagacattttattatatgtcaacatggttatacatgcacatatggaaatagagagtttaatttttgtggtaagagttttttaaccaaaattgaattgtatagtatatactattttgcaaattcctttcttccatttagtagtatatcttagagaatttgacttataagtacacacatattgaatttttcttattaatgactgcataagattccaaaawgtagatatactatggtggaaatttctttcaaacttttcactacataaacaacattgcatgcttctttgtgcacaaatataattgtttctttaggatagctgtcagaagtgaaattgatgggtcaaatttgtgttttggtcttgtaattatgccttatcccagaatgatgccatgtggaagttagacacaggcccttgtgttttagaaagtgtggcagagccttctcaacttcagagtcacccagaggaagttataaaagtcagaagggacctatggctacatatagtgggccatgtctaataagaaggtagttttgttccagaattctttaggtagggaaatgctctaacatctgttagctctacytaagacaaatagaagattctccattaattccccaagtcaggaagtgataatgaggtacacctagtgcctgggtgtttaagatcaaaatgatagctgagtaattaattggcactttccatgtgccttttgtctttctagctggccaaataagcatatctgacagtgtgtggcaaatgataaactcccacaccaaccatgtggaggcccgtatctgctgcaaaaatcagttgttccgatttgcttttcagcaacctcagtggattgttcctttctatccactgcattttcacttgtctggaaggtctttcaagcaatatgactataatttgcaaccaaatctgatctcccgccatatttgccttctccttctttttcctggagacttctttcttctccctttaaaagcaaatatttttacttgaaagtatagtaacccaggtgaggttcaccttcaagactctccatctgaggtcaaactgggcatgtgacatttctcagttgatttaccatccacgttgactacccatctattaggcagattttggagacaacctctttgtcctcctaactgtgcaatggaattaggcttctcccttatcgacaatgaccccatacytaacttcagccttcctggaactccctttttatctraacacttctcctggccctgatgaagaatgcagtccagaaggaaagccagtgaactttaaggtcaggtgctcctgtcccttgggagcaaacctcggtaaagactagatcccaaatgtgggtgctatatacaactagttccaccccttactatgttaccagtgttcccatggtgatgctgagaatgttacaaggacctttcactcagctattgtatcagttcaggctgcttggtctgggcatgccaataaccatatataaatgttttgtttctctttattctaattaatctgcccacttaacttggctggtatggcttctcatccctggcccaccttttatcatactctcacctttatgtttgctgccccctgttggttgctgtgaatcccagtgaatgctgtatgttagccaagcaattgcaggccatggccagcctatgcagcaagccaggtgttctgataccttttcttgcaggaatgggaatgtttctgaaccctctggaaagtgccctgccactctcacctgattctcatgcttactggtcccacctatggataaagattctctctgggaattgcagggaagctgccattcctacctagtatgatgtcccagtaagccacttgactgttgcccttaggtacctccccttccccatattattcttaatctttgaccttcccagtgccattcacacaatccataacagttctctcctaccctggaatattctctattagtctgactccacctttcaggartttctcatggtgtatgctccactgggggcacccattttgctttctaatgcagttaaggatgtctatataggcatgtatatatttacatatatatatatggatttatgtttatatagctgtgtatctgcacaaatggcagacagacaatccctacctctctctccatacacacacacataaacacacacacacacatatgtatatatatgtatattctgcatatcatattataggatgatacatatgtatgttaatatcaaagggttcaaagaagggagaagacrtgggaagtggctcttagtctgccatttgcactgagtcctctgtagctttaagaagaaatatcgatttatttcattggttgtgcttgtttttgacccaaatgttcactttagcccatggtctgatcttttcaaagacaagcttactcaagcaaagaaagaggaaagctccccattgtcacgtcaattatagataagttcatgccaacataatacctcctcctcatcttatttctgtagctcaggataaaaagataatctccaaaggaggcytaaaaaacagccacattaattaaaggaaagagattttttttttytaggaagtgcctaataactaacggacaagcaaaggagactcattagtggaagtatttcctttgaaagggcacacacgctgtgaaaaaaaaaaaagaaagggttatgccaggcttttctctttgtaaataaagtgacaccttttatctttttttctgttaataacacaggctggggagaatgagtctgagggaggcttgtagataagctggcaggatttgaagattattcagatctttagtttcttatttctctatgttctagggtaagacttttcttcattgttcatggccttgtataaagaatggttaggattggggatcttagggagttaggcttaagagtggtggcttakactccattatcccagttaactgatgaaccatttgccatgaacacctttggtaggtcatgctccatttagcaactgggcagggaatccgatcacctcaaacactacattcaaacagaaaggcaaaagatgctataaaagctagatggagagataggtggatacacagataaataaacctgatagaaagatgatagatagagatataaataagtaggtagataaatgaatagataggtaaagagactacagaataattagctaaattctgtagaaagacctaaaagggaaaagatattcacaagcgggggcattcagggtgagtttgaatctttaaggagatttcaaaaaggcacagagtgatgtctaggatttgcatgataaactggaatcttacttggagcacattttaccaacaccccataatgaaggttacacacagaaacagcctcagactctccagaaggaactgtcgaatttgatgagcacacatagagctagactaaatggatggggtgctgaggctgggcttccataccttaagtacctacraatcatgtgagtgattaaaagatttcttaggtcaggcytaatttctaatcatctctcactcaagccagcatatggccactgtatgagttcaagagtgagcatttttttgaaacgcagttaagacttcagtttcctgcaccgaagaactaagtcactggcaacttgtcatgctagagaaaaaggcaggggacaattccatctcaggtatcatcacttcacgttgcttaccctacctacctaaatccagctagcatgtttgctcagccccacgtcagctagagtagaaattacttatccacttctcctctacacaaacctctctttatgagtacarataaggaaaacaagcctgccaaatgacagtttgtcattgcaggagccatggccaraatccacatttcccatatctaatgagtgtgactccagccatgttcttcatttacatttatatcgttcacaggaatccrtgtagccctgacttttgtgggcattgttatatcaactccacccccaccattgccatctcatctggtttgggagttaacaaagctctgtcatcttctgagtactgtgtgagatggcccagaaaggtatcattgttctcacttgggaacattgttcccactaaatggagagatggaggtttatggagctaacagtcaaagagtagcagtcacatccaggtcttcagcagcaccaggcttggccccgtatacatgaactctgactgctccatcactaacaaggcacatctaatctggaactgtgccttatgctttgctaactgtgacatacagcacactattggcaatggctttcgtccactccatccaccatcaccactggctctactttgcaggagttatctgatccattttctctgttgtttccttgtgagggagagcagacatgcacaagctattgtcaaaggwcaaattacaacaaatttagtttaaagatctcrctgggctttatagcaattttagaattggtcaacacttaattccataaaatagaataagtgttccaatgagcctagcagaagaggttggctttctasacagagaatgtaattgtactaggtttgttgcccgatgtgcatggcaaatcaatatgccaagacactggattgtgacagagaagagatttaaccatagggccaccaaatgaggaagagggagggaaaatcaaatctgtctccccaaggagtttggggatagagtttttaagggttatggagtgggctgaagcatggagattgttgacggggtgaagagtacagagtgaagtcatgggacagggagataaagaaactatattctcactctgatttcattactctgtggggggtttcaaactggttggcaacaactgttttgctggaattcaggatctggaaaacaccttaagcaattcttaaacaaaagtcttgtgattttaatgtcagagatcttatctataggaacaatggggatgccagtggtcaggatcagtgctctgtgactatcaggttcaaggaagtgggtaaaagtgaaggctgattatttactcttatttataactatatttctgtccagaattcttcttaaccctgtgaggatggcttcaagaagggttgaagaaagcagaaacaaagaacaaaggatgtattcattatttttcaaagttactttttcttgtcgggtgggaacagggaaatagaacaatagaaaaataactgattagttaacatcaagtcatgtcaggctacttattttgtgtaaggaatacagcagaaggaactttattaccatgtcgattgataattaaaactgacctgcttggaaaatggctgttatttctgtctcccgatttctcagaaggctggataatgtcatagtttaggtttggtgatgtagaactttagcatgggtgactctattttgatctttagtctggtctgttgaagtctagtgcaaaagtttagtccaaaacaacaacctcctataatttttaacactgtaaatctctcactagccctgaattcttcagtagactgtattttgagctcctgctgcaggcaactgcagacagattggccacataagagcagtagccttcagaccaaagctcagaggaagtgccaaaacatgtacaaaccctggatgggttctggccttggcaatcatgagccaccattactgttaaggaattaggagtggaatagtggaattttccttgctccagattttaaggacacactcaacttcatccaggccccagcacatcacagacccacctatgagtcagtactaatggcagtaytagtggcctcaaaggacatttgaagaaaaattgttacttaccagaccccaccagagctgctgagatgatcccatgtaaccctaactacagagttacctttagyttttttcagttaaattgtattttatgtgagttttaattgacacaaaatataattttgaaagcctgcaaaaaaatgcataaatgtaaggcagaaatggccaggacattcctccaaataactctgcctggaaaacaaaatcttgctgtcattactggattgttcttgttttctccacatgaacaaggtttggataatgaagtaacagctcttcctggagccccattgccaaaaactagcaataaaggaagaccttactacctaacacatgtggctacttgaaaattatctgaaataaaaacaagccagaatcaacataatagtgtataacaaaacccagatgtctcttgaataaaaggttaatcaaatgctaatgttaaacgaaagagtttcaaaggcaggaggaagaatgttagagataaatgaagaaattaggtgcagcctctgtatgacttggaagagcaagctctctgcacaggatcgtttttttgttttttttaggaaattaagcttttctttcacacctagaatgtgtcagatgctttataagaaaggcactaaatacttttccaggagcttaatcttcaaagtacaatctactaagatgtacctggaggaagaaaaatgtagcaattcttgcaaagcaatgctttggatattacctttctgccatattttggtagacgtttatatataaatcctggtttggtcaggaatccagtaagaatttgcaatgtttgtaaaagcccacctgctttgctcatgaattgcagaacagctcatgcctccctccacagcaccctctgccctggtctccatcccagtgaagggggttgtgctcacagtctgtatcagaatcagtcagggttctccagaraaacagaagcaatagggtgtatacatacaggttgtatatgtaaagrgagatatttattttaaggaattggcttatgcaattgtgaaggctggcaagtccaaaatctgcagggcaggccagcaggctggaaatgccaacaagaatttatgctgcagctcgagtccatggcagtctggaggcagaattccctcttccttaagcggaccatagtcttttctcctaaaaccataagataagacccacccatattttgagggcaatctgctttactcagctctgctcacttaaatgttaatcacatctaaaaaaraaaaataccttcacagcaacatctaaactagtgtttgaccaaacatctgagcctcgtggcctagcccagttgacacataaaattagccacacatccagtgggcaagacagacaaagtcacaatagacatcgaaggctactggcggggactgagagaaagtggggagtctacaagggtgaaggagaggaaagcaccgtgaaaaatacttgcaaatatttattcatgaggtcgggaggcatttcagggatcttgcaccagcatgtgcgtgtctgtgtgtgtgtgtgtgtgtgtgtgtgtgttaaaatggggaggaaataagagaatgatacaaatgaagctgaggaagtaaacaggtcaaggaggggagggtggattctttcttgtctgctcaagcatargagcaagtggggtcatgcaattttattttataactagtggctaagcatccacttatcttatggaagraggtcctcaattctccaagaaccctggtgcttcagagtcagcagtgccattagcaaccacargtggcgctgtcctttctcakgagagcaccaatcctacaactcctttggttaagattataaccctggccagccagtattcccccaagccaccctagtgggaggcctggggagccttcctaagcccctgggctttgtgtcatacctggccataargcttgcctgccttcatgctccagatagctttactctggtggcctcgttgcccttgcctaacacctgaccttgatgtaccctcccccagctcaccctgaaagagcagcctgactgggaatctggggatggggtgtttttcctttctgtcccagaacgccctgtcttcctcatgcaargtgatgagctctcacccaagggctggctctgcargctggatcacacagctgtacatgcccttccccacttcccattctaaatccacctgatcaagctggactccttcaccaggcccttccaggaacggacaactctgctctgaggagatcccttctcatggaggatgactcagcatgtcctttcatgcagcttccatctaacctctacctcagcaggtgtctgctaccctagggcacatgaggatgctcccaaagccagcagaaatccaggacagcatttcaagaaggggagaggccagggattctgcaacatggtctgtcacagaggagggtggcttcgatggacagcaatagcaagaccagagcaggtgcaattccaagggtgcaaagacagctctggatgctggagaaagtcaatgacagtgagtccctactcacctgctccaccactaatggctgcagcaatgccacggctcatgttctgggctgaattgtttccccccagattcatatgttgaagtcctaacccccagtacctcagaattagactgtaattggagattgggcctttaaaaggataactcaaatgaagtcactagggtgagtcttaatccaatataatgggtaaacacccatgagaagggcaaatttggacacagacacacagaagaaagaccacaagaagacgtaggagaggaaggccatctgcaacccacagacagcagtgtgagaagaaaccaacccagatgacaccttgatcttgaacttctagtctccagaatcgtgagaaaataaatttctgttgtttaagccccccagtctatggtactttgttacagcagccctagcgaacaaatatactggcttcaatctaaatcaacttgcagttagcaatttcaaaagactgcgtgaagctatcccaaaaggctatccgcaaaggaaagctgcgttcttgtgcagtactattaatagattatagaaggaaataaggatgacagatgttactggaaaccaccttgtgcctagaaagaagcatttcctttctctcaaccgaaggacagcagcaaggtcccagatggtgctgaataagcaagtgatcaaatatcttatcattttggatataaatcaatgcagtgatattacctctcaaactttgctcaatcacttagccttgttagattagtcaatatctaggttgaagagcaaaatgagaattggaattggccttttcaaagtcagatttgtgtacctaaaacaagccaaattagttttgcattaaaaaaaataacacagcaagtcacatatgcatatttgagggtcactatgaagctccttgtttaacaactaacactgattgtaataattgtgccactgtggttctgaatgtcaataatgggagaggttctgtggagatggggtatatgggaaccctctgtactttccactcatttttgctgtaaacctaaaactattctaaaaaatatagtttattaatttttaaaaactgaaaatagtaactatttaaaaatactttgactattcaaaaaaccaacacatcaattagtctgtatctatcaatatatatattttagagagtatcactttaaaaataaaaattacccatacccaaagctaaacatcacttaactttttttgtttatatcttttcagtgttttgtctctattttttttattttacaaagctgactttctattgtaaaatcaatgtttgttttactttcctttataatatagcttttgaaagctgcaatgtttttcattgtatggttatagcatcatttatttaacaattcctctatttaggaaaaatggccatttctaattttttgtagtaaatgagattcaaaaaacagtgtcaaaataaattctcttttgtactctttaatgtacatctgattatttgcagaagataaatttctagaagtagaattggtgcattcatcagtttgctcattgtttaggttttttaatacatctctgtcaagagggtattattagcatttttcctctgtcatcaatttggcaggtcagagatggcatcttattttattttaatttgcatgtacttgatttttagtgaaagcaatttttttccacatatttctcaatcatttatagttttctttggtgagaagacaggtaccttgagtgtgtggcttacagcatctatcacagatcactgcctggcacacagtaggtcttcagttagtgactgaattaatgatttaccctgtgttcttgycatcttttgggaagtgctccacttttccctaaggatctgtatgatcccattttgtcataagaatatcagcccattttctaccattcatatggaaaatggtttgttctcttttctcatttaaatttctaataatcatatttgtccctgctaattatcaccatgtgcccagcctggaatgtgtactttacatattttatcttgcttaattcttaccaccaccctaggaggtggatgttatcatcctgtttactaatggaaatattaagactactcctagacgttaaataactggccctggtcatactctcaagagacagtagcacctagttctgtctgatattccataagccttcacctacagtgctatatcgcttccttttaaattatatttatgtgggatttttgaaggaggtaattgtctttgtctattttctgctgctgtggcagaataccaaagactatgtaataaagaaaacaaagaaaagaagtttatttggcctacagctctggaggcttggaagtccgagagcatggtgctggcatctggtgaggaccttcttgtgttaacccatggtggaagggcaagcaagcatgtgagatagcgagaggaaacggggaccaaactatactttcctgaggagcccacccccacggtacctaaaccatgccctcaataatggcatttatctattcatgaaggctccaccctcatgacccaatcacctcttaaagttcccacctcttaatattgttacagtggcaattaaatttcaacstgagtttaggaggggacactcaaaccatagcaataatatattcacctgcatcaaaaataatatatataggtgtgaagtttaaaaaaaaaaactccttccctcatttgctcatttttacccctacttactttaaataaccactattactaatgttgcacatacaaccttcttgagcctcttttatgtatatacaaaatatgcatatatattcttctcccatctttttacacagatggcagcacactataaacaccattgtgtacctgctgtttagacctttcttattagtacatgagcagcttccttgtttttgttgtgttttgttttgttttgtttttgtttacagacaaatgatattccattgtatgaattgattacattttagctaaccagttcaaatgttacttaacatttgggttctatcaatcttttgctataacacagtgttacatttattgttgaccacatatgcaggtatatctgtaagawaaattcccagaaatagaatggttacagcaaagggtatatatatttgtaattttgatrgatgctaccaattgtcctccacagcaattgcagtacttatatttatggtacttctgaggtatagaaggtttttattttatcagttagaaattgtgtttggctgctaggaacagagacctaaccacagcagcataaacagataagggttttcttttctcacagaaatggaatctggaggcaggcagtatagagctgatatgagagctccacaaagtcataaggaacctargctcctttatttttttggctctgtcattctgaacatataacttccaatctcgagatcacaaaatgactgctgaaactctactgtcacatccctgttccagacaagaaaatcaagaaaaatctaggggtaaaaagtgtctttcataggagtccaaaaatatcattgcccacaccttttggcaagaaatattgggaagtataattttgtgactgagcacwttgcagtcctcagtaatataagggttctattaggaaggtcgaatacagcgcatggatattgagtagataagcagcaacctctaaatgtgtcccatatcttgatctttttattcatagagtcctcactccaaaatcaaatacatattacctgcatttctttttatttctttcatggcctcaattttaactctaattcattttgcatttattttagtatgtagtattttaaagcattttttcttgttttagaaagaaaagaaaggccttaaagatctgcccccattccatctttccaaaagaaagaaaaaatatttctatatttataagataaaattacaaaagtattaggcaaattaattaacaatatgcatctacatggttaatctatttggaatttatttttgtgtatggtgtgayacargaatttcttttgtagttagctaattgactcaatatcacttactgattaatttatctagacctgattgtttgaatttattatatacaaatggtttaaaatcaaatatttggattcaatttccattaagcttattgattattaggaagaggagaaattgatacctttacaatgttgggtcatacccttcaagaatatggcatatctcaatttattcacatctggtgggttcttcagcagaatatcatcattttctttatttargtcttacatatgtcctgtaggtctagtctcaaggctcttatagctgggttattattgtgaatactttttcttattaagttttctggggtgtttttttttatttttgtttgagagtgtctagctttggggcccaggctggagtgcagtggtgctatctcagctcactgcagcccctgcctcctgggttcacaygattctcctgcctcagcctcccgagtagctgggactacaggcrcgcagcattatgcctggctaatttttgtatttttagtagagacaaggtttcaccatgttggccaggctggtcttgaactcctggctttaaaggatccacctgcctcggcctctcaaagtgctgaaattacaggcatgagccaccacactcggcccttattacattttctaaaactttattgctaatacatagaaaagctatgaagtttttacatgttgattttctccagcttgctgaactcttattaattaaggcacctataaaatgattctctcaaattttctaagaagaaactctcataaagaataaataatggttatttaacttgtgttttataatatatttatatctcacacatttttcttgctgttgttttggctacaacctccagactaatgaataatagctgtcagtgtggacatccttgtcttgtttaagattttaayaagaatgcctctattttgtttttatgtcctttggcttctaacaaattcccattatcatgtttcagaacattttttatgtttctaatttatacagagattaatcagacatggaaattttatcaactatatcaagtatacttgaaacatgtatccacataatcacgttgcattttcttttaacgaattaatttaataaagtgtattatatgaatagatttcttaatataaaatcattttgaaatgactagattagattttactttgtcatgagattatgttttattattctttggattcgatttgtcaatattttatttagaattttaaaaatctatattcctaagatatatttgtctatagtttcctcttctggcagccttcttctcaggaattgttcagcccaacaaatgaactggaaccttcgtgtttttctgtgcttctttacagtttaaatggcaaagaaaacatgcctcttgatggtcaatgtaactcatttttaaaatgggctggtccagtccctttttgaaagtgtatctttggggtttcaatttcttttaagcttactgtctatttaggtttctaccatttcgttagtcatttttggtaatttacatgttccttgaacgtacttattcacctcaattatgaaatttgttgttgtaaacttgtataaagtattttcytttttttttttttttttttttttgagacggagtcccgctgtttagcccaggccggattgcagtggcgcgatctcggctcactgcaagctccgcctcccgggttcacgccattctcctgcctcagcctcccgagtagctgggactacaggcgcccgccaccgcgcccggctaatttttttttgtatttttagtagagacggggtttcaccgtgttagccaggatggtctcgatctcctgacctcgtgatccacccgcctcggcctcccaaagtgctgggattacaggygtgagccgccgcgcccggcctgcagtcctcattttaaggcctgcstattttatgcttctccagtgttttcctttttccctttctagtcttctgctggaataaccaactttactttatttctcctgccctcacacatgaaggttagacagtttcatactgaattcagaagccacaatccattttcctctgagctctgtaaaatatatcacatgttctcttagcatttggtatttccactggaaagtctagtacctgggaagctccatttgatcctccttcctttataatgtttttcccccttgtctaaaagtttataggacttttcctttatcctataaattcagaaatttcactagatgtgatttattttcagtaatcttgtctgtcattcagtgagagttaacartctgaacactaaaacttttctgcaaatcaaaaatatgtttgcctgttttcctccatctcctctgttctcttcttctcaaactcttattacataggtrtaagacactctaggtctctcaacacttcttaccctcccttcmtttacttctttctctttgctctgggataattccttgaattcattttcttatttattagtttggtgtttagcaatgtccattttattgctaaattaaatctggaattttaatagtttttaattgcttggagagctctctttttcctatctcttgtttttctcatagcaaattgttcatatcatagtgatagaagcatccctcacatttcactgacattcaaaattgtaataatcttccctgcattttcagttgtttcagtgaggtctgcatttatacgcagttaacacacacacacacacacacacacacacacacctctctcaagagtttaatgcatgccagatattgttttaaatgccattattaccacttcccaagcaaggagactgggcagagcctggaagccaacccagacagtctgattcagagccaggaacactctaccaccgtgcaataccagcatttgttctttacgctcagctgggtctcctatttcaagttgctacttctacagatttgtccctaatttttctatctgcctcatttttatttacttatttatttattatttatttattgtatatttatttttatatatatttatttatttatattatatatatttatttatttatttattatttattttagagacagagtcttgstctgttactgaggctggagtgcagtggctcactgcagcccaactcctgggctcaagccaccctcctgcctcagccttccaagttgctgggactacaggtgtgtgccaccatgcccagttaatgttttaaattttatttttgtagagacgggggtcttactatgttgcccaggctgttctggaactcttggcctcaagtgatcctcctgccccagtctttcaaagtggtgggattacatgtgtgagccaccgtgtctggcctctcacttttacaaataaagataatgtatccatattgataaccactgtggcctgcacccagcccctcctcaagcaagctgatagcagggcatccacaaatgtgcttgtgtgaggggtggcacagacctggggttcaagccatgccagcttctaagggtacacaaagttatagttccataacctcagagggtgcaggactctgatgtgtttcaaagccccagaatctggtgtctgtccgattttactgctccagcctctgatggccaatgagcagaaatgtgactgccagtgtaaagcagcaagacagcctaagcaaagcaggctcccttgggccacagacgtggcttggcaatggtgagtgccaagggcctctgagcaggacacagggtccgctacacagctcagcgtctcaaaaactcccaacatcccagaacaagacagagttaatcagctacataaattgagttaattagctacataaatcatgaaatataagttgttcttatctaaaattataaagaattaccaacttttaaagataaacattaaataagatgaccttttgtagacatccctactgctgacactgccaaaccactcgcgcccctctcagcacttcacctgtgctcacctggacgccatctgtttcctgtcttccagaaattcttccaacctggcctgtcaaactcagccttctgggttttccagctctgttgcatattttatcctaaatgaacatcccttcagttatttcagcagaattttgatagggaaggaaasagagcacgtgagctcaaatcaccttaaaaatgagtcttgtatttctggcagattttatgctgcatatttttaaattaattatcataattttttatcagaagaaagtgtgagaaggatttttcttggtgaagtcacttcaaccctaaaagtttgggtgaattcacggctactgtaaaggtaagccacaagcccacttacgacagctcttcacagtaagataatgtatgtctaaagatcctccattcgttggactcaaagatatttatttttgttaaatatcatatttccttgcagaccagagagcagcatatctagagagtaagctaagcttaaatgagcttcagagtggcccctttatatatttatttttaagggcatttaaaaagattaatgtatccatgacataagaatacaattataatcgtataaccttcattaattaaaagagctgacgtttaagcagagaagttagtaaacagggtattgtatgcagtggggacagccaagttcaaagtcaaaaaaggagctgtttacattagagaaatagcaaagagtccgaggtagcaagaggagaaggaagcagagagcgatacagaacagtgccagacagagacgtggagtccagatcctgttgggtcttgtaaaccatggcagtaagcttgcatttcctttgaagagggaagtgagaagatctgggatttgggagagtagtttggtaactccattgaggtggtgttggtgagtgtcaggtgctatggtggagttgcctgggcagagagagctatgcatcctcgagcatcatctggggaactaggaatggacttatcatgaatggatccagattcaacactaccgtctgaagcagcactagctcaggttgactggactgtgcacttcaggctgcaggaggggctcagggggttgccatgggtctctttccaggactagcccctccctggagcttgctcattacatggcaatggcaaragcggtttatatactttgacaggatattatttggttcagagtcatcagggttatcctcttcgtgaatgtccttcyttatcaatataaaatcatatcatgtaatggtttttgcctttgagtctacttcttccaggataaacactgccacctttactgtcttattattacatcagcctgatacacctttgctcattccttcattttttgccttcctatgtcagttatttttaagctaattttttaaaataacatacaattggattttgcattttgatttaagctaaaagtatttttattttagtaaagcactttaagatattttctatgtattatcaaaacaaatacatttrctcttataacttctagactagctcctttttccgccctttattttatgcattatatttttattgctcttttccttcctcttacgctttgaaaacttaatccatctttttattcttctcatggttgtcataaaatataaacatattttaacccattttctctaattataaaatgtcaactatcaaacaatatttattatatcaatcctgagtaagatactaaattttagcacactgttacttcctctgtacttgactacttttcaattttaattgatagaggtggggtttttatgctttgctttcagccaccctccyccacagtctacawtttatgactcagcttaaaaggaatggttctcaccacatagaaatggggtgattttggccccaggggacacttggcaatgttgggagacagtcatgattgtcactggtgggaaggtgggtgtttgctactggcatctagtgggaaaagaccaggaatgctgttcaacattctacaatgcacaggacagagtccacaacaaagaattgtccagcccaaaatgccaatagtgttgaggcaggaaaattccattttagaggttttgtggctcttatgataattgtaagttaatattactcattgtatttaaattatttttaccaccagtactttcatatcctcactcttaaatttttaaattcctgtttatccctcgacgggctagaaaatatttttaagtaawttttttttcaagtagactctatagaaaggaggaattatacttccctaagctgccagtatttgagcaaatctttctaacactctcagacacactcactggaagcagatgaagctattagtcagtcattccccagcctctgagaaggaatatttttcttgtagatgttttccctcatayatttgcacatgttacacttccatttgttaatcgcctgtccttatcttacccgtttacctattcctatagtctatgatgcaatacttttatgcattttagctcttgcataatgtatgtgttacaaatatttaacctataatatttaagatatcactgatacttaatatttctaatttttaatgtacagaaagtttaaaagtttatttttttaaaatttacctcactgtctcttccttcacttttttgctwgaaaggtcttgtctattctgagatcaacattttcctaagtgcctcatctatttgttttcacatgcgatcattttaagccatgaggatttattttggtgtttgaaaataccctcaaattgttaagcaattctcataatttggtttattaaataattcatcctttcctctctaatatgaaatgctacttttatggtgtaccaaacacaagggcctgtttctgcagtttatgtcttgtttcatcaaatctatcttttcttaccctaaattttatttcaattattttggctgtataatgtttttatatttgccagttttccttcattacaattacttttaacaaccatatttttaattttccttgcccatttattctttcagaagaattctggagcaatttaatccagtttcaaaaaaatagcccttgggacttttggttagaattgtattacatttccaaataccggaagaattattgcaatactagatatcctcagcccatcttccatttctcttttcttctacaatttttatttctttattgtttcctctgagttctggaaatttttcttaagtttaccttttccttcgctaatccaatttttcacataatctgccattcttctggtgcaggggttttgaatgtagtaatcctatttctgttctttatgtgatccttactgatatcaaatcatttcattttggggactctcaggtctattttcataactttgggaagtagaaaaacactctttcccctatcccttgctatatgtctattttggtgaaaagcattgactaactctttggaatgaacaaagctagtcttcttagagtctagggatgtctctgtttttcctcgcagagacaggtctgtatttagcccccttgctcacagttgagagattgctgtccacatacttcaggcccagaaaaggaaggagtgaaatgctgagatttgctctggttttatttcacctgttcagagacccaggggamagtgtcagagttcaagggatggtcacaacatccagcytgactcccaccccttctgctgaggcagccatgagttagccccagcagtctccacagttcactggctacacctgccctcattagaagtccacagcccygtcctcccaacagagccatctgtgtctattgaacccagtgtgtgcactgctgtgggcgcctgttacccagtggcattgatggaattaaaatgcatctccccaaggcctggccggctgagtgacagggcatagatgggttccccagaggtccttgcccattccccagaggtccttgcccagcctatctgcatgaaatatggaagaaatgctagctaacttaaattatgcatgttgtctgatttacagcccaagtataggtttcagtttttgcatcccttttagttccttctgcagtttaggaggatgacattgacatctgtgtccaactcgctgtctctctggatatttaagaagtagaaaggtggtcaagggaaagttgaactttatttatgtctcagtttttatagtgagaatatttttatttttctcatttctcattttcatattttttagttaataaaaatagaaaggttttaaacaataaagtccaagataattcctaaaacactgaatttttcctaatgtgagttgagactttaccaaaattaccctcaaaaggagcaagttgccttcaggcgaagtcctcacaaagcctcttataatagtgtgtaayagtaagtgctctcaaaattatattactcataaaataaatttgtatttaggagaggcataatttcccttaaccttaatcaatgctaattgagctcttagggaaatgacccaatgaaataagtataaaaaggatgaaaagaaacttaatgaagatgtagtcactattgcttgggaaggggcctgcacttcaagagtggggtgtcgttgttaaaaagccttctaaaatcaatttagaaagcaagacactargattgcagaccatcatctacaggataagcaaagagagcaaatgtatttgacgttagaaatttgggaatgtgaacttaggtcttaggataaaatttccagcactggctggatgtggatgccaagagttctgtatctcatcattttggtggaggagacattgctagcagctctgctctgacaactctgtgtgagactcaaaaagcagctggaggaggaggagggctctgatatcaaaggccccttggaggagttaggataaaatagtgtcaagaactgtgagagtaaaaaagcagtggtttgaaatcaatattccatatacataattttaaatgtgtgtgagtaaacaaataaattaatttccataaggagacatttgactgattcatctacagtccaaagagctttgatatttaagttgcctataaaacattttttggatagtcttcttggagaaaatgggatatcaccttatattagagattggagatcaccttttatttggatttttatttatataaaawtacatatattatgaccaggcacggtggctcacgyctgtaatcccaacactttgggagtccaaggcaggcagatcatgaggccaggagttcgagaccagcctggccaacatggtgaaacccagtgtctactaaaaattcaaaaattaaccaggcgtggtggtgcacacctgtaatcccagcttctcaggaggctgaggcrggagaattgcttgaactggggaggcagaggttgaagtgagctgagatcatgccattgcacttcagcctggtgacagagcaagactccatctcaaatatatatatatattattatatttttttctcctcttcaatttacatacttggtacagcagccttgaccttcacaccaagtcaaagtgtgtgaacccagaaataccaatgtttaggatgtaggcaagtaaaaaaatcacacgttttgtctaacatctctccataggctgtccctgcttaacccagaacttcaggcaaccccaggccttgagaaaacaagaatattcttattgggttacagtaggagttttgtgctcaagtcaaaacaggtgatactaaatttttcttaatcttcgaattccatgaccctatatccactcaacaactccctccaccaacccatgtcagtttctatcaattattctttgtcatttgccctgagcatgtttaaatttaccaatttaaacatgctggtaaatggtctgaaccatttgaaaacaatctgaaaaacaattttttcagattgttttgttgctgttgtttactattgcttcttatgtcccattccttgcctccaggcctcatttttcttcttactgaagcacaccccttggtagctctttcagtaagggtctgtaccgaaaacacttttggagccctttatgtccgaaaatgttcttcacatcatgttcactcttgattaatgtattagttggtaataaaattctaagttcacttcctttacctcaagaaacagtggagctattctctttatcttcatgggtagacagccctgtttcaactcytgaattcacacagagaaccaggatccaggccgtgctgtgaatgagatttgtttgaccccagtcatcagaaaagctttgaggaacgcactrtgatgttgttattcagtactggttacgaatagcatggaaagcttcagatctcacccttttcccaatatgttgttggtgttgttattcttgtctcctgtttctggttgaagaagagctcccttccttgtttttgaacatggagatatatttaatattacccttttgtatttgatctatgtttggaatgagaagaaggctcaatgtgagctcactctgacatcttgaaccagagaacttgaaaaaatttaataaatctataatccatttttctcctaaacttttttctataaattctcatcttttctcatttgaatttccccacatctctaatgtcaagttgctttttcctatattgttcaatctcttgccaggcaaagggatgggtatagctcagtgatttaaaaatatatacatatataatatatatatttatattattataatataaccatacatatctatttcatatattatagataattatatataatatatattagtataaccatatatgtctattacatgtatattatatattactatattataaccatatatatctattacatataatatataatataaacatacaatatatgatatataattatatattaatataatatataatatatgtaatatatatgtatggttatatatttttaatatataatataatatatattatattaaatataatatatattatatatwatatatattatatttaatataatatatattatatwwaatataatatatattatattatatataatatratataatatatattatataatatatkaaaaatatatactttttttttgagatggagtctcactctgtcacccaagctggagtgcagtagtgccatctcagctcactgcaacctctgcctcccgagttcaagagattctcttgcctcagcttcctgaatagctgggactacaggcacgtgccaccccacccatctaatttttgtatttttagttgaggggagttttcgccatgttgtccaggttggtcttgaactcctgacctcaggtgatccaccccccaccccgccctcccaaagtgctgggattacaggtgtgaacgaccgtgcctggcctatatatatatttttaagtgagacctctcaatttatgactatatgtattggaggtctctttccagaaccatatatatatacataatatataaatatatattataaccatatatagctattacatagctatatatggttctggaatgagacctctcaattcatgattatccarctgggagtcttttgggaaagttacttcacctctgtaagcctcaggtttttcatctacaaaatggagataataagcataacaatttcttaaggtggttttggagaattaatgatacttggtaaggaaagtgcttagcacaaagtgagcactaaataaacattagttattttattatgacctattgtaagtttttgtgtttttattcacattatgcaggatcctaatgtctagatatatttctgccacataatagccattcaataaatacttatgaaggaattaatagcagtaacagctcaaaagcctaaaagagagaaagtaacagtatattttgagttggggagatggaatttcagcataacattctttaatcagcttttcaatccatgatttcttatctttttaagagccaattactggttaatagatagaattttctgaaacggagcacaggaagctattgtagggacactggactggcaatctgggtagaagattcttttcctcactttttcttgtttacctattttctctacttagaaacttttctgtgttgtgtaatttccataaggcaacttacacatttttttaaaatctgtgagcctgatgggataattgattttgaagtcactccttctgagttttaattgcagctcaattcttaattgtgtgaccatgtacaattgagcttatgattcagtctccccatatgtaaaatgcagataataatagatarcaaaagtttttgcttattgttttcaaaaagaagccatagtagggagagaatttttcagtacccagaagctgcgacaagaatatagttaaaagcaattccacctggcctcctattgtgttttattttgttttgtttctgactgaatcatctgctacggttaagcccacctcagcaggctgcagctcctcccagctctctctcctttcaatctcatttcacaagcctagtaatgcttccattgcctcctcctgttaccatttttttgtttcctacaggttgagattcagtacgttctaagagggagttcagtttctgctccattgaaaaataattatgacaaagcagcattttccaaaatatgtttactaataaatgttaggcaagaaaatgtttctatggcccaggaatttagggaaacactcgtataaataatattaaacagatgtctttatcttaagactatttgacattttaaatatcagaagattctgtcgcttttctgaaaaaggggacaggataagtcacttgcaaaatgaaaatgtttttttttgaggcatctggagaactacttttatgaaaggcacatgttgggaaatgttctgatggagctaaatccaaagaggatagtaagacaagagggatgattggagggaagaagggaaggaatcgtgtgtaatctggtgacaagagcagcaccatcaaaaccccaggcttggctgcaaatctcggctctctgccacttcccagccatgtgattgaaactggtcactttaattcttttacaagctgttttctcatctttaaaatgggtataatactacatctctcaaaaggtcattatgagaatttaattagaaaaatcaagcacatagcctaataagtatgctttcaagacaataaaaaacataaacacagaaaaatgtcttattttccttatgtattttttgcattcctagcatttgcaatggcatcaatcatagtaggcactcattaaacttttgctgaataaataaatgaacaaaaaagctttatcaattcactgaataggtaattaatcaaacctttgcaggtttagcactatgccatatacacaaaaactaaacaaaatrttatcattgtaattaagttgaacaggatgcattttgctactgttaggcattcgcattgtgagtgctacagtyttttcttagcctgacatttttctgcaaatgtgttacttccaaaatgagggcagaatttgcatgaataacgttttggtactaaacacwgtatttattaggatgaaccatttttatagggctttctaaaacacaattatatggayataaagatggacaatacaatcttatctccctttagccaaagagtattgacaatgcaatttgtgcaaagtttatgtgaattcctgtagttcctcagtcgtttcttggtttgtagataaattatcatgttgagtagattctttgttttcaacttggcattttgatttgttttcttacttgtttacttgacaccaaacaattaaattatgcccccccaaaaaaacgcataaaaataagcccttcggtgactgaacctgcatacagactgatgcagaaaaggctgaagcttcccaaagaggattgtttgaattctcaaacagaagatggtcccaggcaggcaataactgcttctgtctagtgggcattagatttataaagtgaaactgcttttctccaagtttaaaagtataacatgtaaaagtttgaccaggcctcattgcacaagtggagtgctaatgagaaatgggaggactcactgaagggaggacactgttcgcataggaacagtgactcagtgcctcgcagtacccttccctgatttctcattattgctccatctatgcaagactgggttaaaccactgggttcactaacagaagcatttccagtgactccagaatctttttaacrtcctatgtaaagagttcagagcaatacatgatgaactgcacacaaactctttcggcyttggtaactttcctgaggaaatagatgtcagacytaatcacaactcttttgccattaagtcttaggggaaagtttctcttgaaactatattggtatttagaaaaagctttgaatctaaatgtcatgcatctctcatttagatagataatttgtgagggaaaatagtctggatgctattggctcattcattcgttctactaaaggtggaatgatatgttaatgtcttatcagccaagtcaacytaraaataagaakgtcaaccatgttaaattgtaagattattcaatcttatagattataattccctatagcatgcagagttatttcacaggctttatcttcttaatttgacaaattttttagagaccctacttgccaagcactgagaatatgaagttgaataaggaatagtctctaatctcaatcaattttcagactaatggaaaagtctatcatagaaacagttgttatgagctctaaaatcatagatgaagaataattaattctcattgctgaccagaggtaaatagaaagaagagtcaaatttgagctgagagccctagagggatgaaagagagtttgtcaaagcccattctgaagtgaataacacggtcataagaatgagccatggggaatatgacaaacagcctggtgtggccaaagggtrrtggtggcagtggcagaagagaagcagcctgagagatggytagggccagaacaagagccataggatctctcctagtacaggtgggcttcaactatccgcgtttttacatgttgctttggcaaacttgagagaattgatgaatgccttctatcccttcaccaagattgtrttgaatcctcttccatatacctaccagcagtgttctaggctctggggatacaacatactccctgatttcatagagtttacattctctatgaaacagataattaatttaaaaagcaataaataaaaatctatatatcaagaaataaatactctgcagagtattaaagcatggaatattagtcttttctcactttgctataaaaaaacacctcagactgggtaaattataaagaaacgaggtttaattggctcatggttctgcaggctgtacaggaagcatagtggcttctgcttctggggagayttctggaagcttccaatcatggcagaaggtaaaaggrgagcaggcatcttccatggcaggagcaggagcaaaagaaagagtgaggggaaggtgctacacacttttaaacaaccagatctcacaagaactcattcacggggagcaggyatcttccatggcaggagcaggagcaaaagaaagagtgaggggaaggtgctacacacttttaaacaacsagatctcacaagaactcattcactgtcatgataatggcaccaaggagatggtgctaaactgtccatgggaaacccactcccctgacccaaccacctcccaccaggccccacctccaacactggggattacaattccacatgagattttggtggcgaaacagatccaaatcatattacatgataatgtgatagaagataaataggtagtacaattagaaaagatggtcagaaaaggcctctccaaagagcctacayttgggctaagacttgaatccccccaaaaaagaactaaacatgcaaagatctgagggaagagcattccaggcggaagtgcaaaggtcccgaggacagaacaaattctctgtgttttaggactagaaataaagctgggtggctgtagtgaagggagttctgtacatgtatcaagtagctattgttgcataataagccatcccacaatttaatggcttaaaacaacaatggtttatttagctaagtattcttgcatgtcattaatttaaaccgagttcagctaggtgggtgtctcatacatctatggacagctgtgggtcatggaggcaactttgctgatcttagccaggacctctagcatttctggggttttcgtgggrgcatttgaactgactcaactctgccccatgtggtctcccatcttccaggaggctagcccrgcttggtgactatgtaggatcccaaggagagcagaggctcccaggcttcttgaggcctaacytgagaactcacacaccaccacttctgccaaactctatcacagagtaaatatcaaaggaaatcaaaggccagcccagatttaaagggaggggaaacagactctgactcttgatggaagaatctgaaaagtcacatggcagagggagtgaatgaagtagacggagcagtggagtattgtggccattttygcacagtccaccataaaattgaaaagattgaccagagacagatcatggagggcttggcaatctgtactgatgaagccatggaccagaagagaagtgagtcaatgaagagagtttctcttttcacatggccataaaataatagtgagggctatgacagcaaagaggaaacaaaagctgtagtgatgagtgttagacaattgatgagctgggagagaatttgttgatccaaatgcaatcttctcatccttactgtgttccagaaagttaataggaaagctgaagttcaaaaacagtctccaaaatttatttaaaaagcaatgaataaaaatatatatgtcaagaaataataaatactctgcagagtactaaaccatagtgtattagtrtgttctcacattgctataaggaaatacctgagactgggtaaattataaagaaaagagatgctgggcatggcggctcatgcctgtaatcccagcactttgggaggccaaagtgggcagatcacttgaggttaggagttcaagaccagcctggccaacatggtgaaaccccgtctctactaaaaatacaaaaattagccaggcctggtggcaggtgcctgtaatccctgctactcgggaggatgaggcaggagcatcacttgaacttggaaggaggaggttgcagtgagccaatatcatgccactatactccagcctgggtgacagagcgagactccatcaaaaggagagaagaagaagaagaagaagaggaagaggaagargargaaggggaaggggaaggggaagagaaagaggaggaagaggaagaagaagaagaaagggaaggagaaggggaagggggaggaggagagaggtttaataggctcatagttttgcaggctgtacaggaagcatagtggtttctgcttccggggaggcctctggaagcttccaatcatggcggaaggcaaagggggagcaggcatcttccaaatcaggagcaggagcaagagaaagagcaaggggggaggtgctaaaacacacttttaaacaaccatatcacatgagaactcactcgctatcatgacaatggcaccaaggagtgccatttccatacacgagtcattccaaccaccacactgtccccctgataagacttgctgagacatttgctgatacctaattggcttagaaatgcaaaagtacacctctaaagatgaaatttgaccctttcccccaggctctgtctggaggttgggttgctatcacgaggttaaaaaacattgatgataataaacaatcatgataatattttcttatgtggaaattttattacctgatatttgcaacatttaaaagagctaatgaaaataataatatattaatagccaacactggttgagaacttgccttgttcctcttatcttgacctctgagatgccaaaaataaatgttgccaatccatgcatgtgcagttattcaagctatattttcttgaattgaaatataagtcttaaaaccagtctgttccctcacagcagattgatttccttgagattagagagtaggtttcatttatctttatgtatctagtaggtcatatagcatcctgcaccaagtaggccatcaaaaaatattcatggaggcagtggctgacacctgtaatcccagcactttgggaggccgaggcaggtggatcacgaggtcgggagttcaagaccagyctggccaagatggtgaaaccccgtctctactaaaaatacaaaaatttttatttttgtattacgggcgtggtggcacacacctgtaattccagctactctggatgctgaggcagagaattgcttaaacctggaggggcagaggttgycgtgagccaagatcgcaccactgcactccagcctgggctacagagcaagactccgtctcaaaaaaaaaaaaaaaaatcatggaaaaagtgaataaatggtcttcctcagggatagaaagggtaaaaaatgttttttaattagaaagatcaacaactagagtagtttgagcccattaaacatagagcaaacctccttggacaccctccattttcatgtctgtgtataaattgaacaagataatgaaaccttctgcttataagaaaaaatgttagtttctattctgcattgtagtagattttaaaaagatttccattgaaaacatctactttttaacatttggtgctaaatttgtaagttcytgtttccgaaaaaaattcacttaagttgactaatttatttcytgataaatattacatgaatatctcatatgaatatatttctttaaaaatttaggcacctataacctgattcttatcccaatagaagcaattaaggggcaggtggtggtatcacctttaactgaagtagtaagctgttggtcttccaaggtgacccagcaagcagatgactgaatccaaaagtgggtgatttatcatgtcattctgggagaacatgaagaagttctcagcttttagaatgtaccttaggccaattacgtgcacgttgacaaagatggatgtgtcttcattatgtagtttattatggatagatcagggctgggacaagaacctacatcttgtratcctagtacagtacatttttaggaagcacaacccccatagatgaccctacaargagcctatactggagtgaaataggaggctgtgagttttacaagacatcaaacaatggctgcaaacttgattttataggtttagtaatatctccagggaataattctctttccctttccctacttctgtaattggtatatactctaaatgccattagacccagcttgctctaaagatctgtagggatagtrtttctctctctccctcattcagtatgtgcccatgtcaggcctaactgaacacagggaccaaataaatagaagatattccattcagatkttatagcctgactgctttactctgcaacctctattattgagaattatctattttgactgcaaacacgtcatttcatcaaaggttctttacaaagcagatgacattgaaaagcagcctcacatttttcaggtttagagactagatttttatggacttsgaaacttggaagtcagctcaccattctggcatagtcttcctgccaagcccaaattctgaaatcagtgtgggagcaatcagwgggtgacatccatctcagagtcaaagaaacaggggacttctgattccttgtaatttctctagaagtaaatcctcttttccttgactggcactcttctcttttgagggccaataacaacctactcattaagaaccatttaacattttccaaaaatacttccaaaaccattaactcatttgatccatgtatcaattctatgaagtcagtaggccaaatattaatatttgtagtgaacaagaaagccaagcacgaagtgttcaaaaaactaacccgacaacaaactgaaaccctggatattatcaggataacaaaaaaatcacctgacctgacccccagttaggaaatttcccactgtcctatgcactgttctgcacacagtaggaaatttcccaattaggggccaggtcagatgattttttttgttattctgataayattcttctcttctagactatgagaagagaggtgctgtagtggtggagaagcgagtgtgtgtgtccccaagaatattttaggtatggccaccaagttagccctaaagaaactacaattaaactaggaaatagagcagataaactctgtgtctagaattctaaacttcttagatttatatgtcctaaacccaagtctttcccgtctcttttcaggctgttcccacaagtactgacattacttccaaagaggagaatttgggtcactaatctagcgaaagcatcttcccctctgaattcaccatcaagatgaatgctatccactagaaatataaaggaagccacataggtgatcttaaattttctagtgggcacattttaaaaaggaagacaaggcaattaaaatataattttaataatatatttcacttaacccaacatatccaaaatattaccatttcaacacatgatcaatattctaaactacattagtgagatagttacactcttattttcattcttagtcttcaaaatccagtgtgtattgtccactcacagcacacctcaactcagaccagccacgtttccagggcctcaaagtccacacctggccaggagctgacggtctagctcctgtgagtaagctagtcctcagattttataaaactctctcttcagggttgtgctcaccttccccctcccactcctgctgctcctgacctccatcaccagaagagacccccaagagcaaatcatatttttgtttccaagagggcccactgacaacactaaaacccaggaggaagcrgttgacttaagaccttcgagtgactcactttgtaggaaaagcagagaaaggctggcaaacaagaaaaacataagctcatttttctccccctcatcaacctcattccccaacctgtttgcatcctgaagagggcagaggcctccaaagytgctttagagggcagaggcctccaaagttgctttctgggtcactgcggggtgattcacccaacaataggctataatttacaaggtttttctctgcaagtcaactcttgctaatggaaggacgacatgaatgttgaggctgacaggctggaagataagagtagttgtttgttccctcagcccattgaaaaatccagccccaaacccatttgaagaacagttcctaatagataatgagacacaaatcgtgtgtacctgattgtaaatgaatagctcatatgcacaaagcaaactgtaaaacctccatttctcagccaggatagcactccattaatgatgtgcttttgtttcttccaaagactaagtgctcctttccaggagaaaatagacctcaacctcacctccccacccaccatgtccctacccccaccccaaagagactgcattaccctgagtattaatatacattgcctaacaaataggcaggcaaccaaaaactgagcaattttagccatttaaaccctgtcttgaaatagcaactcactggataaatggacctaccatttagcaattttcaagatttccaacctgctttgatttcctctctaggtagttttttattttgtgtttcagcgggcatcaactttgcaatatcaggaaaaaccagagccaggcttgaaaataatgctgagacatctagactcaaacccgggacacaagtgggaatgaatcaagccgggaggatttttccaaatctacaggaagtgaaattcttctgctccaggcaatgtttatcacccatgtagaaacctcattggtttggcarttgtgagctaacagggtatggcctgagttatgctctgaatagcttacagttactgccttggatgtgaacgatttgggagggacaagtctgtgcagtggcctaaagtgaggcgtgagtttgtgcctagcttgtctgtgaaattgggtttgttttttctgcttttactacacattaagccagatgaacacaaggacaccagttgttacttttgaatgatttttaaaattacatctctagtagggaatattgatttactttattgattttttaagatcctttctatttctttagtgtctgctagtcagtggcctcaaaaattgaattttcacgtgttgtctttgccacttaacattatcagaagcttcttgaatgtttactaatagaagtgtgactcctttcatgcttgctgtgtctaatgttatttttgtgttagcaaaattgctcttcaggaatatgctgatggctaacttgcagaaatagagatttaggatagacataatgaaggacttccctacaacactggatattaaatgctgaaaaaggcttttcaattccttcctgaaataagccagggccataagcacttagsccactctatcgaagtctccccgagaaaaccctgcggctttctctgcggattcctccagcccaacaccgaggaaccagggcctgggacttctggagtccctcccaggactaattcccgctctgatgcccagcacaaatttatcataactgcctgactctctcagtgtggtgtggtggtggtgatggtgtgtgtcttcctgagtgtgttggttggggatgtggtgggaggggttggccagagagttgaataaagaggaggaaaaaaaaaaaggaattagatttttcagaactgcacaaccaaagatttrcacacttatttatagaggtgacccgtgagcttggttgaccctggatgcttttctgcgctataagggaacccgtgggtggccgatcactctctggccctccagagggggcctccctcctgcgcggaaagcgtcccggtgcacagcgcccagctcccgggtctctgtcggacctgcgactcccggcgcctttctggtgccctccacgccctccacrggcaggggcggagctgaggggcccacacagctccctctgccccaaacggggcagagaatgagtaggtgcctgcagccaggggcgcgcccatcctttcgcacacaacaggctcctgttctctaggcagtgattaagtgagaaaaagagaagcctggcttgggggtgagtctggcgctgggtgaatgtgaatcgccgacacggtctcctgcagggctgcggcgtcctggcccgtggctgtcattctgtcccggtgcttcacccccggcyggtgtgaagccagtgtgaatccatggcccgcgcggacacacccgccaagcaggcacaggagcaaggggctctagctgcgtccactccccagggttaaaaattaactgtccggccttgctggcatctctgttgacaacgcgatcattcctgctgggagcgagtgcgccacagagattaactctgcctctccagtcaggccgcctgggttccactcctaagccttaccctctttaaggctcgttcttcataggtcagatggatctcagtcgtcctgaccgcatagggttgctcaggcatagaaggcactgggcacctggtgtgggcaagttgtgcctgctcagtaaatattaactaccgactcacaggacatgcctctctttttgctaccctcgcacgtttcttttctcgtttccttctccattgtcactgacccagggttggctgatataagtgaaaaacaccaagggtgccgtctgttatctaagtcatgcaaatgctttaaaattatatgtctgtgtatgtatgaatatatgtatcaggctctgggcacatagaggtgaaatatcatgtaagcaagcacttgtataattttcttcagataacaagcttgaaaacacagcctctacttgtttccttcccttccctgtctccctttctctaccagagctttctggaccatctccaaataaactacttgctctcaaatcccagtgtcagagtctgattctaagtgaatctagagtgctggcaacccagaatccttttccaggattcargatggaatcttacaggagatacacagtcctataaaaagttagaataataacgcagcatcaatttgtgcttgatcattaagctaataatgcctcctttctccaccagccccatgtttctgatactgtgatgtgtgatgttgtagttgtgaaatgtaatattgtgatgtggcagacagattataagagttgaatgcaccaggagatttcctgtggcattataagagttgaatgcaccaggagatttcccrtgacataagtaattctcaggccctatgaagtgcaggctttaaaaaaatctggttcagcagccaaaagtcatcaaaaattaatgctagtattttctctctcagagaatgctaatgggaacatgttctaaagtccacttttctttccttccttgttttctcagctttttgagagtgccacattctctctttttgccctgacatctcccagcttcccaaacattctgactcagtcttttcttctctcccaacagatgctcctgctagctcttagttaggtaaatcaacttagcctctctatatgcattaattctctctcagttcccaaactctccctaataaagaagaacttgagagttgactcagctgtcccccagtataaagtggtgggcatgagggagagaaatgtgaattactgatacataattttccccctattaaactttattccttggaacatctttgtgaattctgcaaattcacaaagatattcatagtcctatattcatttgaattatccaaagctccttccagacccagttgacccatcttttctttccttttctcactggagtgggcataatttcctgccatttcccactgtgctgccgccaattctggctgtgtccattagtgtccctcttgacaaacttggatttgaaaaatgggcaactaaatcttcatttattagacgtgtttttcttttactaacagctgccatctgttcctctccacctcaatacaactcccccaatccctccagcatcctttttggacattttcattccagttcctctttattcatgtgcacattcaattgccagacmgtttttgaaagagtagaaataagaagtaacagaaaatagaaataataataaaatactacccccaaaataaaagagacatgggaagagtttcttttttcaaaagggaacacataaacaacacatgaaaggttggaaaataacaaagaaaataattttttaaaaaaagatgtagacgcaggaaggacaattatggaatggctggaaagattaataataaccaaatagcttgagggttgcctgcagcagagatgaagagaataaatcagaatagaaaaaaggtttgcctgattctattttacagacagtctcttaaaatgtatgtgtcattcaaatttgttttgatgtgtcagtcatctccagcattcatcctgggctttggatgctacttagttgcacgactggatgtgttctaagatctgccatgcaggttatattctgatttacttgcttacagtgagctcctatttggaacatagttctgaatgccaaagaaaaccaaagacagaacacttccagctcaatttccatctataaagtggtcaaagaaaactccagtccttgaacttgtgttctagtcttttatgcactgtttagaggttctgcaggggctttatgcctgccctctgtgagagatgaagcatgttaccggctcctgatgaatggacatttaagatccaaaatgtattgaagtcgagttgtcatcacgtttttcatttgcccaagtcctatatccaaaaaaaaatgatgtttttcatcatttcatatagatgaaaaacaacattaccagcccctgtttcaaaggcaaaatgcattstgcattgtatatgagttgggtaatgtcaagtgtctgtgattgcagcgtgggagttgttttggtctgttttattttgacttaagtcaggaaacaataagtatgtttgtcattttccaaacaatatggtccaaaaccacttgtggctggtgttctttcatctccacggggcattccacccaacaatcaccatctgccagggacgcctatgaatgtcaaagttctgctaggtttctctgaagcctgcttctgctttcagcagctttgaataagctacagggccacaatttacttctattgtcatttcttcagggagatagagagaaatacatctgccactttagacaagaagcccatgggaagagtacacacacaatcagaacagccagagcaggattattcaattcagctgcaatcagaaatgggggaataagacagagaagaaaagccccatcttgttatgtgtaatgctcatttctgagccagtgtttgaagacagatcatgctttgtgagaaaaacatattttttcatcagataggatgtaatcaaccaagaattaatcattagtgagccattaaataattaattgtaaattgtaactaatttctgattattaaaatgactttttttttatacctgggctcctataattccccattttaaatagttaccaagctacgccccgataagataaagacaaaaaagttgcaataagttagctttggctatgtaacaaaccattaagacataatagattaccacaaaaagtatttattagttcactataatctgggtcaggcatttaggatgagttccgctaggyggatcttctgcttgtcttgcctggggttcctcacgcagaggcaatcagctgatggtgtcagtaggagccgattggtcttgaacggcctcactcacatttctggttttaatgctggctgctgtctgggaggtgcaagggattgggccctgtatatctccaacagagtagcccaagattgttcacatgctggtggtcaacagtgttccaagatgcagcaagacagaacaagccccagtgcagaaacatttttcaagcatctgcttatagcatgtttactatattccactggcaaaagcaagtcacttggccaggtctagggccagtatgggcaggaaatcacaagggggtgaacactgggaggggggtataaatcaaggacgttactgcaacaacctaccacagacgtatccttgaaaatgcttttatccgtatcaccagaccaaaactctagggactttgaatcatgtaagcatgtgccaaaatggatctcagctatcttcaaatccttctttggacaacttaaattcagaaaggtgacttttttgggcccaaagtcacatgactaactcaatactacattaattatgaaggtattggcaagcatctggaatcactgatatagtagtttcacttaatttttaggataggaaaatttatttataaggggaaaatctatcaggactaaagagtctagaaaatattttcagaaagaaaagacagagctcaggtgggcaggtaaacaagcagatgtaatgagggaaaaccaactgaagctcaaggtgttatgtttttcttatattattttcagattcataaggcagtacttctcaaacttcaatgtgcacatgaactgcctttccagggagaactgtcctactgcaaaaggtgtatgcccaggagacacttagctctcatccatgttgttcccagaaatcatatagaactcataggacatactctgaaacctgaattcctcctcctacagtgcaccttagggagactcgttcccttggtcgcaagacacatcctcctggaatcagtgtcttcttttcataactgcagttatccactgcagcagagaagagctgaattctcatgtctcccctccctagccagcccacttgatctaaaagtgttctgtacccaggtcaagttcctcaggcagcaccaatgtgaaagtgaggaagtgagacaggaaagggaagaaacaccataaagtgtgtgttttcaaggaaattaccagtgtgggcaactgggactcaggcttgctgagcacctctgggaaactgtggagaacatgactcagtcatccacccaatgggaagaaagttgggtgtttatccacaaactccctgtcagagaccgctggagggtgctcggggaggattagttctccagcacatcactcttccttaggcacacagctagtgagtcagagaaaagccttcaggcagagacagtattttggggtttctaaaagcagcttcaagcttgkacaggagaatgcagaaggaatatgggaaaggctagagtccttctgccttaaccatcgccggrgtactaactagaaagtcaggactagcttaaatgtataatggttgtgactaaaaccaaggcaagcacatgaaaagcaacacattagtaaaacaagcaaaatgttaggcatcaaacagccctgtcggttatttctgccttttcccccttctgttgactggttgggttatgttgttgttgttatgccaaccaataatgtctcagctgccttaaataaagtatttgttttcaacattattcacccaagttactcaacaggaaagcaaagattttttccttgctttccattaggaagcaatattagttagatctggatttcattctgtccctgtcrtctctcaaaactgtgaccttggccaagttatcctccctcaacttcagtttccttatctgttaaaagacaatagcaattctgaccacataggattgcagtgacagaagtatgtaagcagcccatccatgaaaggcacacaaatgttgtcctccttcttccccactctccaatactctcctcactgctgaggattaaattcaattctacttaatcaatttatgttgaagttttactgtgtgtagactctgtcttggattacatagcaagtatagagctaataatcctttctttctaatagctttccattttggggaaagacaggcatataaagctctaacaaaatcaggtaatgataagtacttctttcaatgtgaagagcatcatgctctgatcctacagggagaaacaaattatcctctattttcttgtaatttacataacagtagttgattccataattcactctcaactgctagagtctgcaagattcccaccaactgccatcttcagcagaattgtattacacatgaaaaaacctttgactaacctctaattgattccgacattccaagaactattaaaaagagttgaaaataatctagaaactgctgacttgtatcaggcatagatttattcagacaaaacagagagacagaaggattttgaagtgagatggttttgtcaattgggcataacaaaggaagaaaaataaaaattatcgttcatgctttgaaaatctctcttgtgatgtacctctctgctacagtacctggcatttagaggtgtttaaccaatgttagggaagaaaactaacactggttaaacacctctaaatgccaagtactataacagagtactcattgatcattttattcaatcttatctactcttcaaagcccacaaaagaaacctgttgatcaagcaaagcttatcacacttcctgcaataagagagaacattgtcttaatggagaatggttttagggcctgagctgggtgatttcgaagttggtcttgcaaggcagggcacttgttgggactggaaaagtttatgaaaagtttctttgggttggtaagcatatggaggtaagggtcttgaaaggagtattgatgagtaagtcatcaatcttgataagtaagctgtttcattggtgttatgggataaactgtgcccctctaaaattcataggttgaaggcccaaccccccttcctcagaatgagactgtatttggagataggccttcaagggggtaattaaggttaaacaatgtcatatggttgagccctaatccaatatgacttatgtcttagttcatttgtgctgctataacaaaatgccattgactgaataatttatgaagaacagaaatttatttctcacagttctggaggctggtaggtctaagatcaaggccaaggccagcagttatggggtctgtcaggagcccagtctctccttccaagatggcaccttgttgctgcatctaccacagggaaggaacactgtgtcctcacatggtagaagtgatggaaggacaagaaaggtgaactctctctgatgcttcttttataagggcattaatttattcatggaagtggcaccttcatgacttaatcactttccaaaaggccccagttcttttttgttttgttttgttttgtttttcttgagatggagttcactctgtcacccaggctggagtccaatggcgtgatctcrgcttactacaatctccacctcctgggttcaagtgattctcctgcctcactctcccagagtagctgggattacaggtgcatgccaccaygcctggctaatttttgtattattagtagagatggggtttcactatgttggccaggctggtgtcaaactcctaaccttaggtgatccrcccacctcagccttccaaaatgctgggattacaggcgtgagtcaccgcacccagccaaggccccacttcttaataccaccataatgggaagtaagttacaacacatgaattctgagggacattcagaccatagcaaatagtgtccttataagaagaggagattaggacacagacgcacacagagggatgaccatgtgaggaaacacagggagaagacagccatctgcaagccaaggagaggtgcctcagaggaaacaaaacatgccaacaccttgatctcrgacttccagcctccagaactgtgggcaaataaatttctgttatttatagccacctgttctcacagccctagcaaactaatataatcggttcacagtcatctttttggtacttccagaaacaggagattaagtaacatacccaagattacaaagctattaaygtggagccagggttctaacttcagtctactgaactacaaaaccaagttctgcatattttaaactttcctctgaagcagaaacaaattataaatagggactaaatagaaagtaactaaagctttgttatatgtttcttcaattgctcagttttccatgggcagcacagggcactcattgctgtttcttttctacagcctccagcctaggacagcatttttgtttataagatataaaagccagccagtgttttatccaggtgagctgacactcttgtgtcccacccactgtcctcaggcctgaccatttctgggagcagagattctgtgatttccaactrccaatacctgcaactcttcatcttaggcagttcccacttggccctggttcagggcagattggaagttctgagtagtgaatgctccccaccagagaagccctcaaccaatgattgatgggagttggtggacaaataccccagttccctcctccctcacgtgggatgactctgagacatgttttctgtactattcccagaattccccaatgggattgacacctagttgtggacagtagtaacaagcctgataacataccttgtattggctgccttttctccccattgttgctttttgggattgcctcctagataaactatactcaagtctttgtcttggggtcttctggagaagctcaaatgataccaggctataaccactggctccaatctgacagtcacctcccatctccaacacctctgtatggatctctargtttcttaagcaagaggccactttctttaacatgacctggaagagctggcatgatctggcacctacctacctattcttatmagggttcttargtttaacaacagaagtagaatctgggtaactaatgcagaaaatgaatttattacaagggcatctctcacagaatcagattagcaagatgggaaccaggctgatttagagacgagtaaccaargccctaccataagaaccatcgacttargacactcctgcagaccctagcccaccttggtcctgatcaccctcttcctgctgccagattccacaacccagatactccccctactgctgaatgttcagctatcagtagcccccatggaactctctaaccagtatgtaccctcctggccctcccgaaagacttacagcctgagaaggagctgtgggcttgayatgcttaaaaagcatgctcccacagtgcatggagaaaggtctcttcccctacttcagcatctgcagaaggaaatggggatgtcccaaataatcagggtgctcaaatactgggttgccagaagacagaccccctactgcctcacagccccctcctcatcctgaagtccagccctaccaggctttgtgcagtgtcgcgaggccaccatgcttctccttgccacacagtgtgcatagaaggctcccctcttctgcccagtcaaactcctcttggctgcagaattcaggtcagccttcctcgtggaagatttcctgagaccacaaacatgtcagatcccccacaaatgcatgcacaacagctttcctttgagaaattcatctcccttgtaattgcatgtcatttgcctccctcccaagaagtcagctccctgtgggtccaggctgtctccacttttactcaccctgtgtgctcagcaccaagcagaaggtccagcacatattaggtaccaaataaatagctgttgaagagatgaataagtgaatgaacacatttataagcagctcaattttggtttttcacaaatcactacacagtttgtaaatagcaaaagacattgtccttttggcttagaggtgaggcagctcatattttcaatgagaaagatgttctctcatgacagacactaaaataacccaatggggcgtgtgatcaccttgattacatgttcccaaagaaatacttttttaataccaaatatttttcaaagtttttataaagcyttccatctactcaatggtaggtcatatctcaattaactattgctacgtaacaaatgtaacaagtgtctccaaagctcagaggataaaaacaacaatcattggktattgtccattcatctagacgtgggctggggtaaactgttctagatgaggctcagcagaaagcgacaatgctccacgtgcctctcwtctttcttaactactaatgggctatcccaggcatgttcttctcaagccaccagtgggctagcccaggcatgttattctcaagccaccagtgggatggcccaggcatgttcttttcaagccattagtggtatagcccaggcatgttcttctcaagccaccagtgggctaacccaggtatattcttctcaagccaccagtgggctagcccaagtatgtttttctcaagccaccaggggcctagcccaggcatattcctctcgctgcaatgacagaagcaaaagaggtcaagtggaatcacaggagtcctcttaargcctaagcttagtcatggcccactatctcttctgcccccatgccattagccaacacaactcaacatgatcaagtccaaagtcaagagtaggttagtacctccacccacaatgggtacagcaaaggatgaaaattcaaagccaacgagcaatctacytcaatattagaggtcaggtgaatgataagaagcatttagagaagcaaacagccaaatggcaatcaagccctccatcagcgtgtatgttgtatgcctttgaaaagctgtcagagacagtacttgtcaaaactgtcaaagtcatcaaaagcaagaaaagtctgaaaattgtcacagccaagaagaacytaaggaactatgatgaataaaagtaatatggaatcctagatgagattataggtcagaaataagacattagttaaaaactaattaaatctgaataacatatgggctttaataataatatatcaacatcgtgtcattagttgtgagaaatgtaccatactaatggcagatgttaataacaggggaaattgggtaaggagtatatggcgactctgtgctttcaacatttttataaatctgaaactattccaaaataaaaataaaatggttttaacaaacacagcagtcagagatggaatgtggtttatgacagcaagaattattgcttgtctagactcaacaagttcttaaccttattacagtcttacaaatgacggatttgttatctagggwagaaaaagccctcttctgggactctgagacaaargatttatttgtacccacctgagacgtgctcagagagggactggaggtgcatggagagggctcctgtcagaatcttcaatccgggrgaggccagctgcctgggatgtggggctgcctgccctcagtccctatgcagcctccctttgggctccttccagcctcactccactgtgatcttactcttctcagtatatctgtagtcttctcatcctcccccttcttctgtctcctcatctgtgtgaaaagactggatgaattctagacccaactccaagcttctatacgtttgcagtaacacaatgtaaacaggctaacttaaaagtccacagctacaagatcatttatttttcaaaatctaattgaagtcacagctcctttcaaagaaagcactgttcacctcaaagaaggtatcctgagaccacgaacagatcagatccccgacaaatgcatgcacaacagctttcctttgagaaatccatctcccttgtaaatgctgtgtcaatcacattcctcccaagaagtctgctcccggtgggtcggggctatgtcaactttggctcacccctaagtcctcaggacacaggacataagcagatgcattttccgagggcgcccggcctaactgtaagtctcgtgaaggcaggggccaacatgaatacatcctgtatcctccaaagatttagcaaaatgctaggtcctgtgccctaccccgacccccacccgtaaataccaaggaaggaagacgccctctgccccttcccctctcctccctggggcagagcggcgcccggacctgctcgctgccatggcaacgcggcgctccctcccatagacagtgcamcctccacgaagtcaccgagcagctgctaccgctgtgtctccgccagtgccatttctgcttcctcgaattttaaattggccagrataatacaacaaattaaggtatttgctggtttctattaccattttttggtaaatcactttttccctattaatgcatgggaaagagattgccagcaaacacaccattaatttcactgagaaaaagctttaaatgctcagtcatgtttttctaatacaattcagtgcttccaaatttatttactgctgcctcaaaaacaccaagtaaatcatgcttttatacacgcacgcgatgyccatgttgagaagaaatttgctaagcgkctgtgtttgttgaatcctgagcctgcctctgcacytagaacaatcccaccatgaaatgaaatgaatgcttgcaaagatttcttacttcctcctttaaagagtggtaggaaaatgaacaaagaggataaaaggaagcaagctcatcatgcattcaccaacgttaaatttccaaacggtagttacaaagcatttttaaatttaagtttcattaaagatttggaaatatattgctttttttctctgacttctcccagaaaagtttttgggatttgggaattttatgtgtargttttccacaatggagtttccttcccatgtatgtgtgtgtgtattttaatatatatataattatatgttacacataccatatgcaatatataaatattacctaacatatattacataattatatattatgcaattatatatattataaaattatacataattttatatattgtagaattacatataattatagaattatatgcaattttatatatattaaaatacatagacaaacataatttagtacatatttattagcagtggggatatttgtaatgcagataattacctgcagctttaaatgacagttttactgatacactgtatgtttggtgagaaagggtgctatgtatggtaaacggaagaggagaggaggacacaagttcaaagtcgaaaaaggttttggagattatcttccaatctaatgccctattttacttgcctagaagatgaggaccagaggaaaaactgacttggctaacaacacacmgtcaacttgtggctgagctgtgagttaaatgatgaaactgaagcaaaatcacttggatttctgcatgggagttgtcgacagtcatgaaattacactcaaagactccagtgcattcaactaaatgtcaattagtatctaaactttgccagaacacagcaaacagcagagctaagacatcctgtgggtgatcttccctccctgcagcctggcttgatgaattagagttctttggttttcagaacgtggttgctattttcttctccagctccattagcaggttgggaatggcacactagctttttaattaaaaataataataattaaaataccaaacacagtgttgactaaaaacaaaccattattcttccttaatcacttaggcttagtaatttctctttgtatttggcaaaacttcaaaaggagtaaatcaatgttaaatccaaaatttaatgactcgagggtttttggagaaaaagaaacctagcagtacatcacaataaggcaggagccagaataagtctgggctgttttacaagatgctgtgttctaccactaaaaagrgggttatcataaatattattagttatatatgagctaaccccaaaacatcwtgattgccttacaagtcaccttttatttttaaacttatgaaaatgttcccaattattcagaagcaagatcattttatatagagttctactgttaaaaacaaacacattctgttttattactgcaaaccctacatgtttctccacaagctttgtctaatatttaaactgaaagacttattacacgtattgaagtgcatataatgttccaaaatagacggtcaccaagtttaaaaacttcgctctctcagctaacacgtgcatatctttaacaattgacaaattacatatgcaggattgttacacaaaatgaaaattaaaaaagaaaaacaattgacaaagcgaagcatatttgcatgtattaactcatttgttttgatcttgtcctatattcctaaaagtcacagaagataatctgttacgtaaatatatggtcagtgtggaaaattcaagaagtatatgaaggaaaaacagaaatctccctctatatcgagcccctctttcatctccacaccccggaggtaatcattattatcattagtttggtatctatctttttataacagaactggccaatagaaatgtaatgtgagccacaactgtgtacataatatgaagtagccacatttctataataaaagcaaaggaaatgagagaaattaaataataatatatttatgtaacatagtatatccaaaatattatcatttcaacatgttatcagtacaaaattataatgagatattttacattgttttcttgtactaagtcttcaaacaccagtgtgtgtttcacacttagagcacaaatcaattcagactgccaagtttcaagtactcagtagccacacagggcagtgactacctatgggacaatacagctctagaccttcctttctatgtgagagagagactgtgagatagtatatcaactaagaattcttggccrggcacagtggctcacacctgtaatcccagcactttgggaggccgaggcgggagtattaagaggtcaggagttcgagaccagcctgaccaacatggcgmaaccccgtctctactaaaaataaaaaaaaattagttgggcatggtggcgcgtgtctttaatcccagctactcaggaggctgaggcaggagaatcccttgaaccagggaggcagatgttgcagaatcagggaggcagaggttgcagtgagccaagatcgcaccactgcactccagcctgggygacagagtgagacttcatctcaaataaaaatacataaattaaaataaaataaaataaaataaagaattattttgctgccaagaacagaagtaataatcactgaaataataaaggcttcaatcagccaatgtaacaggaagtctacaggtggccaggtctgaggctggaccagcagctaacaatccaggcctcaggatgctctctgcaattgtctcaaccatcccctgtggttgtaagatggttactgcgggtccagagagcacatcttcctactccagcttccaaaggcaggaagcagaagcatagctgagaaaatgagaaagagctctttcttcaytcatgaaggggaaaaaaatctttgtcagatgccccctttatatcttttgctcagaacagatcacatggccttcccaggttacaagggaagctgggtaagcagstgtctggctcttttagtctccacagtgagaatcagtcataggagatggggattgaaaatgtttaaaaggtaagcacccaaagaactgacatggatagatctaaaggtagcgctcctracycaaacagcgttcctacttcagagctggatggactcttccagcccactccttgtgggctgtgctgatcacacttccttcataaagtatgtaaaagaatgtttcagcacatctgcagcacgttggacattattagattctcaaataaccccgtacagtttacactttcatgagtgtcaccttcattttacccagaagttaaataactttctgaggtcacagccaagaagaacctgagtcatgaaccayctattaaacccaggccttctgtctacwaactcactgctttttccattctcagctgcaatccacctgacaagtaaagaatacttcatgaaaattgaaagtataattaaagaatctcaagttgaattttatgacaagtttgaaaacccaatgtaagacccttcccaggataagctctggcatttataaaaatccaaacagccagtctgtgactgaccaccagaaaaacagatcttggggcacttaaatgatctctctactgtgaaccactcagaattgcttttattattggagagaaggtaaaaataatgacagcaatggtggttcataatcttcaaagtatttttatgcccatcatctcrtgtgattaaaaaaaaaaaaacctctgaggttggcagaagtgtgcaacyttatttgataaatggtaactaagactcagaaaagtaaagtaattgggtcaaaatcaaacytgtaggctaggaccctggtcttggatgctaggaactatgagaaagatggatatcagaagtcattagaagctcttctattatcaaaactttctcagtggtctaggcactggttataataataattatagttcacacttacagagcatttattacatgctaagcactgttctgaaccctttacatttgttaacttatttaatttcacgagaatcctataaaattgtgcatcagtgctatgtcttcataacaaactaacgaaacttgcaggtgttcacagcaatatagacagttacttctcattaacagctactaaatgactggttgaggtttggctgatctagggtggactcagcttgggatggctttgagcccaagggttgcgttaaagtttacttctgattcatacaaataataccttgcttgtaaatttcacactcaatggacctcacacacaaatactattttcttagtcctcctgagtgggagttggagtgtcttggtggaaatgggaggattctgacaagtagagaaatgccctgatagccacctctatcaaaaagccaagtggagttgaaaatagggcactggatttgataagaaagagatcactgatgaagctgtcacctgaaatctgggagggacaccatcaagcacagctttctcwagggcaacagttctcaaattgtgtcccctgaaccagcagcaccagtgtcacttgggaattggttaggattttctaagaccctgctccagacttacggaatcacaaactctgagagtggggcccagcaatttttgttttaataagctttcctgaggattctgatgctgcttctaaatgtgagcaccactgctctagaagaacaccaagaaactgagctgtgcacagcattcaccattgctgacctgctagaaggttgatggttttcaccgtagcattygtaatcttggttgtatgcaccctgcctttattttactatatatgcaatatagwctttgaagtccctgtcctaccaagagaatcctaccttattttgggctttggctgctctaaaaatgaaaagttttgaaaagcacaagtcaccctaaattggatcctgggttgttttttgatgggggcataaagaacatcattgggacaattgatcaaatttgaataaggtatagattagataatagtattgtatcaatgttaatttcccaatgttcacaactgaactgtggctatgtaagagaaagtgactgtttctaggaaacacatactgaagttttttaacttcagagagcatactgtttgcaactttcaaacagttcagaaaaaaatgattttgcatatgtcgtatgtgtagaaaaagaatgataaagcaaatgtggtaaaatgttatatttagaaaatctgaatgaagagtatgtaggaattctaaatactcttttcccaatttttgtattrtttccaaattaaargtttacaaagaaaaagcaagtagatccaccatgacttgtgctccaaatgtatgcaactgattttgcagaatctcatgcttcatgctctatcctgttttggagcataactttcctccctccaaaggaaacaagagacacctatggaaatgctgatggagcgagggtggtcaccaggcatggagcagcacaggaacacaagcttcttgaggcctcccaacttgataatcttcacagctggaaatgtcccccttccttcagaatttctctgacattattgtctgtcctgggatattattgctcatttgttagtactaagaagtagtttaagagagcagtctctggggccacttcatgtatttatggcttcaaacagccagggttcaaattctgcctcatccactttctacctgtgtgacctcaggcaagcccctgtgtcctcatctgtaaaatagggatgataatagtaacaaggattaaataagtgtaaagggctaagaaccgtgctagcacatggaagttattcagtaagtcttcactgtgctattatttccatacatttcttccttctaagtcactgcatatatatatatatatatatggcttcaaatctagatagttgtgtattcatagtatgttcacaacatgttcaattcatctggcccattctctcayttcacacctgaagaagcrgagacccagaaaggttaaataacttgcccaagtaacacagcttgtcagtgttacttaccagctcaagtcacttgtgcctggaatcatttctcccagcatactctccagattggggatctgaaagagcagtggagtgggcaatctacttttccagagaaggtctttatatagaaaacagttttgccwggagggagccagaaacctcctgatgtaggaataacgcctctcactagagtcatcagagtcactggaatgagaaattaccgggtaccacaggcacactgaattgtaatttatttttcaaatgtgtggtaagttgaggacactggaaatgagcatggtacaatgagaatcagaaaacagtgggttaaaatttaccaattaacttgggtatgccacataattcccacaagccgcattctctgcatccacaaagtgcagttagtggtgcttctctctcagtgtggtgacagcgatcagagcggattcttacgggggggcaatgagtccagggccayggatggccaaaaaatgttctttgcttcaaaaaaggtgatggctgactttggggcagagaaactggtggtaaagttaaggctggggagggccaataggaaggggccatgaggggtggagaacaacacctggaagaaaatgttcctgctctgagagaagtagaagacctggaaccacaggaccagtacttctcacccacacatctattgtatgggcctgggatggaratctgcgccaccaactgaatcttcaagcaagcacataaaatagtggtatttcatttctaattacacattctgtcagtcatgttgggtttcccctgcaattaactggctctttacaaacgcattagcatatacagccaaaggcattggtttcagactgaggcaaatctggtgtaaaaccggcaactcagaaattgtgtgactttgggcaagttactcagagtttatgaagttcaatttcttcattcgtagaatggtggacaattattcagttactattgctgtgtagcaaattaccccagagcctagagaagaaaggaaaccacagttttttggctcactattttgtggttcaggaatttgggaagggcttgcggttcccacttgggatgccatatacttgcagtcagacrgcagcggagattgggggggttgtctgaagactcaacagggctssatgtccaagatgtcccatcacatggctacaggctgggagcccagctgaggatcaaccataggaccaaagctyagcctctccaggaccatagyctcagggggctcagacttctttacaggctgactggcttgccctaggccaaaacrcaagatgtccttttctgacgtattcttgtaagtcagacagcatcacagcatcactttgtgtgtgtgtgtgtgtgtgtgtgtgtgtgtgtgtgtgtgtgtgtgtgttccttgtctagtttttatttgtttgcttgtgggctcttttatttatttcagtaggttttggggaaacaggtggtgtttgtttacatgaagaagttctttaatggtgatttctgagatttggcacacccatcacccragcattgtacactgtccccagtgtgtagtcttttatcccttgccccctcccatccttccccctaagtcccccaaagtccattgtatcatttgtatgcctttgtgtcctcatagcttagctcccacttataagtgagaacatacgatgtttgatgttccattcctgagttgctttacttagaataatggtctccagtcccatctggattgctgcaaatgccattatttttttcctttttctggctgagtagtagtccatggtgtgtgtgtgtgtgtgtgtgtgtgtgtgtgtgtgtatcatattttctttatccacacattgattgatgggcatttgggctggttccatatttttgcaattttgaattgtgtggctcatcacagcatcacytatttcatgataaatcagtggttgaatcagtcacatgctcatccaggtcaaagagaggaacmyaggttctacctcttgatgagaagaatatcaaagaacttacagatatgttttaacactgtcacaattgtaataccactttataatattgttgaaagaattagatatataatcattgtaaagtattttgcatttggtgctattgttaagatttttatatttgcatatagcagggaaacaggttgctgcctctgagctggaaagatgcaggttttaagagacaaacacaggtatacrccatcctttctttaagccacagctttataaaaacctagtcactcraacccaggctagcaactagttgaatgccattgatttcttagaggaattaaccaaataccttctctgggtccctaagatgcattgatctcctgctttcctccccagcactgtgygaatgtcactgaatgatgggaggctgtttaaatggrtagaaatattgattttcttttctacctttttgaaagttctttgcttaccaggtgctgagcaaacatcaggcaaayggcagtccacatagaaatagatgatgtgaggagcaacaatggcagttctggcttctgaatgtgaagctggttaagcagcaggtgcccccactacacactgtggttttagattcaaaaactacacatcattgttcacacttcgtcatttgctaattgataatacagctcgcccctgtggcactaagtagcatagtggaaaatatttccaaccaatccatggaaacagctccatccrtgtctgaagagggtcgactgaaagctgagatgaactgagggccagtgacggggtaatgaggtgcatttcggaggctggggtctgcatcctaggtgtccatgtgcaaaattggttatacccttggaaatgacaacaatgttctgtcttagtctgtgtcagagatgacagataaacacargttaagaaatttctgggtttctttgatatagaggacatccaagaaaccatgcatcaacattaggttgctattgacacccaaggaaactgatgtgtggttaacttctccgaaagaaaaagccaggggttccctcagggagccaaagggcagcagattggaaatcactcgcaattcacaccattggaaggaaaccaatgatggaggatggagaagagccctgtttccaatatgtgcttcctaaaggatacagtcccagagaacttgcctcaaagaacaacaaaggagaatccccagagagtgacactttttcatgattttgtcagatactctgaatttaagtagattactgctttcaacagaatatgacgaaaaccacagtggggcattcttgggcttgcttttcagtttttgcgatgttcttagggaaaaggtcttactgggtcaggtttgccaggctctgcccttggagcacattttcagcacttggttggaagaagattcatttaaccctcagctgtagatgagaacaggatgcagcaaatttactgcaaaccagaaaataaaattggcttttctatccaagaaggaaataaagaaaamtctgccttatcttactttataaagataattcttttgttttccctgaaataaataataatcatttaaaagcattgggagaggtgtgcagtgactcaggcccgtatcacaacattttgggagtccgatgcaggaggatcacttgagctcaggagttggagactagcctgggcagtatagggagacctgactctttaaaaaaaatgtttttttaattagcyrggtatggtggtrcatgcctrtagtccctgctactcaggaggctgargcaggagaatttcttgagcctgggaggttgaagctgcagtgagctgtgatcatgccactgtattccagcctgggtgacaaagcaaaaacccatctcaaaaaaaaaaaaaaagcattaggagaagagaaagagggaaataaggtctaaatgtcccctttctgcatacaatgtgcctgggttcaggtcagatcaggcaggtactggaacttgggttcaggtcaggcaggccctggaacttgggccagttgctcttacctgtcmmtgaactcaagcacttccacacctgcrttccctccagactcaggttctttcttctgagaagaaaccttacattttttttgggggggggggttgtgtttttgttttttgttttttgtttttttgagacrgastctcactctgtctcccaggctggagtgcagtggttccatstcagatcactgcaacctccgcctcccaggttcaagcagttctcctgcctcagtctcctgagtagctgggattacaggtgggcaccaccaagcctgtctactttttgtatttttagtagagatggggtttcatcatgttagtcagactggtcttgaactcctgaccttttgatccacccatgtsggcctcccaaagtgctgagattaccagygtgagccaccgtgcccagctaacyttatgtttttaaaattgttgttgttggttttgttttcaagtgaactttttgcctgttctgtcaggatcatttcargagagtagcaaccctaaagaaaactctctttttctttgacataaaacttatttttaaaaaattaaataaatacttagtgagttcctactttgcatctggcacttccgggaactcagaaacagagtgagagaggggtcattcccagggagagggatggtactaggagatgagacaggactgggaccttcctagagctctgggtgctattgggagggcaaacaaatacatgtcattcctggaatgattaggagacactggcaattcaaagggaagacaatctcaacacactagtgcgatgggtgagtccaaattgatagcagaacttccagcaaatcgaccctccttaaaattcaagatagaactcttagaaaggatataggaatgttcacatagcatcttgtttttgaagtgattttgtggcctcatcaaggaatcccgtctagttttcattaagaacagcacacatttttagggagatttattcaacaattactataacaagaccctcccctagaaagcttcttagggatacacagcacttttcagaccccatacaacagttccataaaagtgatcaaatttcacattgtgaaacgagacacgatgcagctttttaaaatgctgacgaggcatgaacaacctggtggctttcatttgctttttgacctgagcatgttttgaagtggaggagacaagtgaacaaagtgaacagaaatcagtgaactccatcagagaaccacggtaggcttgttcacaagctgctgtgagccaccacgtcctgggtttctttgttttgcagcaacagtagctggaacacaaacattgagctcatgatccgycgacatttcctcattggctttggccatttagcattgcaggcccagcccatgttgatttttttattcctttacaattaaaatgttttggttgtttttgttgttgttgtttctgcttgaaggcttctggaattttgtctctatcactgcaatttaaatattccctggaatatggctaaatacagatctcatgttattaatcttgcctagagtgaagtgagcctttcattctctacactgaagtgttttgcttcgtggcttttccaacggttctgtttatttgtttgtttgttttccaggaatattgttaggaatattcccaagctgaggagctggtacacactgataaatctggaactgcccagctcccctgtcattgctgccctcggtctaaggaccagcaatggaaaagagtagagtggcctcctaactatgcatagactatgggctcagtttactgtagattacagtgaacactagcaatggacatgtcataagttaatgctttgaccttcrgattttaggacctaagactcaacatttgccttttataacatccatgcaacccacccctgcctgttatgtgacgcattccccctctcaggcytaagtttatagctctctggctataaattcctaagcatggggtctaccccaaatgctggcatcactaagaacaaatgggacaagaaaacccaccctttacttctacctcctgaggctcctcagtaaggagatattgaagcttytagagtaaacacacaggcggcatggaggaagagtcatgcaggtccccatgaaaagatatctgacttgagatcactcccatttgayagcagtagcatttgctgttgagaargcattcagaagtattcccatcccccaaactaactatagctttattgttgaatctgtttctctgctctgtgtcctacacgcctataattttccccttttgacattttaatctctttctggtaaaactgctaaaattcacctgtcattaccagtccatttctgcattgtgaattctgctctttgctgctttcaaaccagatttaatttgggttttgtgctgggcatcctcttcttgtctctatgattcttcaattyaccttttgttccttttyaccttttgtatcttttgtttaaaaaggtaaaattcttcaattttactgcttatcttgtgtttttttcctctccgtcttayggatttgggctcctattttgttacaatcttgatgtacatcctaattaatacaccaaggaatttcttctggttcttacgcttagttattttgcagtgcagtgtttttccctgaatcttcagcagaatgttcccctcccctgttccttgcatttttcattccagctctcctatgtgggcttcttttttctggcttacttatttttaaatgagataagctttacccaaacccagaattcaccaccagactcactgctgggttgtccctgatctgtccattaactaagtcacctcctgagagatagcactggaagagcatagttctttgccaaattcccaatgtttaaaggattggccgggcgcagtggctcatacctgtaatcccagcactttgggagactgaggcaggtggatcactttgaggtcaggagttcgagagcagcctggccaaaatgtctctactaaaaatacaaaaatgagctgggcatggtggtgcatgcctgtaatcccagcaacttgggaggctgaagcagcagaatcacttgaacccaggagacagaggttgcagtgagccaagaccgcaccacygtactccagcctggaaggcagagcgggactgtctcaaaaatarataaataaaataaaagattgcagggtttaaattgaatctcttcctacccttactgcatatttctctgacattctgaacaaataagtgattaaaaaatgacaatccaccagggttcttatgtttccactcacacacttgaaagttgtgatttatagctcccgaagtgaagcgggccgcccccagtatctacctcctttccataagctgtgtattttggaaatgtatatgtctacgtattattttatgtttaccctttcaaagaaggggtcttgctgaaaaattcccttgttttcaggaaccctgcagagatggaccgtcaaatgtgtttatctattcagccgcactgaatagctacactacttagcagcaattcttttgaattctagcagcagatggactatgagttctgcttttcatggcgtgtcttgagtacttcagtgagaaactcaagagcactaggcaaggagttagtatccagaagcctctttcagaaaratgattctggcagaaaactgtttttaagagggacagacacaagagtagaataaccacatgtgctctcaaaagtcagacttgtttacagaaaaatctatctccacaactttttttttccacagtgttccatgaacatgctccagggccacctctcaatactcacatgtgcaatatgcatttttgcatctttccaatcctgtccagcctgcttcagctgctgttcagtgagaaccatgtgttcccaaaactgtaagtttagcctggccacaggggtaattgattttctttgatttgtttgtatraagcactatccagtcccattttacaagaaggagaattggagtagacagtttaaggagtggactacatactgtaaatgttcttgagtgataaggtgtgtgtcacacccagcaccagcaaattacacatacacacacacatacagcaaaattagcatcattcagaagttcttcccacacattccaagaaacattgttgagatggtgttattattccatgcttacttatttagaatgcatttagtgttaagcaatctataacgctcttgtttgtttctttgcttgtttgtttgtttgtgacagagtccttctctgtcacccagactggagtgcagtggcrtaatctccrtgcactgcaccctccaccccactgaggtcaaccaatcctcctacytcagcctccctggtagctgggactacargcatgtatcaacatgcctggctaatttgtgtattttttgcagagayggggtttcaccatgttgtccaggctggtctcaactcctggactcaagcgctccacctgcctcagccttccaaagtgctgggattacaggcatgagccaccaggcctygcctataaagctctttaataaacttttttttttttttgagacagggtcgtgctctgttgctcagactggagtacagtggcacgatcatggctcactgcaaccttgacctcctgggctctagtgatccccacctcagcctctcaagcacctgggactataggtgcrcaccaccacacctggctaattgttttctttttcttttcctttttttctttttttttggtagagatagggtcttgctatattgcccaggcttgtcttgaactcctggcttcaaggaatccttccaccttaacctcccaaggtgctgggactacaggcataagccatgcacctagccaacaattattttttatcacaacacagcgaggttcctgctataattatcctgactttacagatgagaaaacaaatgtacagaaagcttaaaaaacttgactaaggccaaacaactagcaagtggtagattcagtatgtgggcctagacagtccttctccagagactgactctcactatccctttattcagcactctctgtattgcatgaraaaaaatacatgttgcatctgtagctgaacttcatacaacgcacaccaactacatttgggagacagattcatttatttacaaattcccagtggccaccaaaacatytgatagttaaaaagcccatcttaaatgtttgtggaaatgaatggaattggatggttttagtagcttcaatttgactcatctaagaaaayagtataacccacatgtagctgtcctcctgagggtggcctctgttttcactatctgccagccatgaaacagggctgcttcatccctgcacagatatcttcagtagaacttgtcagcaaccaacctcacttctccagcatgaatattagctctctctctgcatgcgggaggcagaataatgaccttctcaaagatgcccacattctaagccctagaacttgtgaatatgttatgccacatggcaaggtggggttaaggttttagacgaaatgaaagttgttaataagctggctttgagacagggagattatcytgaattatctgaatggccccaatgtaatcacgagtatccttacaagaggaaggcagaagagaaagtcaaggtgatatcatacaagaaatatttcatccactgttgcgccgttaatgatggagaaatgggatcataagccaaggaatgaggaagcctccagaagctggaaaaggcaaaaaaagaatccctgccccctacaagagcctctagaaggagcacagccctgctgacaccctgcttttagacctctgattyctagaactgtaagagaatgaatttgtgttgttttaagccactaagtcggtggccatctgttacagcagccacagaaaactgcccactgcaggatgaaaagccactttctcctggtatttctcaaaggctaatctaagagcatggattgttctgtatcttccaggagcactattgcaaagtcgattcattacttttttcatttgttcygcatcaccgtgctggggctcattaacgccctgtcatcgggtgctctgtgcgtaagtagaagtgtgttaagaatcaatcgctctgacctttattccctgttggtgttttgtcattcgtgggctgcttggcttgacatatgaattactctccagctgcctggtgctggggaggcacagtcaccagcccccaaatatttcagacatatgccaattgcaatttcaacacacattttttttctaccgtcaccctggaactgttccattggcaatgcatgaaatatgaacaagaggaaataattgacaaggcaccactgttgactaaggggctaacctttgaggaagattaaaaacagatgtccttgaagaagaaagaactgaggaagtgaatcttctctcctcttaactctttagttcattgtcctcatccaaaaattaaactaacacactctgaagaaggtttaaggagatcaggaattttcaagaattcatttgtattctgtagcagacagcttgtttgtttgttccccattgaaaacctacaagaaacaatactgcaacctttgttatagcaaataactggtgggtgtatccctccatgccaaacacatgccaagcataaaaaatgtgcctagaaaaacaaataactttggaaggctcttttcccagtgccttcttacttcctttgtcttagtcctcctttctgtgatggtgcccaacctaagccctggatcctttgctgttgatttcagtagcatttctccctgacttgcaggaaactgcccaaggctttcaaaattaccttttccataaactcctgttccttcctcgaaccaatctcaaccagcatctttgcaaaaagctgcctaattaatgacttcatgcacaagtgtgggtaagtgataacacctggatgtgttgcccttcccagaggacttgttttccaaatcttttcaaatagagacataatcagcctggataatgagtgctcaaaactaaagcttaacccttcatggcaggagtgtggtcagtgtgcgtgtgctcaggggaggtgatatgggtcattggaggctttctttgtgcccctcaaatcacatgatttgtactacccaaatgctgcccctgcttccactctgacgatgaaatgatttcatgaatatattgaccattataattatagccagtgacatttatagtatgcttcattattctcaacaagaaaagtttatttcatgtcatcctcaccaataagcctgtgaggtcaagaattccatcatgtccgtgctatacaccagaaatcaacaaactttctgtaaagggccagagagcaaatatttcaggctttgaggccatatggtctctgttgcaattactcaactctacggctgcagtgtgaaagcagccataggcagtgtataaacaaatgggcatagctatgttccaaaaaatttatttacaaaagcagtcagcagactagacttgccaaacccatggtctggatgaagaaagcacaacctggagaatttgaggccctacctcagaacatgcacaaatcagaagcaaaccacctcagaacccaaacccagttctttcttacttgaaattcggtgctctttcactgaaccacacggtttggggcatagtctttagcattcaggagagtcatgactttggatcaaatcaagaatactctccacccacccatctcccccgttttcatcacacacacctgtaaaggagcagctggggctggggtaccatcattagcctgtggccatggaaacagagtcaaggtaactgacccacaggaccaagacacatgacyttgatgctattagctctttccattgaagcttgctggccatatacagcataattgaatgaaactgcagaacttcttcagtcagatccacctgtgccttccagaagcacattaatgaggcccccctccggcacagaatgggaactaggcaatccagacacatccccacccagcatcctccttctggttcactagcagaactggatcatgaatcracaaaatgaaggaggctttgcaagaacaaagcttttggaacctgtattcctgggtggtgctggagccattcattcctagccaggtgccatgagcactttctctgtgggcsctgttggctcccctttacctctcacccccaaacrcctttccagggaggtgtagtgctgagtgcactggtcagatgtggggacactgactgttcacagctggagtgaagagggacagagacttctcctcgtcyccccaccatccttctgttcctcctcccatttgtcctcccaggagctctccttattagactgaggccctttagcctgcctgcaatggaaaacagagccattcacctggcccaggcaggctctttggggtgctacaatgtgcatggccaaagctattcatgtattaaagaggcttagctagctttgcttctttactgcacttacatctcaggagacactcattgagaggaacatgtcattttggccaagaacagcatttarggactttctagcttctctggaaaattgtcctgtcaagtacaccccagtctaaccattcctgccgtaatatctggcatagagcctccatcttttaatatccttttccttaatataatttcytaaatccatctcctaacattgccccaccaccctggaaacaagcatagccctggctgcaatgcacatgttccaaccaatatagaagctgagatttcactttctcggggttctcgttggctgccttggcacctcgctccacaagaaacatctttgatccctccctaattacattgatttatctcacggtataccttgtatccagagctttagatgatagatagcaatttgttaatacttgtcactaagactcaatgactggaactgtggtcagaggcatgcagccmtatcctccctcctcaattgatcatctttattcttgcaagatggtccaacctctctaaatgagggcaatcaatactgtgcattcagccataatcgtggcttaacttggtattctttgaaaacttaagctgtgtaatttgcctgtaattgggctttccaaaaagtcatatctcctgctcaaggargcaattaagccggcacactccctgtctgctgcctgctccctccctcctggcatctgactgccatgggccaagtcttccctccgcagacctctctcctctccagatccctgtttggatctcgacaaccaaagccagcagttggcggcaaagcagatgaactagaatatctgagccccttggagaggcctttttcttccataatctcccacatcacttccatcaatcgcttttgggggtttctcgcttgatgagctgtgtccagctcatcaattcaaacactgagataacacaccgcattgcaaaggcaaaggcagaaaagctagagccccaacagtgaaccctcatgtaaaccatggaccgtgggtgatgacgatgtgtcagtgtcggttcagcacgcgtaacaaatgcacgctgtgctccagcagggatgttgataataatgggaaggcagtgcatgtgaggagacagaggatatgtggaactctctgtgccttcytctcaatttgctgtgaacctaaaactgctgaaagacacatagacgaaagaaagaaagaaagaaagaaagaaagaaagaaagaaagaaagaaagaaagaaagaaagraagaaagaaagaggagagagaaaaaagaaagaaagaaagaaagaaagaaagaaagaaagaaagaaagaaaggagagagaaaaaagagaaagaaagaaagaaagaragaaagagaaagaaagaaagaaagaaagaggagagagaaaaaagagaaagaaagaaagagagaaaagagaaagaaagaagaaagaaagaaagaaaggaaagaaagaaagaaagaaagaaagaaagaaagaaagaaagaaagaaagaaagaaaagaaaagaaagagagagagaaaagaaagaaagaaagtctaacaaaaagatgtggagacatgcccctcatgcagatggggacttgtgttgcatttaggacacacttaggaatggactccagctggcttctcttctcacatttgatttgctttgtcttcagttagctaaragcaagaagattaaagtccaggcatctgggcagctttggagtgagatgagcctagcttgaggtgttttggaacaagggaagtcactaccccactgcctttctacattacaaaaacattagcaaaattatagaagtaactgctggcatttcttgagytcacacagtgggccaggtgcttatatgcaccatcacttttgatcctcaccacaaccaaagtacacatgggagtggaggagcagcacagtacgctagagaagtacctagctagactgctggagtgtcgtgtcagtttgcgaaggctctcatatggggggccacagccagggtggcttaaagaacagaaatgtatggaggtaaaagtctcagatgaaggtgtcatcagggttggtttcatcagggccatgagggaaggacctgttccaggctctttccttggcctgtagatggccgtcttttccctgtgtcctcacaccattccctctgttggtaacagtgcctgaatatgatgacaccagttatattggatgagaccccaccctaatggctttaattaatgacctctttaaagacactatcttcaaatgcaacctcattctgaggtactgggggtaaggacttcaacatttgaacttakagggaagagagtccagcccacaacaggcatgacccgtggctctgcccttggctaaccataggaccsttaaccagccacttggtgtcttcatsccttcactcctaacctctcatgtggttgtcggggaaaataactgagataatgtacatgagtactcagggcactgcccagygcaacagtcagccctcagtaagtgtcagccatcactarggtttatccttattttacaggtgagcaaactgagtcttaaatgggctccacagcttgctggagaccccacagccagagaacaacaggtatagcagggcctgtaactcatgtctgcctgtccccaagaccaagctctcatccacaatcctatgctgcctccttcacaatattacacagaaggcagctgtgtgcctacaaagaagtcaagctatattcccctttctgtgagatgaaggatacacaacccaatccatctcaattcttaccagcttcccaaagcgtgaaacgaaacttcccagccctgcctctaacaccttgtgagaggaagaacttactctgtcactatctggtgcccagctctgtgagcacaccccagaaatgcctcagatcctctaccctccccaggaagataacagtgacaaggatgaccaggccagggcccagaggtaacttctrtcttcagccctaatcctgtgtcccatatggatgcgtcctcaagcccatccatgggtgttagagctaaagtgttttaacctaccaagaaaaaaaaaatcctcagactataataaaggcaaggtatcttaccatgcaaattaagaggtttttcataaataaaagattcatgctctttgggtacttttgctacatttttaatacttcctccagcacactggctcactacgctggctggtcatttgaattacctggaaagttttaaacaccgctgaggccagggcccatycctagcaactctcagttccctgctctggtggttggcctgagcacagggcttttgccaccttcccagstgattgcactgtgcagtcaaggctggggacctctgcttcgcgaggacaccttgttttcttgtagtgatgttaactccagtctctgcctcctccatctccacatgcctttcactctgtgtgtctgtatgtcttcacatggcattctccttgtttctaggccctcttagtataatgacaccagctgtattggattgagaacccatcctaatctagtatgacctcatcttaactaattacacctgtagtgaccctatttccaaataaggtcacattctgaggtactggaggttagcgccttaatatatctttcaggacagcacaatccaacccatcatagtggtaaataaaataattctcagtggcacaagaaataattttacacaatcaaggacatcatagattaataaaccagtatttttagcaacatgttagttttgtgttttatgctccttttcttgctctcacttcaagcaaagacgtccctcaccatctttggagcaggtttcccctttgctcccctttctcctggcccctcccaccccagcacagtcaatgctaattaacagctgtttaattatcagcccagcagggaagtgatcatggcscaggtcctcagagagttatatgcacagttaagttgtcccagatactggaagattgactgtgttatgtgmccatagggagaggcaatgcggcttagtcgaaagttcatagcattgagaatccatcaacctgatgactctgccatgttttaactgttrgacaatggcttccaaacctttttttcctcaaccgtaacaataccaaccccacagttttgttgggaagattaaggccaggcgtggtggcttatgcctgtaatcccagcactttgggaggccgaggcgggtggatcacctgaggtcaggaattcgagaccagcttggccaacatggtgaaaccccatctctattaaaacaaaaattagccaggcatggtggcgaatggctgtagtcccagctactcgggaggctgaggcaagagaatcgcttgaacctgggagtcggaggttgcagtaagccaagatggtgccactgcactacagcctgggtgacagagcaagacttcatctaaaaaaaaaaaaaaaaaattaatgtagtaaaagtaccttgttaagtatacaatcatatgcaaatgcacagggatgttttctgcttcatcttagcatggtcataactggcacatcatagagagactagaggtgggtaagggatgggtagagttgcttgagcaacatttgtgcacaaatgtcaaattaaggttcaaaagttgaactggaattgtgaaatagccatctgttcattttaaagaaaatattaactagtaccaattctatgaawctattccaaaaaatcaaggagactcctctctaacttattctacaaagccagcatcaccatgataccaaaatctggtgaagacacagtgaaaaatgaaaactacaggccaatatccctgatgaacatagatgtaaaaattctcaacaaaatactagcaaaccaaatccagcagcacatcaaaaagtcaattcaccacaattaaaaaggctttattcctaggatgcagttagttcaacatatgcaaatcaatatatgtgatcatcacataaagagaatgaaaaacaaaaaccatattatcctctcaataaatgcagaaaaaacttttaataaaatccatcatgmcttcaagaaaaaaaccctcaacaaactaggcattgaagaaacatacctcaaaataayaataacagccagctatgacaaacccatagtcagcatcatactgaatgggcaaaactggaaggattccccttgaggacagaaacaagacaaagatgcctactctcaccacccctattcaacatagtactggaagtcccagccacaggaatcaggcaagagaawgaaataaaaggcatccaggaaggaaaagaggaagtcaacttatatctcttcatttatgatatgattctatacctagaaaaccctaaagactcaaccaaaaggctcctagaactaataaaaaaagcttcagtaacatttgggttacaaaatcaacgtgcaaaaatcagtagcatttctacacgccaataacgttcaagctgagagccaaatcaagaacacaatcccacgtrtaatagctataagaagaataaaatacctaagaatacatttaacgaaagaggtraaagatctctacaaggagaactacaaaacactgctgaaraaagtcatagatgacacaaacaagtgggaaagcagtctatgctcatggattggaagaatcagtatcattaaaatggtcatactgcccaaagcaatctacagattcaacgcttttcctaccaaactaccaatgttatttttcatagaattagaagaaacaattctaaaattctataaaaccaaaaagagcccgaatagccaaagcaatcctaagcaaaaagaacaaagctggaggcattgcattacccaatgtcatattatattgtaagcctacagtaatcaaagcagcatggtagtggtacaaaaacagacacatrgaacaatggaacagaaaagagaactcagaaataaagccacacacytacaaccatctgatcttcaagaaagtctacaaaagtaagcaatgggaaaagggctttttattcaataaatgatgctaggataactgtctagccgtatgcagaagaataaaactgcacccctttctttcaccatatgcaagaatgaactcaatatagattgaagatttgaaagtaagacatcaaacaataaaaactctagaagaaaacytaggaaatgccattccagacataggtcttggtaaagatttcatgatgaagactccaaaagcaatcacaacagaacaagaattgacaggcggacctaattaaggtgcttctgcacagcaaaagaaactatcaacagagtaaacaggcaacctagagaatgggagaaaatatttgcaaactatgcatctgacaaaaatctaatacctagaatctataagaaacttaaacaaatcaacaaaaaaaaaatccctattttaaaatgggcaaaggacatcaacagatacttctcaaaaaacacacaggtggccaacaaacatatgaaaaatactcaatatcactaatcattgcagaaawgcaaatcaaaaaccacagtgagataccatctcacaacagtcagaattgctgattaaaagtcaaaaaataggctggatgcggtggctcatgcctgtaatcccagcactttgggaggccaagrcgggcggatcacgagtcaggagattgagaccatcctggccaacactgtgaaaccctgtctccaaaaaaaaatrcaaaaaaaaattagctgggcgtggtggcacacgcctatagtcccagctactcgggtggctgaggcaggagaatcgcttgaacccgggaggtggaggttgcagtgagccaagatcatgccactgcattccagcctggtgacagagcaagactccatcacagasaaaaaaaaaaaaaaagtcaaaaaatagtaaatgttggcgaggctgtggagaaaagagaacacttatacgctgttgatgagaaagtaaatcaattcagccactgtgaaaagcattttggagatttctcaaagaacctaaaacaaaattatcattcaatccagcaatactattactagctatatactcaaagaaaaataaatcattctaccaaaaagacacatgcacttttctgttcagtgctacactattcacagttgcaaagacatgaaatcaacctaggtacccatcaaaggtggactggataaagaaaatgtggtacacctcatatacaccatggaatactatgcagccataaagaagaccaaaatcatgtcctttccagcaacttggatgcagatggagttcattatcctaagcaaattaacacctgaacagaaagacaaataccaggagtcctcacttataagtgggaactaaacattaggtacacatgggcataaagatgggaagagtagacaatggggactrctagaaaagaggaagagcagggaaaacaaggactgaaaaactgcctattgggtactatgcttactacctggctgatgggatcattcataccctaaacttgagcatcatgccatatatccatgtgccccctgaatctaaaataaagttgaaattacaacaaaatttttttaaatgtttaaaagatattctcatagaaataatagtgatacccagtaacaaagacttctactttcttatgttttttatttgtacaaacgtgtaagccaacrgtcctatttgaggaagcgttctaaaactaaatacagaagtgaactatacgttattttctgagaaggggaataattaagttgtatgcatgttattcgtatcacatctaaatggtaataaaaggtatagtgtatggaaggctaaaattcagagaaggaggaagagagaataagtcagtgaccttttagtaataatgtgaaaatatagtttagacactcggaaatatttctytgacattaagggctttatcatacrtggaattgtaacactgcagtctttcccagaggtcttctaaaatagtttataacccaatctgtccggtcatggtaattttatttataatggaaaacaatctaaatgactaataagagggaaatggataaattgtggtatatgactctggaacatttaggtagccattagtatttaattttacttaaattttaattttaattaaagtatgatagctaagtagcagcatattacaattcttatggtaggatactcagtgaaaaaagaattcacaactttatagtatgattactactctttaaaaattaggtatgaatatgaattaagattgaatgagaacccagaacaataaacatgattaatggggttayatggtatcattgtggggaaaaaaaaaagttttccagttatttgtgtgtaacaagtgaaagcatatattgttaaaggtgttcgtctctttcaaagtgtaactgtggacaagaagataaactgacagactcagaaagcccccttcagtctcaagactcctaaatwgctgagttgcaaggaggcagtgcccagagaatgcagcattcctaagcatcactagtttccattaaaacytaatttatggaattaaaaattaatttcatggaaatgaatttgagcagtcttttcattagagcacacttggtctaaatgagtttggagtggttgtaatagccattcctgcactgttatttataaaggtgaaatctgatgtgagtatttttgttcttacgctactgagaaacaacatattgcttagagttttcaaacttccatgtgatagttgctcttgctccccgaagatcctctcagggaagttatttacgacaaggagtcccatagaatgggaatccctcagtgaaagtcaaccaaggcctccgattagtgagtagagcagataaaggcctctcgttgtggaaccaaaatgggaagaggcaatggccaaagtgagacaccttctttcccaagtgcaagaggcactcttgcttccatagtgaaagaagtttgcgagatgggtgtatctgatggctatgtttccaggtggagaactatacatttacttcaacattttaaacattctgttaatgaatatgcacatgtgtgcacgcaaacacacacacacacacacacacacacacacasasagagagctatgggaatatgctgcamaaatctctgacttcagggaaaataattgaccaaggcccccagctgctgcactctgaaatctgtcactgtgccaacaaggccacactccccccagtgactgcragcagcaggggaactcaggcaggcccatttctgggagacacagggctcctcaaatttaatccccaacagttttaccaaaccatccttagagtacaggggaatcaaggatgaatttgcccaactttgttcactgttctttacttggggtcagacttacatcacagtttcttgtatttttctctcataaaatacttgcacatttaatcccatcttggcaatggcttcctagaggatatacatgtgtgtgtgcatatatatgtacatatgtgacagtatgacacacacatatatacacacatacacatatatatttatatatatacacacatacatgtgcataagtatatatatatatgtatatgtacctttgaatcataatttatctccatttgatgggcactagttaggtccaaatttttgccgttataaaaatacccatctatcccatttttctaattatttcacatttctttggggagatttttttttaagcttgccacagtgactgtgactgtcctttgttggaatacctccaaagaactcccagagccaatgccacacttaacacttgttttccacatgtatagattttctggtgtggcttcaatttctctggtaaatgagcttcaggccttctcatgtcagtgtgcagagtaaagaagtgaggatctagcctttcacaggatcctctgcaaggcagtgcagtaaggaggggaagggttttctgccacgtctgtggtctcttcattcttctcttcctgcygtcattctcgacctgggccctgctgtccttctctcatctggtatccattagagttcttgattacaagcaacagaaatggattctgcttcacttcaaccagagagaagttgtcaggaagatatcgggggctcacaatcaatgggcagctggaggatcagtcttgaaagctccggggctgggttgcaggaacatagtgaggatcttttactagaagagcctggtgagggaacctccaggataaatgggctccaggggatcttggtccttgcttcaccttcccaagattcaaatcctgggaaagagacacccacagaggcacccctaaggcagagggagactctaatgcctgcagcaggcgggcacctagaacttcactccaccaacacagaacctgatggattggaagtaattcccccaaatacactggggagatttgggaagaggaaaaaaaatgttgggctacaaaatataatagtaatatcyagcagcacccttttatatatgtgcataatccttgagtttgtacatgttcrgagactggccacaactgttgcatgataaattagtctttgtccaagtgaaarcaagtttcctgattaaracaaagcctagccattgccagaagctgcttgaactaactcagctcctaaattgcatttacatccaagagcttggggttctttctggctgtccaaaattgaaatgttgtcagtgcaaggacacaccatccatcaatttcttctcagaggttcctctctaccttctaggactttgctatggcatttgttggctctccatgctggcctcattgtttgtctgtttgttcttgtcttggggaagttttctttttcagcagattctcaaacgtgatagcactgtcaacaaattaaagactgggaagccatccagaaaaattatacatgctgttttcactctctctcttcctgaatccacatcagtcctctctccttaatagaaatgttccattgttttatttcacttaatgacccctaccacattatcttctttaagaatactttactcagccaggtgcggtggctcatgcctgtaatcccagcactttgggaagccaaggctggtggatcacctgagrttgggagttcaagaccagactgaccaacatggagaagccctgtctctactaaaaatacaaaattagctgggtgtggtggcacatgcctgtaatcccagctactcaggagcctgargaaggagaatygcttgaacctgggaggccaargttgcagtgagccaagatcatgccattgccctccggcctgggcaacaagagcgaaactctgtctcaaaaaaaaaaaaaaaagaatacttttctctatctaattcttactttagggaaactcactttgagtcatcaccaaagcctgtctgttcagtgcaaccataagtaaatgctctcataaaataatggtaacgggtcaggcacagtggctcacgcctgtaatcccagctcttttggaggctgaggcaggcagatcacttgagctcgggagttcgagaccagcctgggaaacatagcgagacccccccyaatctctacaaaaaaatacaaaataataataataatggtaaggtgagcatgtatatgagatgaacttgcttttgccaaagaaaaaaatacacctgatatacaaatgaaatttggattcatggaaacaaattccagaagacagaatgttcagattatattcaggtaatatgtcagcattgtcattccaggtaaagatggctttgcagcaggaaggatttgaccgaaaaaagcgaggttacagagacatcaatgagatcgacatcaacatgaacgatcctctttttacaaagcagtggtatctggtgagtgtctttatgtccttttggacatttcccatcttgagactctggataaaagatgaattcctgtatcctcattattcactaggatgttagccagtatccaacccagtgaccctctctgtccccttacatatgtattgattttctgtcaccacctgtgcatctagttctctaatctgctttcttctggaactgctaagtagcccttgtctcctagggtggaggctatgaccaacaactagtggaattctcttcagttctgaaaaagtgcaccagtgtatgactgaagattagcaaaactatataaaagtcaaatcagaggtctgggaagagtaatgcaggggtttcaacagacagmgtaacaggggacataatgaagtcacaggcctaaaagaaaggatccaatgactttgcaaggggctagcaagaaagcttggagactaaagtagcaaaaagagcwtctattaatgcttcctaaaacaatggcaggaaatcaattccatggggcttaactgatgcargcctggaggcactaaaacccattttgcctggtgaagtgagcattttgtgggtcaccaacagttcatcatgatccatttggattggccaagctatgtttaaaaagggatcagtgactccaaaccaacctgaactgcagggcatattgacagaaagggagtgactaattygtaaatgtgaatgaagctktattttatttaagattaaaaagtgatgaacaagagagagaactaaattacagmcttgtggacggctacattacaggaattcatcacaatttcccttctggggcttcagagcttgactctgacttatgctttttggcatggaagtccgaaaatccaatatgggtaattgaatgagtgtacttgtattagttaggataggctaggtttgttgcaataatgaacaaccctcggatcacagtagcttatcaaaagcaaggcttgtttctcacttttgctacacgactaatgcttcataattgctcagaaacgcaggctgaccaacctccatctgagctccattcccacactgctttcataagcccttcagcaaggaaaaggggcaaattgtagaatttttaaaagaaactcttaaagcttctgcctggatgtgaaaaaatggcacatgagatcacatgtcattggccaaaatcagtcatccgccattctaacttcagagtgggtggagaggtgtgtagtcttaacatgtctytagaagaaagagcacagtaaattttttaaagagccccaatgacaatcatacaatgttttagcaatatcataacagccactgatcactgtgggcttttgccagtacaagctctgacttcattatttttttacaatccatcctggagaaaacctacacagtacaaagacacatgaagattgggagtggacatattactgtggaattgctctttgttttcctttctttcttytctgaaatatttttgggggccaggatgaggrgccttaggatttatttttctgcattagaacatgcactaaaggtgagccagttttctttaattcagttcaacaaatacttttgaacaagayttagtgtggtggcactgaaattacaaagattaactaggacatgtcatctcctgcaaaagatattgttatttagtaagaagttatattcaaataagaataatccaaaacaatatgctgtaaattcaaaacatgaggtagaaacaaagagctatgaaagtgagcatttaattctaaatcagggagggtttcctgcaatagcagctctcttatggaaaaagtttaaagatagtgatctagttataagatattaggggattgaaactatgtttgcatatttacagaaaacagaaaacacaaagtgtttataccaaaaaaaaawaaatggagaggaaacactataggtaggttgggagggacacccaaaagtactgtttcatggaagatgtggcctttgagctggtcctgaaatattagatggctatagagtatgtcaagtaaatatgtacatgggtgctttacaacaccaaactaataccattctctgctttgaaattcctgtaccagatcaatactgggcaagctgatggcactcctggccttgatttgaatgtggctgaagcctgggagctgggatacacagggaaaggtgttaccattggaattatggatgatggtgagtattttgaagcctgtgcctcatttggaaataagcgtgcctttgcttgccttttgataaaagttgtattgttttggagatgctaaccagagatggaacagcaagatactgggcatgatggccacactgcactgtgcccagatcttcacctttcttccaatcagtggtcctcaaacttgaggttgcacttaacaaatattttttgaattaataaataataagctaaacaaatgaataaatgaaagctgcctatcactcaaccataatttcttactgcttacactttaccttaaaatgtcctctaaactctttatattcaccatcaatttctctagactcacactatccaatgtagtcaccactagccatatgtgcctatttaactttacattttaattaattaaagttaaataaaatgtaaaattttatttcaattcctcaatcacactagcctcaagttcttgatatccacatggggctagcagctgctgaaattcaattccattttcatcatcacagatagttacattagcgtgactctacatccataaaamagcttttcagtaacaggattggagcttggggaaatttgactttattgctgctttcagaatgaacccttgtaaagtagcctttgataacyttttattacagacatcccttacatgttattcaacctgcgtgcctaccaaagacttagcagagcttcattttctatagtttgtgatatgaaaaccaatgggcttgatgaattggcatttttccaactacacacgtccttggccctgccaagattgtggagaattgccgcctgtggtcgtttcactggggatgtgttgttgccctccatcacccatctgggtctgccagcaaaaagctctactgtgcattattgacccaattatatacaaaggctacacagagatgaaacagttgagcctttcccatcygaagatcctcaaagaacagaacactatgttccttaaagtgagghtttgaagcagaaatgacagaggaaaccaagaggagccagcctgcttaaaacctgmgttgtcttktgtgggctcattaaatatcaacataaaaacaatgcctcaatgttttttgatgtgtgagacatttttaagtggatgtaaaaccttcctccagaggccaagkgctctcacaagaagaaaggagccctgcatgagagtgtgtgtgctcagatgtcaggagtttataaatgtttcttcttttctcacacttgttcttgaaaactgttccaaaggggttcaggccagctcacccaggaaaacaatgcatcaggatttggggaaaacctamctaggagatattgtcatgaccatttctaacagcatatcctactgggtatccccagccggggatcagagaagccaccctaaaagtggcactaaagtgccaacagatgtgcattgctctgctcttaggaaacctccaagagtactgtagatgcccatttcagaatactttaactgaaagctctttgactgactcctaaagtcattggctcctgactcatttccacatgcaaaggcaagccctttagaaagtctcagcagaatttctcatttgatgttctttcttcagctgattaatggcctttgggttcccacaaaagtaaactctgccccccaattacaattcctggtttcttcttcattttagtcaattactgctgcagaacaaagaatcccaacattgagtggtttaaaaaacaaccatattattatctctcacggttctgtgggttgctggagttcakctgggcagttctgcaagttccactggagtctatcatgcaggtggagtcagaaggaagttgaccctggagtcaactagaggctccaatgggaggctgaaaaggctcagcctccctccctttccatggagtctgaggacctctcctctcacatgaggcctccagcaaggtagatggatttcttatargtggctcaggactcccaagagtaggcyttccaaaagagaagaagcagaagctgccagtcctcttaaaggctagacctggaatgggcaccggtaactctgccacttatgttggatgaatggtcccagggccaatccagattcaagtggaaaggaaataaactctgaatttgtggccatttttaatgcatcacatgctattccatatgataactgaagaaaagtatccaagttcactgttgaatagcaaaatgagcacatttgggacaagggcagctccccacatggtgaggacaaggacagatgctcttgccatgtaattggccatctctgtcctcacagctagaaccgggaaggctggcaacatcagtactgcattctctctcttaacgacctgcacgcatgaatggtatggtgccatgtcccagacattttcttggcaagatattccaaaataaggttaaagacagacacagatgccaaccctgatacctaagggcaaaactaatgtcatattctatcaacattgtctctccacatgttggcctgtgtggcaaatgttcaatcatctgcgtgcagaagtttaaatttgtggacagccagttttaatcactgccctcccatctctggttgcccaactccaaactcagccatcatcccctctgctggatccagtgactcaatggatgctcaataaatatctgctgccttcacgtaggtacaaagcaatgtcatttccacatgctacatatcactaggagaggacctccatggttagctgctgtctaaaggggcagaaattatttcttaagggtctactaggacatttcacctatgtagatattagcaaggaccccatttaatgatgacaacttccgcccttttactgtaatggaattgtttagagttgggaacttgacctggaaaatggaatgtgatcatgacaagatacagggatggacaagagtcatccagcccaagagtaattcagggcagatggctggttctcaagatcacacaagatcagagaaggcatgggtcaaggcccttagccattatcagatggagccaaggaagtgagatggaaggccagcgagctaaggtcagagggagcttcaagctgaagtaagaataaacaactaacagtaaaaacgacgaacatttattgagtaatcactatgtgctagacactgcttagcattttggaaatacaaccacagttattccctaaggttggtattattataatcgccattttacagatgaagaaactgaggtttagggaggcaagaaactgcccaaagtctcacaactaattctaaccaccattcttggtacttgaaacctaatcctttgctctgccttcctggtgagactttatgaatgggagcctcattcraaatagcattaggagatatacctaatgttaaatgacgagttaatgggtgcagcacaccaacatggcacatgtatacacatgtaattaacctgcacgttgtgcacatgtaccctaaaacttaaagtataaaaaaaaaaaaatgacaccaccaggatgtggaaattctccaggacaaaagacagttttttcaataaattcaaataaataaataaataaaagattcaaacctgaggaccacatagtcacccacacccttctgagagatttagaactctgcatcacatagaaaacagtaggaaggtccagcagggtgactgctccagttacttttgctgcataacagataatcctgtattagtccatcttcacattgctgataaagacatayccagactgggtaatttataaagaaaaagaggtttaatagactcacagttccatgtggctggggaggcctcacgatcatggcgggagatgaaaccgtgtcttacatggcagcaggcaagagagagagtgagagccaggtgaaaggagtttcccyttataaaaccatcagatctygygagacttattcactaccacgaaaacagtatgggggaacccacccccatgatttaattatcccccaccgggtccccccaacaagatgagatctgggggaggacacagccaaaccatatccaaccccaacacttagcagcttgaagttgctatttatctttaatcatgattttgtggcacaaaatctgggaagagcctggctgggcrctgctcactcagtgttgctcatgcagttatgatgttagctgggctgcagtcttctgaargccccgctgggctgcacatccatgatggtgcactcctatcgctggtggttgttgctggttgccactggagctcagctgggaccgtcaaaaagagtgcccayatattgtgctttactatagtttggtcttgatgtcttactcaccagagtggctataaactctatcctgccccaacaggactccaggggattggctgtagatgtttacaatgtgcyttagtccgttcctgatgctgtaacaaaataccttagactaggtcatttataaataacagagatgtatttctcacayttctggaggctgggaaatcacaaattcagtatctgataaaggcttgctctctgcttccaagatggccccttgttgctccatcctgtggaggggacaaacactgcgtcctcccctggcagaaggggtaacaaagggatgaactctctccctcaagcccttttataaaagtacgaaccccattcatgaaggcacagccctcaaaacctaatcacctcctaaaggccccacttcaaaatactattgcaactagggattaagtttcaacatatattttagagggacacaaacactcaaatctcagcatttcaccctgcccgcaagcaccacccccccgaaaatttgtgtccttcacatacaaatacactttttctagcccagtagccccaaaagtcttgatttgttccagcaccaacatcaaagtctaaagcccagagtctcatctaaatatcatctaaatcagagatgggtgaaactcaaggtacgattcatcctgaggcaaattgctctccagctgtgaacttgtaaaatcaaacaagttacgtgtttccaaaatacaatggtgagacaggcataaaacatacattcccrttcccaaagggagaaataggaaagaagaaaggagtaacaggtctcaagtaagtccaaaatccaaaaaggcaaacaaattctgaggcttgagagtaaccttttctgactctatgtcccaccttctggacacactggggtgggagctgggcctccaaggctcctaatgaccgctcccccatggcttcactgggcacagcycatgcagcagctctcatggggtggagtctcatgcctgccattctcccacactggaatcacatgttagtgggtctgtagttctggggtctcagggcagtcccacccccacagctccactgggctttgtcttagtgggggttttctatggtagccccaccccatggcagttctctgcctgggccccgaggctctagggttagggttagggttaaagaactggagctcagagccagggttctgacatgctacrcatctcaagtgaactattaacattctacctaggaatgtgcacatggaactccttcctagttcctcgaggtctccaggactgtcaccgcttcctgagaattgggactattgtggattagactttccaagaagcttcaaattgatgataggatactaatgatttatgaaccaaattataaccaagtctttgtcatttctgtgccacatttattatgattggctggtgatcagtcggtacccccataggctgtgagccatagatagttgtacagctcaggttctacgtctaaatcacctgcggttttccaggaccgacactgtgcctggcattcactgctgagaaataaacaaaagcatgaagtataagaatgaatatgagaatattgtaagaattaaacataagccgattaggaagatgtgttcagtacctcccaccttaaaagataatcaaatatacaaaaatataaaagtactatctagttaccaaattactattttccattcttcagtccattattactttttcygaatcatgtttgttgtccttcacagtcgtatcaatcattctstttctcagaccaaagtcggtatctgttctaacttaacacttagtattcctcttaacctaatttaagatcgtttattttaattaggctaaatttatcttgttttaattctaatttccttctggtctcaaattatcttcttgctccagtattttcccttgacagagaagacactactatttattggaacatttttctccttaacagcttccattctcagaacakgaagccatgtttcaaaaattgacttyctgttggaaaatatattctctgggtgtgtctttttttacacttatttagataagttcgtttgatctagctaagtgtgaaaaaagacacacacagagaatatattttaaaatataaatatttaaaatataaattatatttttgatcatttatatttaggtataaattatcaaaatttttcacccaatgagttcacaaaatttaagctatcttaacaaatagaagcaatttaatttcaacacaatatgctgaaaccaagtggatattttttaatgtttcttttcttctgcatatgcacactactccagagatgtggtagatgttaggactaatgatgataagaaatagaatgtattaagtgtttactataagctgaagactttcaatgaattgtctctaatcttgaaaaccgctttgcaaagtaaataatagtcccatttcaaatacatggaaaccaaagctcagacagattatgtcacttggctaaagccacacaagtgttagtgtctgagcccagagtggaactggatccactgatttcaaagcctatgctcatccccaacttcaccccacagcctaaactgaccattttgctggggggatgtttcttggtttgcttttggggatttgtttgttgtttccttttagagacagggtcttgctgtgtctcccaggttagtgtgcagtgatgtccttatttttgtagagacagggtctcactatgttgcccaggctggtcttgaactcttggcctcaagcaatcctcctgcctcagcctcccaaagcaccgggattacaggcrtgagccaccatgcctgaccaaaattgacggtctttgaattargatccagaacaagggttaacaacatttaaaaatattygtctttaaatattctgatgcctttccctctgaagacttcgggaggcaagtgggagaagaaggcataatgatttagggaggggactatagtctcccaaactatagaragcagccatagtgacagcaattgcttcactcatcaaaatcaacagtgaaacctaacacacgtaccgtagattagtgactctcagtccagttactcattrtataaccggaaaaaaaaagaaaaatttcttttcagaaatatgcatcctaatacaagctcttttggggaaggcaaatctctaatggtggcctagccttagtaagcatgcagtgaagatagcagccttgggacagatttaatgatacttctggcttttagatattgcatccccatatagttattaaatgcaccagctgctgggccaagcataccacatgcattcatttctttagtccttacattgttctcacccccagttgatcaaaaaggaaaaytakcacagagtccaagcaacttgcctgaagtcttgcargcagttatcagggtggttgggactcaaatgcctgtctttgactccacagacctacgtttgtaaccattatgctagatggtgtcaagaacctgccctgtttcttggagggttagatgctcargtgtaactgctgcaaagcttatgtggttttgcaaacccaaatgagagcttttcaattgcccttggagtttcttgatgctttctgaggtccaagggtctgakggaactcagcagtgctcatagtccctgattttacccttggaacgactactgggcaacaagacaggccaccattcaggagaaagcagggctcctgctgagacattcaagcctcaggcttcctggaaagccacattctgaggagacaagcctcagctcccaaccagcaacacctcactggaaaccatttgccctttacctaatggcttttcttgcccagccatgttctcttattatttccatgccagagtacattctcctaatccattgctgtccatgccctgttaaataataatcacttttcctccccagggccggtttcatttcagagaaatgccagttgatgctttaaaaatgtcaagatttctacaaatctcttttagatcagtgctctgatgagccatccatctcactgtcacaaagctgtmttgggcagctgtctctccgctctggcagtgcagcccaccttcacacctccacacagaagggaggtgcaagactgggagctstgtgatggggcactcacccccatggcaagccttctggcaccagccccataaagagggcactttcttgggcagctttcctgaggacacagtggcaggtattaacctttggttcctgtgttattgttgtcttttcacagggattgactatctccacccggacctggcctccaactatgtaagtacaagccaactttggtggggaaacagatgcatcttaaatgtcctggtgtccctggctattargaacatgcacatgtctacatgtctatacacatgcatgcaagtacaggagcatgcacacacacacacacacaggagtacagctgctggaacatatgcacgcacacatggaggaacacacacaaacaggaacatacacacacatgcataagcacaaaagatgcacacgtactcataggcacacatgcatgcacacacagacagccacatgggcagccacactggaactgtccatcccattggagccacagctcaggccacaagcaaatggacaaggcatgtggcctggcagcaggcaaaggcagtggctttgagagaagaaagaaacctgacatctgaaagagcagagtgccaagaaagtaggtacagggagggggaagaagagagagacttggcaaggtttaaatcaactctacctgatgatattgaattgaagggtggaaatgagccatttgggttcttgttggacaaaaccaaaggcaaaaagccaaaaactgcagtgactcacattgcagccccagctttatgaaagtaagagcgttatcttttttgattatttgtgtcacttatgaccactccactgactttcccccataacattgagaattactatcccttgacaaacaagcaatgttagcagagaatcaccaaaagccctgctgggctagaaccacacactctaacttttgactcagcarttcacacgctgctttcctgatgaagcccacaagccctttaaacagaatcgatcacttattttaaccccagggagtacaagattcaagcattggtgcgttcacttaaaattatccaaactatttctaagctatacttctgagacytccagatctaggtgtaaaaaatgttgtcttagtcattgaagagactcatatttagagaacaagggcttgcataaaagaaaggatggttacccagcaaaaagtgtttggaggtcaccagtctgggtcatttgtcctggaaggcgagtgtctctaygttgcacaaagaaagkgggaatattccatgtgtttcatgcactgggcaasaagaaacaaggcattcaagggatcttataaatctagaagagcataaattgagaggagcatcttttttaatattaggaaaaactattaaatgaatcattggcagartccagccaatgtggccccagaragaaatgacagaaattaaaccaaagctatattcccagcaatgataataatccatgtctatggagaagaccattgtaaactgcctgtgccagcggtcctgtgtgtggagtctgaggaaacagcccttctccctgtctcctcatggtgccttccctactgaacatgagtggagctgtctgctggtcttctcatgcacttccttaaagggactgccctggacacagtccttgctgcctcyccctgactatggctgactccgctagtgccttcacctttccctgcctcctccataactgcagggccctggagatgtgtcargcaggggattgagaagtgctgcattgcattttctccaargctctgatgtatctggggctgttcctcacagagagcaagtgtggcagggatcatggcctccagggtcggtggtcctccctccgagggctgtccccactccaccctctgcagacagargcattgatattctccacagttccctccayctccaggacccagtgcctcacagggcagccacgtggagttctgctcactttcccaaaccatacttggggaaacaatcatcttgtcacttggaggacttcaaggtggggtggtacccattgggctggagagctgagggcacatggcctgtctcctgtgcatagcataaccccacaaaggcctaagacatggagaccgacctctgcatccttcccttctccctgcctagcccaggcagttcctgtcaggctgctcccaactccagctgccagattcgaaaaagatagtcattcattgggggcaagaatcctctggggttccagtgagctgcaggtacaatgttagtggatggtgtgatccatctgccaaaaccttcatctgaaattggaatgtgaaacctccatattgagccgtgccagctcctctgagatctgcaataccagaatacacctgaagaactcttatcggttctgkgagtctcaagttcttttttcttcttttctttcttaagaacatttttctgattaaaaaataaatgcatgttatctgtcaaaaaatatgaaaaagcataaaacagattcaaaactagccataataccaccattcttattattttgacatatttggggcctttaatttctatgtgtctatttttaatgaaattgagctcttattgcatattcttcccttctgcttgatgtgccataaacatttttatgytattaaatattctccaaaacataattttaagggctacatggcattagctcatgctataatttatttaaacattctgatctccaattgttgaacaattaggttgtttccaatcagtgtttcactgtaagagggagatgagatggcagacagtaacatgggtggactccaagccataccatgctaaggagaactgaaagaactggaaaagcttttcctggaaaaaagaaaacaggcacattgagtatgttttcaaatatttcaaattctcctggtacaatgaggcattccacttgttcagtaatttctcccaagaaaattctcaccaatgggtggtaaccacagaagcaaaattttaactcagtcaaaggaagaactgtctagtgattaagatagtaaattaytgggaggccaaggcaggtggatcacgaggtcaggagattgagaccatactggctaacacggtgaaaccccgtctctactaaaaatacaagaaattagccgggcgtggtggcatgtgcytgtagtcccagatactcaggaggctgaggcaggagaatcgcttgaacccaggaggcggaggttgcagtgagctgagattgcaccactgcactccagcctgggygacagagggagactctgtcttgaaaaataataaataaataaataaataaataaataaataaataaatawataaaaataaaagattagtaaattaatgaaagtaacaaattcttcatacctgaaaatattcaagaggaagtttgayggccactggtgggatgttattgwagagatgacaatgtctatgctgaacttaaactagatgagacctaagaattgaacagaaaatgtgatttctgtgcaaaactgcgcatcttgataactttcattcagagcaaagtctgagtcttcaacttgtatcaaacacttggaagctgacaatgaaattatatatatttacatatggctgtgaaaatgttctgcctctggtatagatgagaaaactgaacacctaactacctcgtgcttgattcctcagcagagggcccaaactggctggtttttaatggcacagtgtctctctcaccctgtgtagagttcagagtggcaacttcggagctactaaccacactaatcttctttatttttaattaaaaattttacactatcattaacacaatgaggacagcaaatagagtagaccagcccaggagagcaatgaaaccagtagacagtgataggctcgaaaattgtttgagcagagaattagcaggcagcttcacacctcgttaagtgacctaatggcttggagggatgagccagcctggtgccccttgagagagaggtacttggtggagtctttgcttgggtttccctagaagcagactctgaagcaagggtttgagtacaagtaggttatttggaagaggattctaggaagcaggggtagaggacagggaatgagtcygggaaggaaaggtagcttgtaaacggggcagttatcaaacaagacagcactgtgggcactgaggcttaatctcactgggcagctctgggagacagcatagaatatgtgagccagagtgatcccccttgggatgtgatgcctcaagaagctggggtatttatgtgacaacttcgtcagtcattggttgagggcttgtcccaaaagatgttcctacctccccacagcctggggaaaagccctgggcagaggtrtgggtacagacagctgcagcttaccagggacatgagggtttcaggctgaagggggatgtagcaacgtctgccccagagatgcyttggaaattcattaaaggttaaaataaatagacatgttctatgttgaaaaaactccttgtggttactgatttattttcagtgaggattgaaaactctacccaaggctcctcaaaaaaattactttataatcaaaccaaccaaaatgtttctgaaagcagaattattttcaaagcttggttattctgtatattaagagaggaaacagcatatgctggtagtccagtttattcccattaaactaagaataaaatacttggaaaattgcaaatcaatatataaatgtaagttgttagtgttaatctaattcaaaaaatccacactgagcctgctgagtgttgggagtaaaggataataacrgccacttggattattactctattgttctatgattgaatttcatcggagggatccagtcccactggtaaaagttcactattccaaataattaaaatttttctttttctatcccaatagtcatgacaygaaatgagtattagccaagaggctattttagaccaggttaaaattataacctcctttacccatcttcgctataataactgggtattttctctaagtcaatacaatggctgtggattgaacctgctatgtgcaagccccagaggaagagagataaataagacacaggcactctctagagaagtcggcaggtcagtaaagatgcaagcatgtgagacatgactgtcaggtgaggggtaggcagacagggaggttcgttgtctctttactctgagctcccaatccagtgaggattgcaggctgggttcacagtacgggcccaagctcaggggttctgttaggtctatggaacaaagggagacttcttcaagaacatgtggagtgtgacttaggtggcagctttcagggcatggaggtgggtggggtagaacgtctcctgctttgtagctttgctgaagctacaaaggtgaagaaaaggctggtgggtctgtagaatccaaggagagccttcttgctgtgtgctgggttttctcagaagcagaccctgagacaaggatttgaaagcaagtcattcatttgagaggagatcccaggaagcaccagctgggaaggaggaaattgatgccagaaagggagagtggcccagagagcaaattaccccctagggcaatgggagctcaatctccctggggaactctgggaaacagtgtggaccgagtgggcctcagagttacccacaaactcctgtcaaccactgggtgaaggccactacccaggagtagagatgaggtggggagatagaaggattcattctagacaagaaaaatagggccctgcagacagagtcttcagcagagttgcatgtgctgacagttggaaaacagccagcttgcaagggtagggttctgacagttggcagtagtggaaactgagtcaaagctgagatgactcctggctccctacctcatgatgcagccttagaggagcatatcaaacatctttgaaccttaattttttcatccgtgaaatgggcaaaatggatgtcttgtcaggtttgttgcaaggtatccttgagataatatgygtatcaggcctggcacataatagatgctcaataagcattcatttccttctgtctcagaagagttgaggttacaacgttgcacaatttcgggttgtcctgatggagaagcaggggtgtgcctcaagaaaccagtgcagttgttcattggacctcccagtgagcttagggtcattaaaagaagaaagggcaactgatccaggctaagtataagattgtgagggttgcaaagttaagggcaaaaatcagaggataccaacataaatctcaaaggctttgaaaaacaacatccaagaaaagagaaggtaaaggcagggagaagacccattgctcgtggccagggatgtaatgaaggatgcccccgaggaagcggcatttctgacctgcatcttcttccctgtcacataccttagaactagatgaatattcaaggatagtcataagggagggttaatccctaaggtgggcaaagggattataaggtagcaactaccccaagtgaggttttctccgagccagggaaatctcctggtatttaagccattgcagggtgggacatcaactcctgttctgatggctgggaggatgggccacttcttgcactccgtcttctagcttggaaactgtgagtgatgctctgagcagctccaagatcctgtgctgagaatctgtctagattcatgacacttcatgagcttttccaagaattcttgagtgcagcaaatacagaagtttgcattgactcaactccacatccttccctagaccacagcttctgccatgggactctgtagaatctccctttaaagaggtgaagtgtrtttcctaccccttgactttggattgggccttgtgacatgttttaagcaatagaataatctagaactgacagtgccagtttggagcctargccttaagaggccttgtgtgctcccaactgcctacccacgcctctgccatcgccattagaagggcattcccaggctctcctgctgtaccctagaggagggtgagagacatggagaagagcttccctgctgccacggcctgaagcaccaccacccacactggcctacagagctgcagtaagaagcagagctgcctagctgagccccaccaaaatcaccaaacctcagccaacccacagaaacaagcaagccagccaagctcagcagagctgcctagctgagcccagcccagagcacctagctgccagctgaactgtggactcgtaagctatctaaacacctgctgttatatgctgctgacatattatggcygtttttgtgtagtaactgttacagctgcccatgctagacccccttctccatcctcctacagtacttgaggtgtaccccagtctggagagaatattggcttctaggcctatcctagacctactgaatcaaaatctttagggacaagcctcatagtgtgtatttcttttagaatattggcttctaggcctatcctagacctactgaatcaaaatctttagggataagcctcatagtgtgtatttcttttgaagcactccaagattctgatggttaacctactcattcattttggcacttcattcatgcattcaatcattcattcattcaacagtgcagtttacctataatgtttgactacatcacagttagatcataagctctttgtaaggaagtgtgtactttgtaagtgttttgtgtccctcttaacacttatcacagtgttaagcaagcacttaatacatatttgttaaattgcattaaatgttaactcaccaatattattgcaagtaataccaggaactaaattatatgatgaccctctatcgacratgatcagaaactgcagcatgcacaaccctctgtgtaattcctagttctcaaccacctcataggtggatgccaccattgcctccttcatcatgcatgatactaaggaaagagaggaccctggaacctaactgagttcctatggctgcaagcctggagagaatacgattcgagaggtgaataatccacaggcaaataactacaagctatttcttttctttaatgtctagaatcyctcaagttgctggaaatgcaattaggttcctagataggagaggacaaattatgttctttggttccgttcaaaatttggaacattatttatgttccagggttgctatttcaccaacagaagtgatcataagagaaaaaggcccacccctacattcctgcacttttccattctttagatgggtcctgacaggtgactgtctctgaagtgggtgcctgctgagagctcagaagagctgccagcacaggaagtaccttgagcttgacagaagtgtgcacattgggccccagggggcatgtggcctccatgataaaagggcgacagcaagaaaccggcacagtactcagccccgaatgactcagatgttatgaagtattgatcacatacattgcttctggcttttaggcctatgaatatttaaataagcacattaatattgcatatgaaactgaggcttaaataacctttgtttcttattgaaaggaagggctggcattttcaatgtgctcttgaatgctggctggatcatgatgagcactttagcaccagatcagactgaatactgagaatggggactttttaaaaatcactttgatagaccgtcagtcaaatgactatcacttaatrcaactcatgtactagaggaaactatttatttttacagaaacatactttgctttaaaaatagggcagaaatgaaaccttgcttaacaaaatgaaactacttgtatggacytaaacttacagctatagctgaaagcaaagaaaatatctggtcattctattatttttaattattcaattgactagtatttgtttcattgaacttagtcagcattcaagaaagccgtattgttcccactgtgcaaaatgctatactaggggcytgaattatgaagtgtgaaaaatccagtccctgacyttggggggttcacatgtaagtatataattacattataatatgcttagtgctarcctggaaataaaacaccacccatataggaatgcaatagctagaaaaagcaagtcagccctaaaaaattagagaaagaaagatacttaaatgcakttaaagaatgcagctcaccacatgggggatgaacttgttttcttgggtcgatacagcatatgaattcatctagaagcttcatcaatacgatactagacaaatgggtaattggatttcatctggagatttgcttccacctagaagcctagacttaaaaagtagcccacatcatttccttaccccaaattccctaaagcccttcgacagattctcatctctttgactaaatttaactggcttaaagaccagggtaatgtcttccaactcttttactcatgagagaatgaaccagcggcctcattccccacagagatcattaagagagacttcataaataaaagactgaattatggatggatggacggatggatggatggatggatggatggatgratggatggatggatgrttggatggatggatggttagatggatggatagatggatggatagttggatggaacggatggatgaaaagatgggaggatgctaatgagactattgggattttattccatttatcactaaacacacctgttcagaaaaagtgtagcaatgtttactgataagccacaagaaagtcatttatgcaaatataagaaaattgaaagattactattctcaactgcctttgttcctttctttgtcttcattatcggtatatacgcactgaattcccaaaatgtgaaatattttactggcttttttatttgggtttctatctcatagaaccaaaaacctttaggtgaccaagccttacaaataattaacttggcaataacccctggctacagctgtggttcaaaatgctgctyctgctgagctgacatccattttcactttgtccctctcctcatgtgcctgtttcccaatcatactgtcttaaagccacagttctgggtgtctaaggcaggcctgaccagatttctgaacccatgtcccccacccaggaggggagtagtgggttgatgccacagcaaaatgggcagtcatccacactgcttgcccatgtcttgttgccaagcaacagagcccaagtgggtgtgtccactagagccacacctacatgggatcattgcctgggcaaatrtggatctgatggagaccaaacgtctgatccatcatccaattacagttttctgaagcagcaacaaagaccaagaaacaatgcccaggcctcaattaagaaggatcagactctgaagccatggagtcttctaaaatatgatagaagataaattttgtggttgtgtcaaagaatcatgagtactataactgtcattttggctagagccccattcttacctttaaaagctcttaatcatttttcyttgaagacaaagacttgatggtaggcagaattgtaaaatgcccccctaagatttccaccctctgctgtaarcactctgtatagtccctctcttgagtatggcaggacctgtgaatatgatgagatatcactcttacaattargttattagattgcattatatggcagagttagagatttttttcagatgtcatcaargcgcctaatcagttgactttaagctaatcaaaggaaagactatcctgggtgggcctgaactaatcaggtgagccctttaaaaggtaatctacaagtcagagaaggaaggagtcagagagattctaagcagtggaggctttcacctgttggccttgaagatgccactgccataatgtgaacagggccacatggcaaggaatggcggactccctgggagctgargcctcactcctacaaccacaaacaactgaatgaacttgaaagaggaccccaagccctagatgagacagctccagtgacaccttgatttcagccaggtgagaccttgagcaaaagccccagttaacccaygtccagaaactctgagataaatttgtgttgttttaagccactatgtttgtaataatttgctatacagcaataaaaaaactaatacaaccttcttgattatagtggatatttgagcacaaactgaatgacttgctgtctctctgaattaataaaaatagaccactcctcagtttttactttttcttaatatgtttgcttttatctcaaaaataagtatactctgcctattgccacatggggccctttcataaataataattctgctgcaatgagaggctcagagaaatttagtgaggaagttaagaagagctcttgggccagcctcgctgaattcaaatctcacgtccaactgcttcttaactatgtgccctaggcaagttaatctctctgtgtctcaatttcctcatctgtaaaatgggttaataataatactgatcttaccggtgattgtgataattcaattcagtagtgcacacaaggcccttagaactgcctctggctcataagacaccctcaataagcattcgatgttgttaagtcccctgcccaagattgcacagctagaattcagcagggaagaacacaagcctaaggtggtcagacctcaaagtctgttctcttagcctccccctcccttcctgccttaaggacacatatgaatttgcagaaagcattttttaaatgaaattaaaaggggcaattagtgcgttattctaagttttctttccactttcctgctaacaactagtgtgttattctaagttttctttccactttcttgcttccccagccctccctgtcctgcctcccagaatactttactggtttcccctgggagcacatccttaataaatcacttgcctacaagctttcatcacagggttggctcccaggaatcctgatcttacattagagcggtctggagctttaggcaaagcagaattttccatcctacatggccaaggcggagagaatctctgacatagaaataagattagcttctccaccatggtaaccctgctgctgactcccaacctacgggaaattatttttcacaaagaaakaatctttaattactaaccaataattaaaacctgaagccaagaacaggaagccagactttggctcttagcaatgttccttaacatcaccgggagtattatggtgaggtctgcactttccatgtggcatgcacacaacctctccacaatgagtgctctgctaggcagaagaataagatgtattacagtgtgtaggagatgttttcattaagctatggaaagagatggattatgttttataactcaagcattgccaattttttaaataaggagttcagtgtaagtctaagctattcaaagagcactagttcacagactcccattgaggtactgcaagccaaaaaaaaaatgcgttgtttgatctttatggccctcagtttccccatctataattgtcatccccaacaagattctcattgtctccagaatcaaaagagtataatgattattcatatggctgatatgaacactgggtctttgttgatcaatcaaaaaatagaaattaaatggaacttctgagaatgttcaaggcgttgaagctattctggtatgggtattggaccaccctccctttttttctccacaacaccccacaagcatacacacacatattctttctctatcatgtaaagaatgttccagaacactaggtggaaaggagccagtccctgtgtagaggcctgtgtggtgacagatgggcactgagtcatttgatacagtcagcaccttgcaggaattcttaccaggcactttaccaacaaaaaatatattatctgtgaataaaaccatggccaaggctattaaccacttcgattaatcactcacaagcggtcacaatgatcctatactmcatggcagctttattggggagttttgacttgttgcttgcttgattattaataactcgcaaatccatctctcctcccgtggagagttggtagttggctaacgaagtatgagaaccatgtgttgtctcccacctcttctccctgccgtggttctgatatttctccattgatttctgtggaatagcargagtgttagttcccagaatttgttgagtatttactgtgtgtttggccttgtgttttatatgcatgatcacatttaatgagcgtgttaagccagtgaagtgggtactttcttacccacctgtcatagackggaaactgaagatcagagaggctagtgatttgccttagctcacacagacagtgagtagcaaaatgtgaagtycaccatctgtcatgctgccttcatttaacctggccccctccagtctcccacatcttaccaaatggcatcgccatggtcacaatgactaargtgctaaacgttaccatccttgactgctgctcccttctttttcccctcagccaccctatctgccagttctgctaggcaatacacctgcctctctgttcccaccactggcatcctggaccaagccagcatcacttccctcctggaccccacaaaagtttcctgcttccactcttaccctctgcaatgcattctccccaaaacaagcagaaaggtcgttacaaagaacaaagtagtggaagccatatcacttccatgcttaaaaccaacaggtggctctcccccttccctgtgagacttagcctgtttgcctttgtcctgcttactcacgatgaaccagactctacaatccaggattctccctaattaaaggcttggaagactgtcacactagctcttcccacagttgagtccatctcaacttatattgcacaccctgtgtagccacttcctagttcttaagatagtctgtggttctgtatttttgttttgttgcatgtgtycccccattagaatgtcagccccaggaggatgaggccacggggatctgacctgtcttkttcacctctttatccgcagcacagcaccatggctggaaccaagtgagtggtcagtaggtatctgtgagatgactgactggctgaggattgaacacttggctttcctctttttcttttgccttcaccttttaatttcttctggccatgctttctcctcacatagctcctatctctgtctttttgctatgcttctccttatttayacctcagtcaacaccagcattttgttatgaaagaaaagctgcaggtcagtgccacaaagaagacaatttccccaggaaatgaacacttcagtacttctttagtaacttctggggagaaatactatatttcttcatagctacaaccaaaaaacagaaagcctctctatccaagactgccttgtccatcccaagaaaacagagaactacagaaagcagcaggaatgattcccttgatgcttttaattcattcatttgtgttatatgcaattaacaataggccawctgatttctcaaagcatgcaatttcaagctgaaaaattaacctaggttattttccactcagttaagtatcaaaaagattttgaaaaataaaaamaagaaaaagaaagaggaaaaaaaccaacatgagcatgttcttaactaatgagctatgcttatccactgttccactagaagagaattttccaaatatggacactctattcacaagtctctcttgagaaacgtggtgttacagtgtcaccattattaatattaaacttgatgcaccatatttacaaatccttccaaagggaaacaaacctgccctggaaacaatgcttataattataatcgtggattctatctgttcctcacagggaatgcttaaaatatcaatttaaatgcaaatgaatyttatcattccaaattagactcatcccattgtgttgaaattaatatagaaaataacwccgaacaccaaattacaagtaattaatattgacactgtgaaaagtatacactctcattttgatatttggggaagaaagtcttgtctgtgcgtgtgccattgtgtcytataagcaacaactagaacacaataccctcagtgctagtaatcatgcaggattaacacagcaaaaatctgagagggaggacaaatggcaatgatacatcttagaatccagtaatctattctttgggtctgaggaaaagcacttaaatctgtatttaagtgactacatactatttaaaaataaactatttgaggccrggcctggtggctcacacctgtaatcccagcactttgggaggccgaggtgggtggatcacctgaggtcaggagtttgagaccagcctgaccaacacagcgaagctccatatctaccaaaaaaaaaaaaaaaaaaaatacaaaattagccgggcatggtgtcacatacctgtaatcccagctacttgggaggctgaggcaggagaattgcttgaacccaggaggtggaggttgcagtgagccaagatagtgccattgcactccagcctccccaacaagagtgaaactctgtctcaatcaatcaatcaacaatttgagtcttaaaaattaaaatatttttcataggctgaacacagcggcccatccctataatcccagcactttgggagactagggtgggagtattgcttgagccaggggtttgagaccagcctgagtaacatggcaacaccctgtcgctacaaaaaaattaaaaatttgctgggaatggtggtgcatctgtagtcccacctactcaggaggttgagacgggaggatctattgagcctaagtcgaagctacggtgagccacaatcacaccactgcactccagcctgggtgacagaacgcaaccctgactcaaaaaaataagaaaaagtatttctcttaaatgcaaaggcaaagaggacctttctttgtctcttctgtacctaacgtaagggttggctaactacacagattctggccacctgtttttgtaaataaagttttatcggaacgcagccatgctcacttttttacttgatatctatggttgcctgcatgctctaagggaagggtggagtagttgtgacaaagtccatatggcctgcaaagcytaaaatttttactatttgatcctttaagaataggtctgctgaaatcccctggtctaatcagttgtgtgtcaagatgtaggaaaatggttttgttagaaacttaagtccagagagcttcaaaacaggctccagtgacagctgtagcaccttctagcagtgtgacatctggaaaactgctgaatatcttgggggcatagcaccctcatttgagagctgagaaaattgaactcttgtctgttgtaactctaaaatcttatgaaactctcctcccttccaataaaatccctgattaagaaacaaaagctgaattagttttgttaaggaaatggaatcgtcaagtagtttgaatctagttaatttgcttttgagaatgacagacattaagtcaaagtgatgctcyttttccatgcatgatgctgtatacactaatcactggggctgagtgatttcaaagagttttgcattcatttactgtcttagctgggattcctccaaaagctgactgtgagacatggatccacaaaccagcattttatttggaatttggtgccaggaagcacaggtaggggagcaggggagtgaaaaagtgaaggaagtcaatacagggtgtgcacaagtgtgtcytactgtgggcaacaggagctcagttctgctaagcacccctagaacatgagttagaacacatgaaggagaaagagtacaagtatgaacacaccaactcttatccatcattggttgatgattaatatcaggatggagagaggaacaatttcctatacttctaagctgccatatcattggtgaatttgactccagagataaagagataaaatgctgacagatggaagttgtgtcaatgtgcactgayatgctcaaagcaaggagttattatggatggggcatctaatagcatctaggacacttacaaaatcagaggtctccaatcacacatccctatttgtaaaacaattttaactaggctctcctaatacatgtatagctatttattcagacagtatatgtatgtactactatcaatgggctatgtacattataaagcatatccaagaaagaaaattttaaaggataaaatataaataaatattaaaagttaaaatgcacactcatgttcatggtaacattattcacaatagccaagaagtataagcaacccaaatatcaatcaatcaatcgatgaatggagaagcaaaatgtattacatacatataatggaatattattcagcctttttatcaccttaagatcctaaggtcctaagattatttattcagaatttcaggaaggaaattctgttacttgcagcaacagggatgaactttgaggacattacactaaatgaaataagctagtcataaaaagacaaatattctgatcccacttatatgaggtatctagagtaatcaaactcatagagacaaaaggtggaaaggtagttgccagggtctgggttgagggggaaaatagggagttattgtttaatgggtatagagttttagttttgcaagatgaaaaagttatgaagattgtttgcataggtacttaacattactgaactgtacacttaaaaatggctaagatgatgaattttatgttacatattttttaccactattacaatgaatacatcgttttttaaatcaaggtaaaacaaggcttaaaagatttcctcccaacactccaatggatcatccagcacatcctcccaagtgagcacaatccacttttgagacctttgcactaaatacctagtctgtagccctgccytcagtgtaatcagcaaaagattctgtattaaaacataaaatcctctgtccagctagatgttaagatctctgtctttaagggagataaaacagaataataggaatggcaccaataaggatcatgcagacaggtagatctgggtccaatcctgcctctatatttagttactgtgatttgaaacaagttaattaacctctctgttgtacaygttgtacattcctgagatataaaagaaggatagcaatatgccttcatgttttcattcaacacctagttattgagagctatgctacaccagaaactgtagtatattagttacctattgctgcatctcagattacccccaaaacatggcagcataaaacaaaatacrtatatatattttgtttcacaccrtttttatgagtcagaaatttaagagcagtttggctgggtggctccrtgtttctcgtgaggttgcagtcagcatgttggccatgactgcagtcaactgaagactcaaccagggctggaggatcgacttccaagatggttcacatggtggctgttggcaggaggcctcagttcctccttgcacgtagctctccacaaactgcttgagcatcctcatgacatgatagctgacttcacccagagcaagcaatctcagagagggaccaaaatggaagctacaatatcttttacgatctagcctcagaagtcacacaccacaattttgaaatgtcctattggttatatgggtcagccttgttcattgtaggggactgtatacaaggtcatgaatatyaggaagcaagaatccctaggatcccaactgggaggcggggacaagtggctgaatagagcagacatagtttctaccctcaaggaccttagcaactagagggtaaaatagactccaaagaaataactacagaaataattatgatctaggtgctttgctacagyggaagagtactcggtgatataaatgtgtttaatatggagaaccagatctgggctgccagttaagggaagatttccctagagtagctatccctatgctgataccttaagaatgaggaggagttagccaggaatctggaagcagaaggaacagcttgtgcaaagaccctgaggcaggaacatgctcagccctttcaaggatctgaagaaggccagtgtgtgtgtgctgggggaaagaagtatatcagtacgggaaggaaaaatatggcatgagatgacattggagaagtagaaagagaaccgactgtataaactttctgagccatgaggattcataacttcatcctaggagcaaagggaagcttcakggtggcagggagggggaataacatgcctagatttggcatttttcaaagatttgcctgctraagagacagattgggagtgaacaagaaaggaggcagggagagcagatgggggcttttctaggagaaagattatttgccaaagagctgttatggttaaaaggaagatagagagagagaaagaatgtagttaaagcaccctgaacttcagagrtgctccckaaatagtctttctctcttcctcttaaaacagaaaccttcagggacacctaacataagatgatatctgcaaaacatatatctctaaaaaaagcagacaaaaacacaatcacttagcgcgggcctcattagrcacctcataagttcaggcactagggtcctgaaggagtcttgtgcacaggaaattcaggaggggagtcagcagtgagcttaaagcctcgctccaccaccagcaggaacccggactgacccacagagagcgctgaatagcatttatgatgcttaatcagaaagcatgcagcgttgatctggaaattaattggatgctcggatttttcgcacatcatggagagttagatgttacaaagattttgacgggaatatatttagtaacagtatcactgatgttcagtctcaagcaggggcctgtatctactctggggctcattatattctgagtgacaaygggtgcttagtaaatctcctttgattatgatgatcaaccaagtcactcagagtgtctttaatagataatgagaaattgtaccagagttggggttttctaaatatgaaatcaaactgcaattctcatgacccactgtgcttttatttatttaatcatttttacttaactgattcactattttaatargtagttttaaaagttaactctacattaccgccataaatggaaaatctcacttgccatataaataagacaatcataaaaatagataccgtctacccctaaaatctgccatgtacagctcargttgggcacagcacaccctgagaactgctggacctggatgtgcttgtagtcaagggtyttggaargaacagccgtggtcatcagttcacacagccaggatacaggggatatgcccttatgtgacatagggcatatatgatatagagtatatgtccacacattccaatatcaatatagggagagaatggtggagagagaaagggagatctctcaaattaacaacaatgaatatcgactgaacctgaagaaacagatgctctttggttcatggaaagggtgtgaacagatgctcaggcctgaacactgctcagactttgcagcttcagggaccatcggctaagagacttgtcttctggacttactgcctggggtaaggaccagggctcatttatcttatctctctaatctggggagctgtgaggactagaatgggtaagggttcagtgcagggtttacagctgctgaaaggtccctgtagcatttcctttatggaaaatcctatggatatacttaaagataggtatttgtgagggtgaaacctacctacaacctcttacactgctagtgcaaatgtcaaatggtgcaatccctttggaaaaagtttggcagtttcttgtaatgttaaacacacacttagcatacaaccagcaatcccactcctaagtatgtactcaagagaaacaaaaaggtatgtttataaaatggcatatacatagcagctttatatttgcaaaacttggaaataattccaatgcccgtcaacaagtgaatggataaataaaactgtgatgtgtttatacagtgraatactatcccacaacaaaacaaacaaactgctgctgcatacagtacaataggcaaatctccaaatgttgttagctaccaacaaagacaaatgcaagagtacatatactctctggttccatttacatgaagctctaaagccggcagaattcagatacagcgatagagatcagaacagtggttgcctaaggtaggtgaagattaactgagaagggcatcatatggtgagacaactcctcaaggtgatgacagtgtccactatcttgattggcatgatggtgactcagatttacatactgctaagatgcagcatgcaygcttaagatcacatatgctactgtaaattatacctcaattaaaaaacatgatttaaagcacaacctataagcaaaagagccagtttagaaatcagttaccaccaaaaatgccctgtgaatgtgggaagaatgagtggagaagcctgcccatgtcttgcctcagaattttcactgcccacctgctcacctccctaggttgtctcaggcataaacgaagatgatagatgtcagggcacttggaaactctccaatcgctgtacactctaaaaggggtctagtttaatcatttgtactaatttcttagaaatgcatcactcttttttccttatttgcctttttaatatagaatcaaggcttgctcatcatcaaaaagattcaaacattacagaagtgtagataaaataaaaactgcaatttcccttctctctcctctccttttcctcctctatacaacccactcactttccaattttggtgacgtggcagttctgcrtggatctttccagaytttttttctcccccaactgcaatcatacagtacaccgtatcatgcaacctgctcttttatttaacaacatattctctccaacagtgtggatattccgtcatttgtttaaccaagcccctaatgattgacattttgggtttcccctaaagttttgctgttataaactacgagacgaatgtgtttccttgatcttcttcaaatccttgtgtgaatatccctttagaataagttcttagaagtgaaatttctgagtcaagtagtacatgcaatattaattttaataaaccttatcaaattattctctgaaaagattgaatcaatgcatagtcctcccaggagaatcycttctcattttgatctcaaagacaggaaaaataaagttgagagaatgctgaaatattcaaagattctccgatgcccttgaaaagcagaagtggagctgacatcaacatggccttattttcgctgctgacttgaaacttccataatgaggaaataaaacacatgatttaaaaaaaataaaaaaactcatcaatgagattaatgagagttgagagcctatgacttgaacatttgctggttaatagatgtagggatggaaacagtgttgtgccaattactgtaattaaccagaaatgaagacaaatggaagggagcctyttctgcccaccaagcttcaacttaaatgctgagtcatgagctactagtggaggctggaaggccaagacctgggctagtgctgggaaaaggaagtagctcttattctcccaaatgtgtgctgggtgctcagaaacagagacagtgggaccccatctctacaaaaataaaaatttaaacattagctatgtatggtgacatatgggtgcctgtagtcccagctactcaggagackgaggtaagaggattagttgagtccaggagatcaaggctgcagtgagctatgattacaccactgcactccagcctgagtgacagagtgataccatgtgaaagaaagaaaaaaagaaagagagagagaaagagagagaggaaggaaggaaggaaggaaggaaggaaggaaggaaggaaggaggaagggaaagaaggaaaggaaggaagggaagggaaggaaggaaaggaaggaaaggaaggaaaggaaagagaagccatcctgtcaaggagtcccaaatatcccctgtctcatgtagctcatccttcaggaaataggacactttccaactaacacagttaggctatatcccccaaggtattatgtttttccttgaatggagtcaaacactttctaaactcgagagaatatggccctgaaggaaactacgcctgttcctgtgatgaaatgacctgacaggaaagmactcagcatcttgctgacaagtcaggaagaactcacaacctgcccagtggtcattttagtcaattttggggggaaacagttcttttgaataggtcccctaaaaaaggcttgaaagaagaattagtacattccaaagcwgtgattagaaatcatcataattttctaccaggagaagagcactttattattacttaaaattactctagtccaatagccaattgctatattttatgttaacttttatttacaggaagtacaatgtattccttttggtgcactgttccatgagttttgacaaaagttcatacagtcaagaggcagaacatccccatcacccaaaaaactttcctcctgctgccccttttcccactcgcagtcctggcaaccacagatctgctttttattcctacagttttgtctcttctagaatgttatacaaatggaatcatacagtmtacagcctttgagtctggctttttcaagcatttattctttatcaatgtggttgcatatatcaataacatgttcttttttattgttgcgtagcattcccttgtgtgatgtaccacaatgtgtttatctgttttccagtctgggaacatttggataactttcagtttggasgattataaataaaatcgttatatacatctacacacagatttttgtatagaatttagatgtcytctgtcttgggattgaggggctgtatggtaaaccaactgctctttaatgtctagaaaatgtgacagtcctcagagtcatggagcctagaaaacagtgcggttgtccctggagttcagaatgctttactctgtaaatatcattcttacttggatagccttggtctgtgagtaaatgtgctatgataggcgttgtgtagccgttcatcccagctctgtccccagaatcagataaggactcatgctgtgaactctgatgccttcagtccaatgagaccagaacatcacttgcccgtttttattttaggtctcgtgtcaagctaagctaagatacttcattcctttttcttttcccatcaaattttgtatcttaaaagtttcaaaaaaatttataagcaagtatatctcaagatttttaactgaatgaaataaatttaaataaaattctgagtatttttccatttgattttttggaaaatatatgcagttcccaaatttgaacaataaatgtgcatttataatgtaagattatgctcccagaaagctaaaaaaaagttagaattatcataattacataatccctattatacttcaactcttagacataatttttaatcatttatcttcaaaaagatgaatatttttaaattttttttcttttttttcaatcactattaagcacagttgagttaaatccagtaagcattctgttgggactaaagattttctgttcaaagcacacctaatgatttctctcttgtttsaattgtattaaatttatgagacctctattttatctctagtgtcagtttatttcatttccattttccacttgttttcctaaaataacaacaaaatgcaattaaaatgtgtaaataatgctgcttacaacacctccatagctaagtgtggtataaataaaagtggtatggcactagcacattaaaaaaggrggcttgaaatatcaacatttaatgtaaaaaaagtacaagtacagtaatggaaagctgaatgtttaaagatttggaaactcttggaagcatgcttgtgttgctctaccgaattccaaaggcaaacagttttattttaataatttcgttagctgggcatggtgacatgtgtctgtagtcccaacaacttgggaggtggagacaggaggatcgcttgagcccaggaatttgaatccagcctgggcaacatagcaagaccctggatctgttttctgtacctatagttttctctatgataataacaaaataataataattttgttaatgttcagagcatgagtgagctccacytgamaactcttataatgtcaaatgatactgacgtcaacaaaacaacttagacaattcttgaaatttgcttatttatctgatacatttgttgagagtctattatgtgcaagtggtatcaagtaaaaaacccagtgcatatccttgaaccacttggagagaactggaggggatggaaaagcgagggatatctgttcacagcagagtgtcatgtgggaagaggacatgtccttgaaccacttggagcgaaccgtaggggatggaaaagtgagggacatctattcactgcagagtgtcatgtgaggagaggacaaggaacagggaggcacgggggttggatgagctctcttcctggttcttgaaaatgccacgaatgttggtggtagcaggaatggcaaagagcaccatgagtcagggacgtgtcatctccaaaaggtctagggcagagtatttccttcccaagaaaccagtgtcccataattcacctgctggaacccctgtgcacaaagggattgtgtgattaatgtagattttggtgtttcatmttgtagcaacttaataagrtatgtgcccagcttctaaatgaaggctataatcacttttccatagtttatgaattatgaagttggattcccatcccaaatgctgtccaagttttttggcttcaaaaccaattaaaatgatgaatagctgtgaaaagaaccagaagtgcatttaatctttcttcagaacagttggggatcagttcttttttgtcacatttcacattagctgggaacataaacttggtcttgttcaaaggttcaaactacttcttcctgaaagagaaccgatctacttaactttttttttccccagctattataaacactgagatatttacaaagtgccttgtacttctttctgtttatctcccaaggtcacgacactctatttgcatcttctcttagcaatgttatcctaaaaagaatcatcaaagcaaagattaactgttacaagaaaaaacaaataagcgagaagattrcttacaaatttcgggggttggtttattatggatgcaaaaatgagtagaaactcaagtccctgagtccacctttcatgacggtagtcctgattttgctatcatttaatacaacttaggtcttaatgttctcactcagtgctgagtgtgctgggataagcaaggtgttcacagtcttgyacatttttttctttactttttatcataaaaatgagctgcagatgtcatgcagtgcagagagaagagaatgctttctgagtcagaaggtcacattttttgtactcaaccacttctagctggaaaaccttgagcaaattacataatctcatggagactcagttttcttacctgtagaatgggggttataatatttaattctcaaaactgctgtggggctcacacaaaattaatttgtgytgaattacacatatttgtaatttatacataaaacttatatgtatatgtataatagcaacagacccctgatacagtatttattattcatatacctgtccttttgacagaaggaaaaaacatcatctaagatgtgttttagacaaagtttccaatcaatgatatttggacacaacagccccttcgatgaggtgactcagctatcagtgaactcatctttgctatttttagagctgaaaaaggagaagcaggtgatactgaagttgtgtaatcagtctcagggggagggctataaactagtgtctctgtctctctcaggacatctggactcaaaggtagtggcctcaacctcgccagccattcaaaggcaagcagaactctcacagaggaggcaagggcggagaagctttgagcatctctacaacatcagagaacacccagtcaaaagagagggaaacacaaattgacttgtacctcatcaccttgacaacacaaatttagactctggctgctacattatcttctggttccttttccggagctgctctccttgagctgatttacacggttgctattgtagacccttgactgtacacccagtctttgtggaactccaagaatcaggcttcaattgtactttgagccagctacactgggccccttcaaccctcagccttctctccaggcaagtccataactgcagctgtggtaagcccatctgcaggctgccctcttcctgtcctgagtcccggagggcatccctgtgtgatcactggccttaacctctcattaagctatcaaagctaccttccactgcttttcttaaacccacgtcttttctatttccttcaacttcaaattagccattgtttccacatcatcctctcatgacatgatagggaatgaagtgatgatggctcacagcactgctggggctgcttttacaagaagctcactcaaagtcaacttattttttttttttttgaaacagggtctcactgtgttgcccaagctaggatgatacagttgcacaatcatagcttgctgcagcctcaactcccaggttcaagagatcctcccgcctcarcctcctgagtagctgggactacaggtgcgtaccaccatgcctggttaatattttttatactttttgtagacatggagtcttgccatgttgcccaggctgagtcaaggtcagttttgtcaccatgsggggcatagagagacctcagcagtgaaggcctctaggaaatgggagaaatccaaccaggctggaacaaggctgggagaatcggccagttctagggcagttgcctaagtagaatgggtcatgaattcgaatctgcttcaagcgatactcaggtcaaatttggacaatgaggccaagcaaagacttgagcacagaatcaaagcacacctagagttacctatgtgcatctccgtttttgctaaatccaaattacaccttactatactgttaacttttatttgtctatatcatttgttggaatccagaaaacatacwttgtttctttccaggaaaaagtcaggtrtaaaaataagtgtgtgttgaaatataagcacattttaaaaagaaattagctcctattctcattcctgcagcttggcattgagtttgtctgtaattgggtgtgttttaaaattaaaaatttgaaataaacgttaagcagcaggagtcaaaaataattcagaccgtaatattcatcaaaacttgtttaatagcaggaaaccctccactctgaacttttactcttctttcttgcagaatcaatccctccagcagccctcaactaccagaagcacaaaaattcaatatatttttttttttgrgatggagtctcactctgtcgcccaggctggagtgcagtggcatgatctcggctcactgcaacctccacctcctaggttcaagcaattctctgcttcagcctcccaagtagctgagattacaggtgcccgccaccatgcccagctgatttttgtatttttagtagagatggggyttcaccatcttggccaggctggtcttgaactcctgacctcatgatccacctgcctcggcctcccaaagtgctgggattacaagtgtgagccgccgcccccggccaaattcaataatattatgcttagtagtcacacactttctcttgttttcttttgttttctttggctcattagacctctccttcagaaccaaagaaatccattgtgacaactctgttctcagagcygactttttccatagagagaacttcagtctgagacatgccaaggagttcttgacgctcccaaaattaacacctttcaatctttactattagagattaacttgtttcaatgcccattctcttctgttaaagcagataatattgggaaaggcaatgtctgaatgtatttctgccaagatgtcgatggtttatcaaaatcaatttcttcctgtggaagagtttargtgcaaggggaggagagaaagtgagagaagattataacagggaggctatggatgcagaaaggaaaagcggggaatcaaaggcaaacctgccacccatttcacaaataaaagaatcagtgtgggctggatgcagtgtctcatgcctgcaatcccaatactttaggaggccaaggtgggagggtcgcttgaggccaggaatttgagaccagcctgggcaacacagtgaaactctgtctttacaatttttttttaattagccaggcatgatggcacacgcctgtagtttcagctactctggagactgaggtgggaagatcacttgagcccaggagttggaggctgcagtgagggatgattgtgccactgcattctagcctgggttacagagtgagatcctgtctcaaaaaaaaaaaaaaaaaaaaaaatgcagattcagtcagtctgggctggggcctgagattctggatttctgacaagttctcaggtaatgtcagtgctgctagtacacagatcacattttaagccacaagaaggctaggatatgaggtatgaacaaaggtgttagctcagtggttctcaacctggactatacatcagaaccaccaaaagaggttctgttgggtttgttggaggtttgtttttttttttaagctcctgatgctcaagccccaccccagattaattaaatcagaatctaggaattgctcaagtatttgtatttctaaaagctctccaggtgattctcttgtgcagcttgagttaggaaccactgttagttgataactgaaggtgctattaaaaattccataatatatgagctcatgaaggctaatgagacaccccagctaagggcatcttcctctgcaacagcaatttgctattgtacaatgggggcaaacagttggtgctcaataaatttgttcaatgaaaaaaaataagtgattggctgaatgcatgaatgaatggaaatgtttgaagtcaacagtctatggaatgaaaaggattacagtcctattatcaaaatgacaagtggcaggatgggtattttaagacagatcatcttttccatcactctttcaaataccccatagaagtacttaaatcttggcccacttttaagcctgactttgttaataactggaggagtcaaagccacaaattttccacaccattactttattccagtgtttgccaaaccaaccracagtcactatacacttttgctactggtgttattatttacytagtatgtttctttaaattgacttactttttaacataaacaaatgtattttaaagggaaactataaatcactatttcaaatagaaaagcaactaatattccatgacatcagtagaattgacagtcaaaataaatgcaacgtaagcaactgaagcagggtgtttctgcctgccaatgcttgcctctgtcagataagaagaaggattaacaagtatasggaggtgttaaagccatgggggcacttagcagagactttgtcactggcataataaggattgcaggagcgttttgcaaggagccacagtcctgccgtgcgatgccatgttatttaacatgaaaagcaggcaccacgtgtaagcatctcatggcattttcagtcaatgattgtcaagctgtactcagaarcccaggggccaccaggtagtgttgaagaggctctagaaaaaagaggaagtatttcagattctgaggaattcagtcrtcagtgttatttgtcttatagagagtatgatttttttttaaatcctayttctataaggaacaacataatcaacagagaacaaagaaacaggttgaaccctgccrttgaaatcaggagaattaaccttctcattggaggcatatttgctggtttaggcctcaaaggcattacatcaaccttggatgagacaatttactaaataaaaccatgttattaaaaaaatgaatggaccatacaaaataatatatttcatgtgctcccctagctctttagtgaagtatggccctctgtgggaggttaaattattagctaaatgtatatacttggatttaaacagaatgatccactgatgttctaggaagtaaatgcactaacttattcttttttatttgccargtatttgcttttcttttaaataatgcatgcagtagaatatgattaatataattctgatgcagaaaagcaagattgcacacttaggagagaggtctctggagccagactgcctggtctaaatccctgctctgcccttcatcatctgtgtgaccttgggcaaagtattcaacctctctgtgcctacactgccctgcttataggatgaggatgacaataagggtattacccacataaggacatcataaggatgagtaatgcatacaaaatatctaagagtcccctatacaaaataygcactccatatgtgctacctgatatcattayagtaaaaaaaaattacacaaaatgtaatttttactaattttaattacaaaatgtaattaaaactaagtcttccttccaccctagaccccacgcctctccscaggcaaagtactgtaaaaagacccttgtgcttcttctcagaactactctatacttaccatcaagtccatccctctcttctgtgcaaatgggagcccactatccactctattctacatattgccttttttgcttaacaacatttcttgggaatgagttcattgctagtttcatayctcattctttgccagagctgcagagttttgcatcatatgggtgcaccagaatttctttaactcatccccagtgttggagatttaggttgtttctaatatttcactattacagtcactgccagaatgaatatatttaaatatacatctttcattcatatggaagaatatctttagggtagagtcttagaggtggaattgctgggtcaaacagtccattcatgtttattttgatagatattgccaaatttctcttcaaagagattgtgccaacttccataccaaccaaccacatacagaagcacctgtgtcccctcattctcaaaataatattttaaatacattaacaagatatacaaggtaatcaagttttttagtctgtttgagctgatataacaaaatatcttagactgagtaatttataagcaacagaaatctattggctacagttctggagaccagaattccaagaccaaggtgccagcagatgtggtgtctggtgaaggcctgttcctcatacacaaggacttcctgccacatcttcacatagtggaaatgttaaacaggctccctcaggcctcttttataagggcactaatcccgttcatgagggctccaccctcatgacctaattacctcccaaggaccccacctcttaatacaaacacacagggggttatatgtcaacatatgaattttggagggacaccaacattcagactatggcaccaaggaatgctattatatggaagcagttatcaaaagattgaaattacacatctgtgaaatgctaacatatgtcctttattaatgcatcaaataacaaaatctagtggcaggtaggggtgtgctgaaaagatactttttagcataccggcaacaaccctaatgtggaatgaagatacatgttgatgatatgctcacaggtactgctaataatactgttgtttgtacttcccattcgtaattgaaggaaatgcttgatttgaggtggtggctagtgcaaataacaatgtaaatttttccacccaagttttagagcctatcttggagccagctcttagagcctcattccaatgaatggcagcttatttttaatacatcaggtcagctccaggaatgtacgcttttagggaagctcttaaaattcatgtgtgggaatcagcctccatctagcctaatacatgcttcactggccttctaaaatagcaagccgagcaagaagacatagacaggcaaaggccactctaaagayaccctccggaggtgtctgcctcggctgttacttagagcaactgtttgctccttcctgcaatacagctgcactcctccaccacagggttttggaaaatatcaattaaataatatattttaaacaactttgaaaaagataaaggcatctttttaatttggggcaccctattagccattaagaattaatgttattatctcctcatctgtttagtgtttagaacctctcccaagtctgctgataatggtggcaatgagggccaaaggatggagctgcttagctctggtaaatactggccaggcacagaggctcatgcctgtaatcccagcactttgggaggctgaggcaggcagatcacttgacgtctggagttcgagaccagcctggcctggccaacatggcaaaaccccgtctctactaaaaattagccaggcatggtggcacacctgtaatcccagctactcaggaggctgaggcaggagaatcacttgaaccctagggacagaggttgcagtgagctgagattatgcccccgcactcaagcctgggcaacagagcaagactctgtctcaaaaaaaaaaaaaaaaaaggcatggtggctcatgcctgtaatcccagcactttgggaggccaaggcgggtggatcacgaggttaggagatcaagaccatcctggctaatatagtgaaccccgtctctactaaaagtacaaaaacaaaattagccaggcgtggtggtgggctcctgtagtcccagctactcgggaggctgaggcgggagaatggcatgaacctgggaggcggagcttgcagtgagccaagatcacgccactgcactccagcctgggcgacagagcgagactccgtctcaaaaaaaaaaagaaaagaaaagaagaaaagaaaacataaaatgtccagccacccaggacacaactgtgtggcctgaccgttcagttgtatcactcctcttatctggaaagtgctccagtgactacagaagttgctagaatttccaaaagcaagaagaaagtgatgggaaaatgtgtcaaatccacaatgggagaacactgtgtcactagaaaattatatgaccctggcaaccttaggagtatggaagaaagatttcaaacaagtttctgactatgtatcttttyctaaatttttttgaatgctgaagaaatgttaaatttcattaagttttacagccagatttaatatagacataaatccctttaatgttcgtttcagtcaaaagtgagcggaacattatcgttaaaccagtgcatgtgggagaattacttgaggaaaatcaaaataggcacagttgggaacattaagccgtggccatattagacgcaagtaggcgcaatagcaaaattctttaggctctaatggactgggctattttgcttctcagtttccatacagatgagctttgttctggggcaatatggttgcagtttgagagtctatctgaaggagctcatttctctttcattagtccatgagcacagtgcaatttcagctaatactgttacacagctcctagctgggttatttggttaaatgccttcagggaaagtagcaagacagaataaaaggacaaatgcaatgcggtttcttgttctgagttcctgtagctgtggaattacattggcagttaatcattaccacgttgtactcgtgatcataaactcctgttatttaagatgttattcaagtctcacaagaaacatcttgtcttctgtggcacaatttccttgaggtcgggtttgtgcacaactataaccatagagacctgtttcttgtgcttcgtggacatgctagtaggtatatagtgccatttgtgtgaaaytgaaaatgacattccctactggtgggtgaactgggaaacagcaccctgtctatgggcaaattagaaaagatgtccccttctgggtggacaaatgagcaaaaggcagcccctctgggctgaccaattcttttttaaagcctcctccaccttggggtgtgggggtggtgcacatggcttggtaagtccaatgcagaccctagttgctccctgtgggcaggaacccctggcgcaatgcacaacctgcacaactgtacacaacagccctgattacagaatccattttcacaattttgtagttggaccacagagtttgcccctcagtactctaaaaatatctgttcaatcacatcagtggatgtccatattaaatacattggtcttctttcttatggcaagtaactgccactctctgccaagggcagtgttctaaccttggaaacaaacaggacactcgtaggttgagaaacagaagaactagaggacggtgactcctaggggcttgaccagtggtgggcagtggagtggtggaaaccacggtggcacctcttcaccatcgcaatgtaatgctctcctcagcctccatcattacctggtgagctggggctcagtatctgcctgataacccaccttcagctagcatgagacacaggaggagcaagcttcaaactcccaacaaggtagtcagcctagttcataccagattcagtggctgtagcccaggagagaacgaggtatggggcacgtatgtctcagagcagagagatctgcctagaaagacaaagactgagtgagaagctatagtgtgggctatcagagggcagcctgggagcccaagaggcctcrgacattggtcagggattggcaaactctttccgataaaaggccactttgtaaatactttaggctttgtggggttttgtcacaacgacttatctctgctgttagagtgcaaaagcagcgactggcaattcataaacaaatggatgtggctgtgttccgatacaactttacttacaaaaacaggccatgggctgatttagctggtgggccatattttgtgacctttgctgtcggtgatcaaagaaagaggacacaacaggagaagtcaggtgaggcattgcccatactgcgtggggcaacgtgcttgccagcttacattccttgtttcattttatcctcacagcaaccaactagtaacagttttaccacctacattttgaagatgaggaaactacagtttctaaaaaataggaaaatttccagggtcaaaaacagcctcatttcaaaaccaagtctgtttgacttgaatgtctctcttccttcccctacatcaagctggtacytgcagacgtatttgtctagggcagcccagccagggaagcccattgatcacagaggcattaaattccagatttgaaggtatggatggcagtgccagggccaggtgcaatctcaggagcytcagaagcttctctgtggatgtaaaagcaatgggcacagccaccattgactgcaggagctctcacctctctcatcaccagccattcagatagacaagccccaaatccgaaaggtgtcatctgtgggcctgcgtctttgatagccaggcaattacagcacctcatatataaaaagccagaggaatctgtgaatataataagtgactgtcctttcttagcgtggtgcaggccatctgtttgaaaagtacacactgcaaacaatgccaagttgtaattattaaactttctagctaagagcgagtctcatctttcttcctaattatgcattcaaatattcagaaattaagccttagaattattatataccagggatgggtttttttcccctgtgcattaaacttttagaagagaacatgagccatcatcagaagtttctcccagaaataactcccagagaagccctgaggtcagcttggaatcaacccaaccttctcactttcggtgtgatggtacaatgataattcaagttcttaatgatgactctgaatcatctcgatcctgaatcatcagagattaaattattttcaccaaacagctagtattttctaaagcaggaaaatcgattaaaggatttcagtaaaaagttagagaagtccaaacaaagcaagcatctggcaagcctcggtgaccagaacattaaattcaccaaacaccacctgctccaaatgtccatgttaatggcaattatagaagactccagtagcattcaaggccagtttaacttattcctgtacacaaataactttatgggagacagcattgtaattcaaatcaataaatgactcggtttggctgtacaagcataaacagaacgcttgcaaaatatggtycctccttgctagaaaccatttgatttttagccagaaaacatacagccaaacaagaataacaactgtttgccttccttaatgttcagtgtagactgttacccaaggaattaagcattagtcatcaaaacttcattgcaaaggcaacaaaataattggggttcctgagttatcayccatttcaacattcagaggccaatttgaccccagacaatacaaggtctttcttcttgttataaaagtggttgcagagttctgagggttctctgctgtaagctctgctctcagaactctccaggtcctgcttccaacccctgccatgtccggccaaactattttcccagagtcaggagcagagccaacagcctcactcagacagaccccagtgataattatcagcccaaaagataagcccaagtggaaagtttgagaagccagtcactcaggcagcagctacaaagggacaaacactctctagttttccctcactgacttcatttccctctgccagcctggtagaaacatggtctcagtccgctcaggttttgcccctgtcctccctgtctccagaagcgccctcaagcttcaaaagattcatacagccttccagagagggagacggggacctagtgctggttttcatcatctgtccactctggcttctgcagtaacaccattcccattggcctcggtggtcagttcacccrgatcctgcctaaaccytggatgcttattgtccygaccacccgaatgtcctaggccagctagttctcagcgtcacatcctcaccaacctccgctccctgctctccactggggatcaagggaatgcaggatggagctgccccaagcctgtagctcakatgcctcacaggggcatttctgatctgcaacactatgtccctgttgtgagctgagtcccakgcctctctgaggttggacatcccakcgtgcctcttcccactccaacagcacacctcagaaggaagaggcagcctcaggggcccgctgagtggccactcgtgctggatttccacccacctcaccttagggaattttaattttttctaaagagaaacaaaccagattgggcagatactcttccaaatctactgcttaagtttcaatctcagctttgaagcccagaaaaaaaagtattaacttgtgtttctctcratattcctaccccactaactatacctaagaatgctgttatctctgaaaaattcagaggttargagaacagaacacccttggggaagacaagttactatttcaaaatagtatctctgaaaaaaacagaaatccaaatatcgcatgggaagtcagtgggagaaargccaaatctgagagggtctcccaggaacacggattgcgggccagatacagaattaaacttttaaagtgaatgaaagcaatctggggtctaagtggggaargagtcgaaaaactggcracttgccagtagttatggtcagtggagacgagaagacttcctcctctctgaaagccaagtgttgaatgaagacctagatcctggaataaaggatcaacatgcttaagactccaggcaaattactgggccaaatttcagggtgactcctgcccaagtacagcatttatttaaataaattagcattacaactctgattattacaactactggtgattttgtcacctaaacaataaaacaaaaattaatggaattagtggagttgctcttaaaaacattatgccaccacattargcttacaaactcaagtgtgtcacaaaacttgtgtgttatcttatgataaagcacagttcctaaatatgtctcargacccataacatcaagaaatgccaaagctggaatgtgcctctaacccagtgtttcctggcccagtgtatactgtgaaccaagaagccatctggggtcttcatttcagacccccaaaacaaaggagaggagaatgagatgaggaaaaaggaacttgagagagagcagcttctccaagcaagcagagaagggaatggggaargaatgggttattcactaaacaatggtggatcatctcccattacagaccagaataaaaggcaaaccaactaaagacctaaatgttaaagaaaaaaaaaacccacaaaattgcttagacagttttagtggctacataattattttatgtggggaaagattctcagtgggaaaaaggaargtgctggatgacagagaatagtacacttttgaccatatgctgtagggcataagagttcatacagatacttattgaagtttgtaatggtacatttctttgtttgatctttcgattgatgtctgttcccgcaactaggctataagttacataagggcagggatgccaccattgtattcccgtacttagcaaagtctctgacatatattggactcttaatgatatttgttgagtgaataaataaggtcaattgtggacaacgtcagggccttgggcatggggtttaaaacccataaggggaaaggaaaccakcctatgctagtctgaaggaagaagctggttgtgagctttctgtgtaaagcaaggaaactctagaggccatctcacttgtgatgtgagaactagaacatytggccatctgtccaaggaaggattaaggaagcttaccctacaycttgggttccaggtgaaatccattaaccacaagggctacatcaacttgaaaggaagacagtcctggagaacacagggcttacatttgctaaccccttgaaggcttgaaataggatgaaatggggaagcctgaaagagaatatcaagagaggatggaaaaccccaaagacatgctttggctccaacacaattttgtgaggtttggtccagtgcagcacactaatccagcactccagggaggackagaaaygtttaaagtctcccagcgctttccctttactgcgcctctggstgtayggacctaatgagatgcyttgtgtttttcagaatgccgaagcaagttacgacttcagcagcaacgacccctatccttaccctcggtacacagatgactggtttaacaggtaaactgggccttgggaggtctctttgactttaggctttggggttttattctactttgttttgtttcaggcttgactaccaccagcaaaataatccccatgcttcattawattatattgtgatttttcttcttagtggttacrttctctaaagtgaaatttttaatattacaatcttcctctagaataatcttttgactgttttgttctgctaacttgaaattatttgctactttaatccattaaagagaaaagaaaatagaaataagaagttctttctcaacccattacaaggtgatttaaaacatgctgattttgctttatgtgttgaaactgtcgtagagaagtattttgccccatgggtctatgtgtttttgaaaagcattctgtacgctttctgctataaccccataacagctcatggagtccctttcaacaaaacagtaagtgtgattggcagaggtttgaagtattgcttgggacaaagatcctatgatgtcaaactacccaaacagtccatccaagagaataattttccttcagcttgttttgccactaaacatggaaatgtggtctcttttttcttcaagtaaacatttttcttaaatggttaattacatataagagatatgaagaaataaagatgtgcggtttgctcaatgaaagaatactgtaatttttaaacctagtgtttccctgttattgacgtccttgggtgaagttcataaaaacatatgaacttcaattagttgtataaaaatatatgatgtgcagagcactttatccatttttttttttatttctcatggcactctaagtagcacataaaacaaatgttgtcatttttagtttagtgataaggaaacaggctcagaagggttgaagggcttccttggtcaaacagttaaaattcaagtcaaagccaagattagccccatgcttcaaattatttccaaatccacatttgtactattctttgctgagtatcatttctattatttgatacaggcagcatgatgaccagaatatgttcaagggtagagcctcagtggacaggaagcttagattctgtctctaaagttagcaagttgacctgagacccctcagtctcatcaagggttgacacagggtacacaggttctgagtacaaatgcagaaaataagaaaaaagaaaatgaaatttaattttgtaatattttgtaaagatcattgctgatgtcggatagcacaattcattctctatccacatcacctgcaacctgaaaatgacatacaatgcttggaggtgtgtgtttagaggatgagaatgtataaaaaaggtctgaaaacttttggcatgaagtgtgttttatctctgtgacttctaaccctagatggtagcatatatttagcaaataaaccatttcagacacaagaatgtgaagttaccaaatgtgtgccattaagctggggtttagacagaattggcagtggccatccagggcacagtgctgagaagggccatgagagggtctggcttcagcaggattgattaccagctctccgcatgaatatcagaaagtgcagtggcaacatatccactggctacttgctgtctttctgtaactagtaggtactaaattagtmtttgatggattgatgtaagcacaaaaatataaccaatggaaagattatcccccaatctcattttctgaacccaaacaaaatctaccctagtcaaatcttcctgggcaatrtgctataaaaatactccttaaaaaaactaaaaggttccactccaagatggccaaataggaacagctctggtctgcagctcccagcatgatcgaygcagaagatgggcaatttctgcatttccaactgaggtatctggttcatctcattgggactagttggacagtgggtgcaaggggtcggaggatttcccttycctagccaaaggaagcygtgacagactgtacctggaaaaatgggacacttctgcccaaatactgtgcttttcccatggtcttagcaaacagcagaccaggagattctctcccatgtctgggttggcaggtcccacgcccatggagctttgctcactgctagtgcagcagtctgagattgatctgcaaggcagcagcctgatggagggaggctgagacttgagtaggtaaaaaaaagyggccaggaagctcagactgggcagagcccaccacagctcagcaaggtctactgcctctatagactccacctctgtgggcagggcatagctggaaaaaaggagcagaagcttctgcagacttaaacgcccctgtctgacagatctgaagagggcagtggttctcccagcatggcatttgagctctgagaatggacagactgcctcctcaagtgggtcccttacccccatgtagcctaactaggagacacctcccagtaggggccaacagacagctcacaaaggtgggtgcccctctaggacaaagcttcaagaggaaagatcaggcagcaatatttgctgttctgcaatatttgctgttctgcagcctctgctggtgatacccaggcaaacagggtctggagtgggcctccaacagcctgcagctgagggacctgactgttagaaggaaaactaacaaacagaaaggaatagcatcaacatcaacaaaaaggacatccacacgaaaaccccatttgtagatcaccaacatcaaagaccaaaggtagataaaaccacaaatatggggagaaaccagagcagaaaagctgaaaattctaaaaaacgagtgcctcttctcctccaaaggaccgcagctcctcgacagcaacagaacaaagctggatggaaaatgactttgatgagttgacagaagtaggcttcagaagctcagtaataacaaacttgtccaagctaaaggagcatattctaacccattgcaaggaagctaaaaaccttgaaaaaagsttagatgaatggctaaccagaataaacagtgtagagaagactttaaatgacctgatggagctgaaaaccatggcacgagaacttcgtgacgcatgcaaaagcttcaatagcygatttgatcaagtggaagaaagggtaacagtgattgaagatcaaattaatgaaataaagtgagaagacaaggttagagaaaaaagartaaaaagaaatgaaaaaaccctccaagaaatatgggactatgtgaaaagatcaaatctacgtttgattagtgtacttgaaactgacagggagaatggaaccaagttggaaaacactcttcaggatattatccaggagaacttccccaacctagcaaggcaggccaacattcagattcaggaaatacagagaacaccacaaagataytcctcaagaagaggaacyccaagacacatacttgtcagattcaccaaagttgaaatgaaggaaaaaatgttaagggtagccagagagaaaggtcgggttacccacaaagggaagcccatcagactaacagcagatctctcagcagaaaccctacaagccagaggagagtggggaccaatattcaacattcttaaagaaaagaattttcaacccagaatttcatatccagccaaactaagcttcataagtgaaggagaaataaaatcctttacagacaagcaaatgctgagagattttgtcaccaccaggcctgccttacaagagctcctgaaggaagcactaaacatggaaaggaacaaccagtaccagccactgcaaaaacaccccaaattgcaaagaccatcaatgctaggaagaaactgcatcaactaacgggcaaaataaccagctaacatcataatgacagaatcaaattcacacataacaatattaaccttaaatgtaaatgggctaaatgccccaattaaaagacacagacaggcaaattggataaagagtcaagacccatcagtgtgctgtattcaggagacccatctcacgtgcggagacacatataggctcaaaattaagggatggaggaagatctaccaagcaaatggaaaacaaaaaaaacacaagggttgcaattctagtctctgataaaacagactttaaaccaacaaagatcaaaagagacaaagaagaccattacataatggtaaagggatcaattcaacaagaagagctaactatcctaaatatatatgcacccaatacaggagcacccagattcataaagcaagtccttagagacctacaaagagacttagagtcccacacaataataaggggagactttaacaccccactgtcaatattagacagatcaacgagacagaaggttaacaaggatatccaggcttgaactcagctctggaccaagtggacctaatagacatctacagaattctccaccccaaatcaacagaatatacattcttctcagcatcacatcgcacttattccaaaattgaccgcataattggaagtaaagcactcctcagcaaatgtaaaagaaaagaaatcacaacaaactgtctctcagaccacagtgcaatcaaattagaactcaggattaagaaactcactcaaaaccacacaactacatggaaactgaacaacytgctcctgaatgactactgggtacataacgaaatgaaggcagaaataaagacattctttgaaaccaatgasaacaaagacaaaacataccagaatctctgggacacatttaaagcaatgtgtagagggaaatttatagcactaaatgcccacaagagaaagcaggaaagatctaaaatcgacaccctaacatcacaattaaaagaactagagaagcgacagtgaacaaattcaaaagctagcagaaggcaagaaataactaagatcagagcagaactgaaggagctagagacacaaaaaacccttcaaaaaaaatcgatgaatccaggagctggttttttgaaaagatcaacaaaagtgatagatcactagcaagactaataaagatgaaaagagagaaaaatcaaatagacgcattcaaaaatgataaaggggatatcaccaccgatcccacagaaatacaaactaccatcagagaatactataaacacctctacacaaataaactagaaaatctagaagaaatggataaattcctgaacacaaacaccctcccaagactaaaccaggaagaagttgaatctctgaatagaccaataacaggctctgaaattgagrcaataattaatagcctaccaaccaaaaaaagtccaggaccagacggattcacagccaaattctaccagaggtacaaagaggagcggttaccgttccttgtgaaactattccagtcaacagaaaaagagggaatcctccctaactcattttatgaggccagcatcatcctgataccaaagcctggcagagacacaacaaaaaaagagaattttagaccaatgtccctgatgaacattgatgcaaaaatcctcaataaaatactggcaaaccaaatccagcagcacatcaaaaagyttatccgccacgatcaagtcagcttcatccctggaatgcaaggctggttcaacatatgcaaatcagtaaacgtaatccatcacataaacagaaccaatgacaaaaaccacatgattatctcaacagatgcagaaaaggcctttgacaaaattcaacagcccttcatgctaaaamctctcaataaactagatattgatgaaatgtatctcaaaataataagagctatttatgacaaaaccacagccaatatcawrctgaatgggcaaaaactggaagcattccctttgaaaaccagcacaagacgaggatgccctctgtcaccactcctattcaacatagtgttggaagttctggccagggcaatcaggcaagagaaagaaataacggtattcaaataggaaaaaaggaagtcaaattgtccctgtttgcagatgacatgattgtatatctagaaaaccccatcgtctcagcccaaaatctccttaagctgagaagcaacttcagcaaagtctcaggatacaaaaatcaatgtgcaaaaatcacaagcatttctatacaccaataacagacaaacagaaagtcaaatcataagtgaactcccattcacaattgctacaaagagaataaaatacctaggaatccaacttacaagggatgtgaaggacctcttcaaggagaacaataaactgctgctcaacaaaagaggacacaaacaaatggaagaacattccatgctcatggataggaagaatgaatatcatggaaatggccatactgcccaaggtaatttgtagattcaatgccatccccatcaagctaccaatgactttcttcacagaattggaaaaaaactactttaaagttcatattgaaccaaaaaagagcccgcattgccaaaacaatccyatgccaaaagaacaaagctggaggcatcacgctacytgacttcaaaccataatacaaggctacagtaaccaaaacagcatggcactggtaccaaaacagatatatagaacagaacagaggcytcagaaataacaccacacatctacaactgcytgatctttgacaaacytgacaaacacaataaatggggaaaggattccctatttaataaatggtgctggcaaaactggctagccacatgtagaaagctgaaactcgatcccttccttataccttatacaaaaattaattcaagatggattaaagacttaaatgttagacctaaaaccatcaaaaccctagaagaaaacytaggcaataccactcaggacataggcatggacaaggacttcatgactaaaacaccaaaagcaatggcaacaaaagccaaaatagacaaatgggatctaattaaacttaagagcttctgcacggcagaagaaactaccatcagagtgaacaggcagcctgcagaatgggagaaaatttttgcaatctacccatctgacaaagggctaatatccagaatctacaaagaacttaaacaaatttacaagaaaaagacaaccccatcaaaaagtgggtgaaggatatgaacagacacttctcaaaagaagacatttatgcagccaacagacacatgaaaaaatgctcatcatcattggtcatcagagaaatgcaaatcaaaaccacaatgagataccatctcacaccagttagaatggtgatcattaaaaagtcaggaaacaacaaatgctggagaggatgtggagaaataggaacgcttttgcactgttggtgggagtgtaaattggttcaaccattgtggaagacagtatggtgattcctcaaggatctagaactagaaatatcatttgacccagcaatccaactactggatatatacccaaaggattataaatcatgctactataaaaacacatgcacacatatgtttattgtggcactattgacaatagcaaagacttggaaccaacccaaatgtccatcaatgatagactggattaagaaaatgtggcacatatacatcacagaatactrtgcagccataaaaaaggatgagttcatgtccttttcagggacatggatgaagctggaaatcatcattctcagcacaccatcacaaggacagaaaaccaaacactgcatgttctcactcataggtgggaattgaacaatgagaacacttggacacagggcggggaacatcacacaccagggcctgtcagggggtgtggcagactgggggagggrtagcattaggagaaatacctcatgtaaatgacaagttggtgggtgcagcaaatcaacatggcacatgtatacmtatgtaacwaacctgcacgttgtgcacgtgtaccctagaacttaaagtataaaaaaaagaaaatttaagaaaaactaaaaacactaaggaaatgtcttctctcttaaatatttcatttgcaaacttgttctcaaaattataattttaaaccagctaaaaacctccaattaggactaattagtgcttagggcaataaaactcatcattgtcagcggtaagaattcccaagtgtccarttacccaagacacagtcatagtgactcargcaagcatgatccccatgccttagggagccaatgattaagacagagtgtccactttgaccagtaaatgggttcttttcaattatcaagtcattttcaaagatcctcacgcactatggcttgttattacaaagactggatgatgccaccactcaaatcgcagctactttcaaacataactaccattgtaaatgattatgggaggctggtgaggtgaagctcaagtccacagaaccaagaaaatcyttagttcaaaacatcaccattaccctgaagatgattcctgcttgagtgaaggagaatttgaataaagcgtccyttccatgagtgtacgatatgtttatttcaaaacccctctgggatgaaatgatattatgcctgatgttttcttcagtattacttatggcttgtggcaggagggaagagaatgactgaagtatagaggcaataaaattggttatgggttaatcattgttaaagctctgtgatgagtacatgggattttactctatttttgtatgtttttgatttttttctaataacaagaagtaaatttaactagcatacggcataaaaagaggtaataacaaaactaggacttcagtttggtatcatgaaactgttttggtgtgcaagcttccaaggagcttgcaatgtcaaatgattgggcaacagatgcccaagttactacaatgcaaaaatgtagcccagactaaaataacacaaggacagctaatgcaagttgaacagttactgtatttaaggcactgttctgtgttttgcatgtattcattcaactaattctcgtagtaaccctctgaaataggtattatgattttccccttttggaaactgaggcacagagaggttaagttacttgtgcaaggttacagggctaataagaagtggaggcaggatttgatgccagtgggtcattggtctaggattttrtctaaggcaataggtagagttgggagtagggaacgaatgtatcccagggcaaggatataatctggacaaagataggctggcggggaggtgcaggatatgttcaggaggtggtctggataactgctgtgggatttggaggctggtgcaggaggcagcattctaagaaggatccgcaagtgaggtggagcataaaagggttgaaaaagttgctaggagaaagaaataaattctgtggttgggtcagaaactgggccaggggcatagatgaggctcattctctcattacactcaagataatgctgctactctcagaagccccaatagcctggagcctggcacttgttgttggctggcataggacccagcakgagcctcccaccagctgtgcagacaccaaggcatcccacaggttcttcaggtgttttctgggcataggcaccaaatccgatgccccatctctgttcagcagagttggggctcttgagaaaggctggtgtcagcatgccctgaaactccagtatagggctgacatgctgagcagcgataggcttgttgctattaactattccagccacactgactgccacaaaggctagttacaatgcaggagcaattgcttcacaggaaaaggcagcggctgtccagcacgagattctcactgctgtgaaaatagaaaataaaatgcactataggggacactcaaagaagtaaaatgttccccttggttgggagactgagttcaatagcaacacatctctcytaggttttcytgacactttaaaccatcatctcataccctctgcatttactcattgttttcctttattaaactccacgccaagggtgctttaggaaaacaaacttcatacatatgcagaackgcttttagggaatgtgtatattagaatagcttgcyttgtgctcgatttgcttttgttggattattcctgtttaagcagagcaagcgtatttattctactgtgaaccatttaataattacatgcagtatctgagctccagggatgtacttgaaatacagttaagacattttcaaaaagagtataattttctcttagcttgcaatgagcaaaatacatttgaccaaacaaaataataataatagtaactcaaattgtaaaaaggtagaaaatacacatttaatcagcatcagtaatgtgcaaaacagatataactgatttgctgagagctatcaggatttagcatcacattttttcccttgctggcactcaaaaaatattgactgactggttgatagatgagtggcatacctttcaaccatgccaagatgttgagtggccttgacatctgtccattgtcaagctgcctgctgctctcaaggtctgcagcccacgytttgtcaataatcttgcagccctgctcattttaggtcaatgtttggtgatgcattgcagatctgtattccattactgtgctgttgtccataaaaatctctcttgcatagcatttctttgacaggtgttcactactgaaatgtcatccctgccattgacgatatttatgaagcattggggaygcagcatactctatctattaaaccctaaacagtgagagattctaggttagatgcaattcttggctgcagaaagtttactataaattcaggaagagagaagacatttattactcaagcaaacaaaatggagggaaggaagatggataaatggaggctgaagaacatttatctctttgtgagccaatgtgattgatagcattagttaaaccttcaaataagaaaggttttctgggattaacttttattttcttattaaaagtcatacttcattctgaagaaccccaagcaacaggccacaaaaaagtgtgagaaaaaaggccctctctggttggctattttcacactgatgtaagctgataccttaccctggtgatacttaatggtttgggagtagatgaacatctttcccttatgtctttatgaactaattctgaaacacctcctggataataaaatgcaaactgttttcaaagacatagtctttttcatgtgagctttaagactacctcatcagtcgatattagctcaaaggttactgcttgtaaccaaccctttctacatccaaaccagagcacagtgaaatccaacagcatttaatttttaaatttctagtcccctacctggattagaaaagtatttattatttaaatttttccttcagctaaaaggagtagatgtaatatagatttaggggttatggagaaaattataaagatggtaaaagaaagacctatatttgggtataattagttctactttgtaagctaatgtgtacatgccatatagagattttatggtactcagacggcaatcaataactcttttcttaagagagagaaatacagcacattatgtagacaaatgtaatattatgttaattgcttggtatggaatgagtgatccctgaatcagttcccttatctataaacagggactaaagctcccaccttgaaggcttgtactgcggattcaagacaggtatagagtgcttggtacagagcatggcacatggtaagcactccctaaccgacaaccaatagagttgtgaaattcagcaaagagatttctacaggagctaagtcaaagattattcaacgacaaagaaaagtaggagaatttatgctacaggagtaaatgtagcattcacccacctttctcagacatctgctctctcatttaagcttttgacagaaactggataacagtcagctcaaggttaaactctctgtcaagattctagtgcctgtgtttctgcattgctgattgaaaaaggagttatagccaaagataccttgtatgcatgaaacaaagttgatctattaggaaatttgaaatgtctagcatctggcctcagaaagatgaggagtctgctcacttctccagaaagcaatgggtgcttgccagcagactcagggacttccccagaggcagctttgctcattctcacctgtcacctattctaacctattctgcctgagctattcatttctcatctattctatcaagtaggctcttgaaaccccaaagtcttaccctgtagagctcattggacattagccagcaaacgtggtcgaygccaaactagccaggaagtctctgcatttcagttytaatatgtctaacactggagcttctttctccaaagccaagggtgaaaagactgcagctggccaccatgggtcttctgttgtctaagaatctgtagatgcagagagactggagacmagaagacaaagacagcctcatgtgcatgaacttagccaagttgcacactggcttgctgactaatytgtcttatctccttatctctgtgaatgcagatccctgaaacactgttgtagaaactggttgtcagaaacagaactaaggagtcaattgaaacaatcataggaccagtagccaggaaaggaagagaggtaaaaaaaaaaaaaaaaaaaaaaaaaaaaaargacgaaaaaatatctccacatcaaaattatcytaaaatccactattccaaaatgcctgaaaaaaatacacctaaaaaaactaaaaatcaggatattaatttgtactatatgaaatcggttctatgaagcagtcttgaaaaaractttatcataagttatttttagtttgttcaragtgataaatgcatgggtgacayacattttaaagaaaactaaatgatggtggaaacataggcaaaaacaaaagcatggacatgaaaagaaccaattgcagctgaaaaatacagcctgtggaataaaatctcaataaatggtataaaatctagcctggatgcacttgaggagttaattatcgaattgaagataacagcctgtttatcaaaaacctacagcaaacattattcttcatggtgaagctttgatagcattctctaagtctgacaagatgtgggttctccctatcatccctttaattcaacactatgctacatttcatagcygatcaaatagttataaatctaagaaaaggtgtgagatcattaagaagaaaattataaaayttacaaaagaataaaggagtcctaaataaatagagtggcatactaagctcagggataagaagatggaacaatataaagatatcatatcaaattaatatattaattcattgcaatttcaattaaagtttcaatagattattcagtggaactagacaaaattgttttaaaattgatatggaaaaacaagtggccaaaatagaagaagacaagtaaggaggaggaaaaaargagaaaaaagaggaagagaatgaagataaagaagaagaagatgaggttgaagttcagcaacaacagaacaacagcaagatgggaagctttgccgaccggataccaaaacattacacaaccataataatatgagattgtagggttagcatacagagagacaaaaagatcaagaaacagaatagagagtgcaaaaacagacaccacataaaaggaaccctaatatatgattaagatagcaataaaaacaataaggaaatgatggagtgaaggtattcaataaatgtgataactatgcacatggggagaaataggcacccacaccacatactgagcataaataaattccaggagaatgaaagacctaaatggatataaatcttttaggaaaaaataaagaaaaacatctttaygatcatgacatagggactgatttcttcccttttctccccaattgatttagaagtttattttgccaaggttaagggtcatgacccatgacacagcctcaggaggtcctgagaacaggtgcccaaggtggttgagtcagagcttgattttatatgttttagggagacataagacattaatcaatacrtgtgaagtagacattggcttggtctggaaaggcaggacatcttgaagcaggggcttccaggttataggtagattcaaagattttctgattggcaattggttgarttattacctaaagacctggaatcaatagaaaggtgtgtctgggttaagataagggtttgtggagaccagggttctttttatgtagatgaatctcctaagtggccactcttagaggcaatagatgacagatgattcctgttcagacctttaaaaggtgctagactctcagctaatctctccaggattggaaaaagatctggaaagggcagaggattctctacagaatgtaaattagggatggatttcttaagccactaaaccacatggaaaaataaatgattaataaagctggctacattaaaattaaacacttttgtacaaaaaaaaaagtcacaataaataaatttggaagacaagccacagactagaagacgtgcagcaaattttatggaaaaaaaggcttaatatasaaaatttgtaaagaacagctacaaatcaatgaaaaataaataaatacccttgtagaagaaatgggccaaggttattaacaggaaattcacagaaaagaaaatctaagccaaatagcctatgaaaagattaccttgctagtgatgaggaaatgcaaaatgaaacaataacataccatttcacaccaactggactagcaaaaatggtaacattcaacaatgatcaatgttgaaaaggattgagcaacaggattgctcacacyttgaaggaggtagtacatagccatataacctgttttaaatcctacaagaagacctcagagaaactattccttatgggtacatggaaataataaacaagaatgtttcttttcaaattatttgtaatagcaagcaaattgcaaacaaattaaatacctatcattagaagtataaataaataaatcacagcatatttataaatggactactacacagcactaaaaatggatgaactagaattcacaagttaacttcagaaaatgtagcaaatgaagccaattttacatagatcatacactaggaaattttatacagtttgaaacatgcaaagagtgacatgtatgcttatgcatacctgattataagttcataaaaatgttctgaacagcaaatttagtacacttgttamctctgaggaagcaaagaggggaaggaatggcatcagagagggcctcaaattgtatctgtaaagatttatgttgtttcttggcgyggagggggttgttttttgttttttgagacagagtctcactctgtcgcccakgctggagtgcagtggctccgtctcrgctcactgtgacctccgcctctctggttcatgcgattctcctgcctcakcctcctgagtagctgagattacaggcacgcgccaccacgcctggctaatttttgtatttttagtagagacagggtttcaccatgttggtcaggctggtctcaaactcctgacctcgtgatctacccacctcagcctcccaaagtgctgggattacaggcgtgagccacagcgcccagccttttatttttatttgagacagtctcattctgtcacccaggctggagtgcagtggcgtaatcttrgcacactgtaacctccgactcctaggttcaagcaattctcatgtctcagcctcccgagtagctagaactacagagacaggccaccatacctggctaatttttttgtgtttttagtagagacggggtttccaggctggtcttgaactcctgatctcaagcaatacgcccaccttggcctcccaaagtgctgggattacaggagtgagccaccacacccagcctataaagaattatgtttttctaaaaataatccaaagtaagaaaaatgtttggctttgatagacttggatggtggctatatgagagtcatcatactattcactgaaattgtctatatttttttaaatatttcataatttcacatatttaaataataagcctgagccaaaatggaaaccccaaagtgtcagacaggcccattcaccattaaaagacccacttctacacaccagcctcaaagtgcgcattaaataaacgaatgccaaaagtccatcatgcaccctgcacacacctagtgagagggtaggggaattcgaccactagacaargcagccattttttttctgttcatcaaagactgctttgtactgatccttgtcacccaacatctctttttgtgggatccttcaaattagtttatgtcacttattattagaatttatccttccaaaacagtttatcgagtaggatctaataaaattataggaataatcaataggaataagattaaaatgtgctagttcakgttatcctagtagctgtaacaaataaatcttggccctgaaatattagtggcttagcggcttagcaccaaaagaagtgtatcactcacccaccagtccatctctgtgttcctggtggagcagctctcctctaagcagtgattaggggatgcagactcctttcatctttggcatargtttccaatgttcctgggcttttttgcatcaaactacttgaggggaaagagagtgaataattgcccaagggtaatttttatgggmcaggttaacaaatagcatttacccatctgctcacatatttgccataactcagtcacatggccacayacaagtgcaagggaggatgggagccttactgcagcctggggagaaaagagaatgactggtgaccatttagcattttctgccaccaacaaaaaccatgttacagagtgagagacaatactgtaccagaatacctagttgaatggtgatatggtttgactctgtgtctccactgaaatctcatcttgaattgtaattgccataatccccatgtgtcaagggcaagaccaggtggaggtaactgaatcatggggtcagtttcccccatgcggttctcatgataatgagtgagtcttacaagatctgatggttttataagcatctggcatttcccctgctggcactcatttactycttcctgccaccctgtgaagaggtgccttccaccatgattttaagtttcctaaggcctcccaagcaatgctgaactgtaagtcaattaaccctctttcctttataaattacccagtctctggtatttcttcatagcagtgtgaaaacagactaatatgggtattagcaaatgactgaactaagaaaccagcaaaagcagatttaattacttagttactttttgttttagtcatggttctccagagaacagaaccagtaggatgtgtatacatataaaaagaggttcattataaggaattggctcacctaagtctggagactggcaagtccaaaatctgcagggtgagccagcaggctggagaccctgagagccaatggtccagcttgagtctgaaggtagcctgctatagaaccaggaagatccaacgttacaggtgaagtccaaagacagtcttccagagaattctctcttctcagagaaggccagatcttttgtctatttaaaccttcaagtgattggatgaggcccacgcacattatggaggacaagctgctctagtcaatgtccacaaattgaaatgtgagtctcatccaaaatacccttgcagcaacacctagaataatgtctgactgaatgtctggatacctcgtggcccagccatattgacaaatgaaattaaccgttacaattttaatctgcatgtttctaataggattacatgatagttaaagatcatggttaagagcagggctttggaagcagcagacctgagtttgaattcttgtcctgcctcctatttgagaagtgacttcacatctatctaagcttcagttttctcatctttaaaatggggataataataggctgttgtgaggatttaataggataatacatgtaactctctcagcacagggcccatctcatagtaggtgctggtaaaagaggttgttttattcatattgctggatatatctaacactattccctaagtgtagtacatatataaayacatgcttttggctggaaaaactaagtgagatgatcaaatcactctgatggaaaagccagcagtgtggatggaaaaggtgtgcctgttctttctctcaggaaatccacagggttgcgcacagggcctcaggttttcatttggacaccccagcagcccctcaatacaggctattcacaaaagccccaatacagtcaccctgacagtccagctgtgaaccctggctccccacacgtgagccatggtgtccctctagccttgttcattcattgtgtcagtaatctactgccatgataacgctgcataacaaattattccagaattcagtagcttgaaacaataagcattgattattgctcccaagtctatagtttggctggaaagttctattgatctggaccaggctaggcttgtcttggctgagctcacccttgtctccctggtcagctggcaggttgstgggggctgattggtttaggatgacctcactcacatgttgatggattactgttgactggggtgtcargcattacaggttatgtgtctttcatcatccaataggctagcccgggcttrctcacatggagcctagacagggtggcaagagaaagcagaaaagccacatggtctcctgaggcccaggctcatcacttctgccacattctttcagtcaaaataaatgacaagagaagtccagattcaaaagcccagggttgtgagaaggcttggtgttaggaacaatcgtaagaaacctctatttatggctgattgctaattagtgttgcctaatttagcaatgaaatgtttcttcccatatgttcctctggagagcccatggcattcctctcccccgcttaagggccaaaattaagatacagaagacttatttaatatctttactttgttcaagctggttcacatacacttgtcctccagcctttggtgaactgttttaggacagggacaggtttaacacaagggccgacctctgcagtgacactgggtttacatatctgggtacatgataggcgggtttcattcttgttccaaagagaattttgaggcatgaaatatgtagcctttatggaggcaggatttactttgactcatacagagaaagaaaatgtgtgtgtgtgtgtgtgkattttcaatccttgcatgtgatatttttaagggctggtgcgatagctttgcttgccccaagaggatgtcccagacagtgcactagttgatgctgcagaaatggaaaattcctagggatatgtagccaatgaaccccttcacccacatttcctgattgtttgccacaatttgaacagtgagtggaaagaccttgtgcattccgcaggccatactcgcactgtcccagcagacctgggaatgtgcccatttgattcagtagttgttccacccaccattaaaatggacttttctagccacactcagcagctcacagctgtaatcccagcaatgtgggaggcttagatgggaagatcgcttgagcccaggagtttgagaccagcctgggcaacatgggaaacccccttctctacaaaaaatacaaaaaattagccaggcgtggtgcacacacctgtggtcccagctactgaagaggctgaggcaagagaatcacctgagcccaggaagtcgaagctgcagtaagccaagattgcaccactgcattccagcctgggtgaccraggagactctgtctcaaaaaaaaaaaaaaaaaaaaaaaaaaaaaaaagaataaataaatataaataaagtggacttttcatggttggatctggtagttccagatgatttgtaccattggaatcttttgcatcttgaatgctgtttgggtctgaaaacacagccttctcagtgattcagcttatacttgttttatttctctattgcggctttacaaaccaccccaaaatggggcgctttacagaaaactaaaagacaggtagataatggtttgctcagcactttaagtcttcacagaactttaacacaagggctgacctcttcagtgacacagggtttacttgtatatgatacgcagatttcatttttgttccaaagagaattttgagcccatgagagatctagccaaattcgtttcactgcatatctaatgtgtctttatatttttccaaagccacgggacccgatgtgcaggagaagtttctgctgccgccaacaacaatatctgtggagttggagtagcatacaactccaaggttgcaggtaagccatccctgccaaacagaggcccccactaggtatcacactgatctcaaggctgactgtggcccagcaaaaaatcccactggtgcwgaaaagctaggatccacagatttggcacaagtgaaaaaaatttttttcttttaacctgcataacaatatcaatagttttaaatttttaatttaagcataatataaattcaaaaaagttaacaaatcataaataagctaatgacttttcccaaactggccatacccatacagtgatcaggaaacaaaatgtaaccagcaccccaaacatgtccccttccagttactactctgacacccaagaataatcatgatcttgttttttaacagcaaaaaaaaaatggttattgccagtttttgaaatttatataaatagaattgtcagtcactactcttctgtgtcagtgtcaataacattttaatgagtctcaaatatagactatagaatacaaggtggtgtgtataaattatttgtaaacatactcagagctcttcaaaatgttttgcacaatggaactcatctttaaaaagagaaattctgcctagaacctttttcttacatttcattgggtaggatatttaagaatttcctattgatggagcctttagaaataagagtggcaagtcactggaaatttagaacccaayatccctcccctctcagaaaaaaaaagagagagagacacagacagagacagagactgagagattcataagctttcaacgagatgtctgagaatggagtggcaccagtctttttccaagttttgcatcaaattgattcttaatttattcaggctgagtcacccaaccttgtttttcttttttcttttcttttttgtttacaactgtcctgatattttcttttcctggcaatttaatggaaccataaacctactttctgctgacactccatttccatggaactaaataaagcaaaggtaacctatacaaacccactattaacctcttttcaacactgtttgctaagaggcttgcctgaactgggtgctgaatgtcacaaaagaatacatctggaggtttctaaaatgtaaatagaggaggcttagcccctgggtttcagctctctttactttgtgcacatccaaaatgctggcattaaaatgtcaggagccattatgagctcaggggaaagaatatcactcggttaatattttataagccaggctcagacctgggatggaatctaagggaggcgggttctctactcacaggacagaactggaagcaactgaaaaattcaaacctgaatttcttgttcacacacccaaggtaactggtttttggaacaaagtaaaatgaccacctgcaaaagttaaaagagttagggggagctcacagctttctggaggttcctgggagcttctttttccatctccttcttttccttttttcctcttctcttattatttgcactctgaaaacacctgagcattgagtgctcatcaaatgtatctaattctcctgctgtcttagtttgctctkcctaaaagcaaaacctgagacaaggattccgggcaagcagttaatgtgggaggtggtccccggaagccagagtgagggagttggggaagaagacaggaaaggaatggaggccaacgaagtgagtctcatggacaacaggggccccgtcctgcaggtaattctctgaggaagtgtggagaacacccctcagaattgaccccgctaatgtgaggaggctgcggcattaatctgccagttcccatctttcattgttcgggggtgccgtcgggcctgtccagcctgcccagctcgcttgaactgagtggagctccttgagcagaggacacccccaggcaaaaagccagggagcaggccagaggacccggtgggtgcagcagcctctgcctcgcctgctgaatgcagcctgacacctcaaagacgcgactgggcttctgtgaagcccaatgacagctagggcatcacagcaacgttttgaggttccagaaaccaagaacagmcatccaaagattttgagcaagggaggctcctttctttcttttcccactcccttagccccagcttggctcccctgtgaccacgtacgctggttctaactacaagggctgcgaggctccagtcccmtgcctgtgccttagggaacccagtgtcctctggctccctggggcgtcagcatgaattcttgaggaagcactggggaattactcatggattrcaaaaacagcagagtttatcttacaaatttaaggaaaacattttattcatcctggctggcaattccaaaagttggctggtttttaattatttgctaaaaatgagccaaaccctccagagaatctttccattcgggagctttctgggctaaggaggtctaaagcgccacctggtggccaactcggatcgttgctggtctcaaagtcgaggtgttcgttcgttacaggttaggggggcgcccctgtgatgtctgaggtccttccccagcacccctccacgctgtctccagaaaaagcccaaagttaaaatgtggttgaatcttaacccagggattcaaaaaagaagagtggagattgtaaattgagtcctctgaacagaagagagcattgagcatctctgcatctacctgagttcctcttctgttcataaatttttctcatttttccatcaaggctcctgtctttttcttgttgatttgtaggcattcttggtgtgtcccaaaggttagcccctaacccattttaatcaatgcaaagatcttctccttcatttctcttcgcgtccgtcttcatttcaaactccgtgacatgtagacccgcacatacgggatgtcccaaaagtcatcctgcagtcttcaagctttaataaccccaggaacattatttgaaagtttatttacatttccattttcactgatttaattgtataaattttgaagaaaaatattactttttttattttgaaaatgcctttattcaagtaactgtcttttttaaaaaggaccccattctttccttctttcttttttcattttaatttttaagtaaacaacatcttcaatcaaaaagattgagtcaaaaattaaaattaagtgtgttattcaaaatccacaaaaccaagcaaatgtaccacaaacaatgacyttccraatgatggtttttgcaaatttgtcaaatgtatatttctgaaaatattaaagctcgagaccacatcaaggagtcgtaacactgtctcctgccttcaggccttttgtgtggtccawagttactgtgggcaccttcctgttgcaggggatggaagctggcggacaggtcccctgccccatatagctcacagtctaggaggagaaaaagacagggagcaaataaaaaaaaatcagataacaactcatgaaagaggacagagagtaaccagggctcagggacaagaggcgcctgagggtggggctctacagttcctcactgttctggatttctgcagagactctcagagcagccctaagagggggccaggccaggtgggtttggtcctattcaccttcctttttaaaccaaagcacacagatttayacacygggcttcgggatgagatcacctttgattgaagattttgaaaaatatttaaaaaccacactgttgaccattgtgaaaatgccgtgaaatttctctaccagctatgaaktgctttcacatattattatcactattattattggccaatgaatctcataacactgcagataaacatattttatctgagcttttcaataaacaagtaaaaatcactgtaagtacaatgactaacatgagttttcagaacctaaaacctggatgagcatgaatttcctccttatcatccagagctaatattcatgagcacaaaaagtggcattgatgarcaccgaagtttgtgggcagatgtagtatttactggaggcagggacaggcacaccttgtgcaacaggagcagaggcagagagggtgcagctcaaatcccctggacatgcagcccccggggcaccagggctagccacagtgcatgctgcacaggcagacagagaaggctctaaatgaatggaagagacccacagagtcacctctactcattaatgtgctgtgcaggcctgcctgggrtcagatagaaacacttgatgtgtgcctgtgtctgttcttgcccatcaaatacacatatcagcattgttagggatgtgaagacacagactcctagctcctttgatttctctctctctctctctctctctctctccccccacttccttccctcctcctcctcccccccttcctccctctctccctctctctcttcctcccctcctcctcccccccccttcctacttctctccctttcctctctctttccctctcctctccctctctctctaccttctctctcctacactctccctctctccctctcctctctccctgtcctctccctctctctctaccttctctctctctcctacactctccctctctccctctcctctctctctgtcctctccttctctctctaccttctctctctctcccactctctccttctcctctccctttctctctacctgttctccctctgcctctctctatcccattctctttgtctctctccctctatctacgctctctctctctctcccagtctgtctgcctctctccctctctctctccttctctccctctctctcactcggtctactctctgtctccaccccwcattyccctgtagctcctagagcatccaggggcagaggagaggccttccctaaaaacccttgggtcaygctgagcctctgtcttggcttggtgcagttgcttgcaraattaatactgtatctcattcaattaatgcatgcctcattcctcttgagcttaacaagattaaaagaatgtcgggtgcctggtccctgaatatgaatgagagacttgctctcagcctgtggccaccctataatgttaaaacagtcagaagattaatacacatccactctgaggttcttgcrcagcacagagggagcccatgaaggtgataagagctgcaaagaggaagagggttcaaggcacagctggaagtgccatgcaccagccctggcaaaatccagggctggcattcgttggtttgtggggcagcagaaacctgctttggccggggttgaatttctcaccttccagttgagtgggccattcagtcctggtcatctyggcactaggcaagttcaagagcatctgagcaagtgaacgccagcctctgtctatttcccacccacagagtgggcgtgactttgcacaagaagaagctgcactgaccagtttattctgtggttcattggtcacctgcattaaataaagtttttaaataaataaaaacataggtggaccaaaagcaaaatacagagtcttaaatttcctatctccttataaaatgaaccataaaatttaacatctggaaagttcaaaccaaagactaggcttattctagataatcttcctccaggagaaagaatgctaactgataactgggtgtttgttgtcaaaaatggtgattacacttatgggttaatrgtagaagatggataagcagagcctgttattcattcttctggacctgttatttgtgttggggagaaaatcaactaaataaggtaataatgccagatatttattcaccaaatatttgtcaagcttaaaataaataccaagcatcatgttgatcctcaaggacatggaagtgaacaaaatagayacatgccctatactcaaagaccatgccatctggtggtatatgaaacacgcaaataagtagttgcgatagaaggttaaaggtacacaagaagagggctatgagcactgaagaggaaagtgagatcctcgagtctcctgaggactgaaagtagtagtccctcaggaaagaaagcaatttcatgtccatttcagctgcctggcaaggacctgggtggcttttaattcgattgacgtgctcgccatgttagagagtgaggcttgtgaaatagtgtccttcaggcacaacatcctttggccaccggggacaaggaaggagttttggggcccakattttgactgtgcatggcccaaccccttcattccataatcgcagtgggtggaaagactcaggtcagcttcactagcactctaagctccatgccacagaattgtgaacccaytgacccatccagatgacaaagcctggagagaggcatgtgaccccgtcagcgaagttttgagggtagtgatggagagacagcacacccaacccaatggyggctactgagatccccctggagaggcctttgtggatggccaaacggggaccggaggcctaggagcaccagctctgcgggggcagcgccagcaccttcaccctgtgcccctgtgtcttaggattgtgtgtcccacactatcctggactgcaggactttgctccttcccaacattctgtgagaaatcactcccacgaggcatcagagaggaacacaaactttacagcgatgctatagggaagaaaggagaggcagccgtcagacacagaattactaatacagtttagaatagccatctctgcctttctgtcctctccraagtccctctcagctacagtgcaaatgggagttcctctttcctgaccccacccgctcctgcactgcccctgcccctctctctgtcccctgccctctgccctctgcctgctggaatttctcctcaaatatcaaatattgattgcctcccccatctatcatatgtagtagctttatttctcccttaaaacttggctgcagccracacccagttctctgaggccaagcttctacttagaaacgagcttatcaaagcatcgcttcagcaaaggtggtctctcccatcatgaattctagtaagttttgctaggggaataaaattgkctttaaatcattacatcagcaaagatgtgggtgggatgcagaaaggagccagtaggaccgtctgtgcctctttcttgatccctggactgcacagtggccccagagcacctgagatctccaaccattccaagtacccagggcccaagccctcctccacctccttgtctcctgcgaactggggaacccaaacatggtgtcctctgctcaacgtgtccacaggcatccggatgctggaccagccattcatgacagacatcatcgaggcctcctccatcagtcatatgccacagctgattgacatctacagcgccagctggggccccacagacaacggcaagacagtggatgggccccgggagctcacgctgcaggccatggcygatggcgtgaacaaggtaagggggccggccccctaggccccggccactcacaagttgggacaaagtgggtggaggggtagatgcaactgggtgaaccactgtcaccctgtgtgtgagyccaggtcctgcaggaatcagacagcacaggggcttagccatgcaggaggctgactgcagggaggcctgtgatggataaggagagagggcagaaaagcctcagacgcgatgcctacctggctcctgcaaacgacagtgggaaggaaggggccgggssgggagggtctcagacagcagtccccacgccaaagctgcccatcacagacagaaaggggcctgcactggcacccccaccacccactcagtcgttggctggcagtagcacacaggattttgggtctyggcgcacacagggmggtagatccaggaggcagcagccaagactatgaccacaatgctcgtggggcagggggtctgagcatgcattctcacagctgctcctctgagattagcccaggcttggacagagctgaggagaaggaagctgggcagagcctccaaagggatgagatgcaggtcagtgctgcatagggaggggaagggggccccttctctgagacgctggggctggagccaccccagaggagacwtgaccccaggctcagggaccagaggatttctgggctccagtctatcaggaagtgacttagcctcgcctgtaaaacggtgataatgaggggtcactatgatgtataaatgagataaagatgcaactgctcggcactgagaagtgcctgcaaagagtcagaatttgtcccagtctcgactgccgcttaagcaaccaccccaaaacttcatagcacagaacacaactcctttactacgcttgggatgctctgggtcaggaatttggaccgggcacactggggatggctcatccgtcctccatgattcctggggcctcagccgatagattcgttacttgagcatccattaccaaactgttgcgtcttcatgagctgttctgatgcatccatctacttgccacgcgtggcacagctcccacccctaggcttaygcagtcttctcaggcctgtcctggctgccaggccagcagttccccccmacccmcaccgtgctcccagaggactctctgtaatcagcctggacgtgggactcacaccacaargtcactgccgtgtgtggagtgagttgtctggtgttaagtgagggaaaggacagtgtgtgagattttgtgtgtggcttttggaactccattttgggaatgtttttaaatttgcttcttagattttggtaaatttcaaatagatgaaatggctatagaaaccagcactattataaatattttataaaatgcatctgctccacatacacatttaagttatgtacagtctgtttatggaaaatgcataaactcattacttatacattgataacactaaaataagtgaatgtacagaacgctatgtttaacgcrggcataaaaaagagaatattgaagaaaataagagtgggcaattgaaggctgcttttccatrcatttcttgaggtcagaaaacatgtgttttcctgcccagaccatcctcaggaactggcccggggtttgagaacatagtggatgagctgttcagggggcagrtatggaattaatgcagacacgaaatggtacggttgagaggctgaaagtcacatcgaaatctatgactacaatggatgccattggtgcccaccaagatcccctttaccaggcctgggggccaccccagctgctgtgagtgttggctgctgatggctcacagtgggccctctcacgaagcattgccttgacgatggaatcttctctcccagaaagttatgccccccacacccagggcacagcccacagccgatgactaaggcaggagcctgtttgcctccaacagggaggagtcttcaatgcaatttatggtccagagccccctgtgggccaggccaagggaaagctttacccaagactacatagttttggagttccttcccctctgtaycttacttcacttccttgctcgcaggttgctcctgagagccctccctcaatgagtctggggcagccgaatctctrcctcaggctctgcttctagggaacacctcccacaaacactgcctcaaaatttaccccattaggtttccctttttcctttggctgccaggaagcttagaactaagtgtgtgcctattaccattggttttttagactaggttttcttctaccttttttttttcttttgagatagggtctcactgcatcacccaggctggagtgcagtggcacaatctcagctcactgcagcctcaacctcctgggctcaagtgattctcctgcctcagcctccagagtggctgggactacaggtgcatgataccatgcccagctaactttttgtagacatgtttcaccatgttgcccaggctagtttcaaactccgggactcaagagatcctcccaccttggcctcccgaggtgggattacaagcatgcaccactgcacccggcctcttccaccccatttttctccatctcttcaccactcacagcctccaaaatcatcccttagcttctgtccctgtgtccgtgtttgtattcctagtgagtctaagcctctgaatgctaggcaatgtaaaatttgtaaaagaattgatgaaatgagctcagtctgattagattatatttagccatgagaaatctaactttggatccttactaaattgttgcttgcttacacacattcctagtcttaccagactaaagcatctcactggacaaaaattggcaagttcacatgtaacttcctcagagtctcagccctaaacaatagtaaacaatatttcaaaccaagtggaacccttcagcgcagtgggtggccaactttggtacacaggctggatctaacccccagacttgctttgcaaagwcagtttccttgggacacagccaggcccttccaggtctttgtgacaytctgggcacctccaaccacagctgtcaygggtcccaggggaaggaagcacatagggcaccaaatgaaggggctcatctctcagaatcaggcttttctggatgctggtcaacgtctctgtcttcactagagagccgacactgcacagcagcaggtccgtcctgttgcagggatatttcagcaggtggagagctcttgacagtggagagacctgagttttaacctcagtcctgccccccattggctggggaacttcagactagtcgatgtctccattcctcactttttgcaaaatggtctgagtcagtgcttctcaaagtgtggccacagcccacctgggagagtgaaaaatgcaaaacctcagcgcctcctcccctcccacagatgccgcattttaacaagatcccattaaagtttgcaaggtgttgctctacgtgatcttgaggatccaaatcatctaaccctgagatcctaagaccctaacatatggtttcttaaaacctacaatgaatagaaaagggcagcaggggtgacacatttccagaaaggaacagccctgtatttcctcatcagacaatgggttggacrggtgggctgtgtgatgactgagccacacgccatttgtctctgtgttgaagaaacagaggcctaggtagcccaaataaattggtttctcgtaagaatgcaccaggagggscttggcatagtggctcacgcctgtaatcccaacactttggggggctaaggcgggtggatcacctgaggtcaggagttcaagaccagsctgatcaaaatggtgaaaccccgtctctactaaagatacaaaaaattagccaggtgtggtggtgggcacctgtaatctcagttactcaagaggctgaggcaggagaatcacttgaacccrggagrcagacrttgcagtgagctgagttcatgccattgcactccagtctgggcatcaggagtgaaactctatctcaaaaaaaaaaaaaaaaatgcaccaagagggatcagggcaatgagatagattcaggcaagacctcatagtgcctgggaccagacagacatcctgatccaaggtggctgcaggatgccagccccaagaatgtgtggaaagccacaggagggctctgcggtcacggggytaggccacactcaccctgtttgcttctccccggtttcgtggctccggctctccaactcacccttccccttccttgaggcttatgcttagaggtgtttccacttggacaccaccccattggcacccttgcttgttacaatctgtcagcctctgctccagctgccacctgcccttgatgctttcagggaaattttggctcaaaattaggggaaacaccccaagatgagcctccaaaaccaagaagtgtggtwctgttgggaaggtttggaacttgcagggtcagaggccagtcagawggtttctaayaaaacccctttctttctcctctgaggacatcaaagggtagttgtctatattcacagtcttcttaggcatctgatggagtaatttyttctgagctgttgaattctttcaaaggtctgaacagaaatataagactgtatgcccctgtattaatctgttttcatgctgttggtaaagacatacctaaggctgggcaatttacaaaagaaagaggtttattggacttacagttccacatagctggggagacctcacaatcatggtggaaggtgaaaggcatgtcttacctggtggcagacaagagaagagagcttctgtagggaaactcccctttttaaaaccatgagatctcatgagatctcataagacttattcactatcaagagaacagcatggggaagactcgcccccatgattcagttacctcccactgggtccttcccacaacatgtggaaattcaagatgagatttgggtggggrcacagccaaacggcatcagcacctcttctgttgtgggttcaattgtgtccccaaatattcatatgttggggtcctaatccccaatacctcataatgtgacyttatttggaaatagggtcattgcagatataattaattaagatgatgtcatattggagtaggatgggcccctaatccaatatgattggtgtccttatttaaaagacaaaaaaaaaaaaaaagaacaggaacatctgggcacagataggcayacagggagaacagcatgtgaagatgaaggcagaggggctggggatgcatctacaagcccaggagagccagagatggccaacagcccaccgggagctgggaraggaatgggatagattccttctccagaacttctagrratggaattgaatctattatgtctccagaacttctagagatggattctattcctagaagttctggagacggaagtgtcagcagggttggctgacacttccgtctccaggatttctaggcaagaaatttctgttgtttaagccactcagtttgtggtcctttggttgttactttggtcctttggttgtggtccttckgtagcagccctggcaaactaatgcaccttccagtcttagaatggatcatcaaaaaggaggtttggcagtgygggaatgacctgctcactgttcaargtcaccttgatgtcacctggccctctgctttacagccaagatggtcaatagttgatccaattacgacttttttcttctagttcaggaccttgagaagtctccctccctcccttctctgatgtagcttcctcgaaggaatgagcgtgtgaaaatgctcacgatgcagtcctaggagagaaacatgtttccaagttagggagagtgctgtgctgaaatgctcccaataacgtcacactgggagcttgaaattcaacatggaaattgacgaacactaaaaataaagcccttttacgcccccttcagggagctggttgttaaacattgaatagcacacctctcgttagagkactcttctgacttcccttaaattatagcacttacatacctatgtgttctccctgcaagtaacagccacccttgccttcatgagtctggaagttccctttgcgaagtggaaaagctggaggaaaaacacctgaaaccccaaggttttatgtttccccaaaatgacaagtttcccaaccagagtcctaagttaccccaagactgtggaggacaacttttctaagtcaaggaaagatctcacactttaaggaattcaccactyttacattaaatacaaggatcccaaaaacacaattatgagatgggaaacagagtcctcgaagtgaacatcatggtgacagcagctaaatgtccattgctacactgttcaggaaatagtgaagacgctttattacaaggttatgccagtctgctgttgaaattcaacccatctgaaacagcaacaggagcctgacatttgagtgacacaatgcggtttacagagaatgtctgccaacaggatcgggtggcargaaagtgacgtccctaccctgtttcaatgcctggtctccttaagaagcatttaggatgaaatttttgatgcacagacagcctgtttccttattgcattattcattgtgtgactggagagaaattgttacacatccaagccccagaccaggtgacagcaggtgcccaggggaacagttggcagattccccctttcctcagcagacatggattttcactgagaggcactttttttgacacctgaggccaaaagagagtcgggaaggtaggagatgtgtgccctctgtccagactgacagtgcagatggtggcagcgctccacatccctgggtgcccctgtcattttccayggacttctgcacttctccactgcctctcgaagcaggatatttctctctcctccatctgtagcctccctggctgcaggtgaaaaggccctttcaagtgtgattgtcctgcaaagcatgccgagcccgctgaagcttaagagaaaaattgttatgactgatcttcagatgayagcaagtacatcttttagaaagtggagtgagtatgatgaaaaatacattatttcacatttgacttttccccaagaaatgggaataaatttccccaagcaatgggaataaatttccccaagcagtgggaataaatctttccttgtttcaaggtgacattttttggacaacattgtagcattttggaagtgagggttcrttgtgcattagcgaaggttttctcctagtgacttccactgcctggtctactctaaggaaaaatccacttctgaaaggcaatcttcacacaaacaaaggagtcagagaattacctgttacacaaggcacttcttacgtttgtctttcaattttatcatcctgtacatatgttttgtttgaccaacatggtaatgattaaaaggaagagaacaaagaggagatggataagagacttttatcggggcatgcactgtttgccatagatcccaccattcccagttgtctgayggctgcttcacacaaacatcacytacytgactcyttagggatttgaagtttgcacctcctacatttgcttagtaaatacttgagagaagcagtgaggagtgggcaagaaggaaatcctttttttcttttgcttagtagtctatgtgttgggtttacagttacagcatttttcacgttgtatatgggaagagggtgacagtcagaggcccctgaattaycagagggttcaataattgacttctgtcytagttttagatctcctagaagcagatcytgaggcaagatttgggatcaagtagtttattgggaaggtgaagagaataccagtgatgaatgggaggtgtggcaggaaagagacagggccagttaagkgtatgttatcctgccagtcatcgctgtcagcaactggagcttaatgccactgggaaacttcagaaaaccacaccaaaacttgagaacacaccccaaaggtatcccaccctgtgggaaaggagctggaataaaacccrttgatgaggtttgttcccaaaaccttgtaaatgccccagtgctttcagcctgaggacagatgcacagagcagcctttcagcctcttgggaggaagcccttagacaaaaagatgcataygctgacatttggaaactcccaggcacagggaattctaaagcccaagggatatgggctcacacacaactcccaaagtgcagcttaagcaaaacctaacctgagacttcgagtcatcactctctggataaataaagcactggcaaggtgatgtgtttactgttcaggaaaaggatgtagcccttgcaaagagggagctacaaaaaccagccattatgggacacagcatcttattttgctctgacaaccagaaggggaattcgggtgacgctagaaggtcttgaaagtgacaactgattcatgaacgtctttccacaacttgaggaaatgcagccacccagggcaaccctggcacaccttttgctggctctgatgactacatcccaacttcttcttaatcactcttcagagttgctgctggagggaatattttaggaatatttaaagacaaggctacaaaaattytctaaggtacagatgagacagcgcattgattgtttactccctaaggggctgcaaagggcaaagcacagaactcaggtyttyttccagctggaatgtatggacagggaccacttacaagaaaaccaccatccaggaaagcaggggacagagagctgcctggggagacagtgattaatcaggcatgggcgaggggaggccacagtgcctcctgctgaaatttaatcagagccacgggtcgtacaccatggcggcgagtgccagggcctctggcagacgatgaatgcctcctgccaaggagctctcacgaatactctgtgagcccagatttatgctctgcagccagatgaaggtcgcaactgagcagaactgctgcagcgtggaatctgcagttcagccttggaaacagctggtgccgttaccgtccttcctttcatttctgggataaagagaactaagagaaaagtctggtgggtttcgggtgatccttgtgaccagccgtctcattttgccagggactttcctgtttttagcattgaaaagtcctacatctcaggaaacccctcaatcctgggcaaaccaagacagttggtcacccaccctttggygctattagtagcgttggcccacctgggcccagtgagaaattcacccgaggttagaagttgacatgaatgtaaactcagcagcacctctgacatcagaaagattcatcactacaatggctggatcctttgagcagtgagacagaataacacaggattctgacctccaaggtggttacacgaaaaccagacaataactaaagacaaccacaggcgccatcaaacactgaatcgaggtgaggatttaaatcagaggccagggcaactgcatcatccttagcttggcttttccagagaacctgataccctactcccgctgaactaccacagaacccacagggactctgcagagtctggaactgaccagwgaaagttccaaactacaaaggataccatctatcatcactcccactcacaactcattgattaaaatggcttataagacctcacccaaccacaaagaggcctggtcatgggctcagaccgtggacagtttgcaatatttagcaagcagcagcaatgactaccacaatgtgtaccgaaasagttaggtagctcaagaggtaaccagttgacctagtgaggacaaatgtgcaaatgtcgaagatgtttgtgaatagtttgaataaaatttgccaaagatgttcatgaataatttgaataaaakttttcatgaactacgagtgcagaaaggcaatattcataaatcaatacattgtttcatgtgcaatttaaaatgtgtttattttaaaattcatattttaataacagattaaagtaatataatggaaaagtgtctgcaagtctaaatccaacacatcaaagaaaaaggaaaaactgagtaaatatatatgcacatagataatgaaaatctagctcagtttcttaatacaggaagagctcttacaaaccaataaaaggaataccatgaggtcaggcgaggtggctcacacctgtaatcccagcattttgggaggctgttgtgggcagatcccttgaggtcaggagtttgggaccagcctggccaacatggtgaaactccrtcatctctactaaaaaaaawaaataaakaaaaataaaaattggctgggcacagtgctatgtgcctgtaatcccagctactyrggaggctgaggcaggagaatatcttgaagctgggaggcaaagactgcaataagtcgagatcacaccattgcactccagcctgggtgacagagctatactctgtctcaaaaaaaaaaaaaaatctatgaaagaaaaaaacataggcaaagcatattatcttttggggcttggggctttgctaaataataaagcaagaatacaaatgagcaggaaagacacaaaaagataaattcaactttagtgaaaaaatatataactcaaaacaatraggtactatttttacccaccaaattggcaaaactatttttaagaaatgacaattctaaattatgacgcatatgagctgaatatagagttctcatgcactgctggtaaacatataaactgttaacaaactttatcaagaacaataatatggcagatggactaagaatcgtcattcattttttttcacccagaatttcctcttttagaaacactgcctaagaaaataaacatacaaagacatatataagattatgttcattttaaacataaagcacttttttaaaaactagagacagcattccatgtacattcaagaagaggtgtaaataaattgcggaatggctatttcataaaactaawaaaaaattatggtgtagaagagtatttaatcacataaaaaaagtcaattatataaattgtgagaaatacattttaagcaggccaagaaagttgatctatttttattatcccaatttcactttcaagcccgttcttatactttgcatttatakgtaaaattggcaagaatccacaaaatatcaccagtgattatctattcatgtaagattataaaggacttttatttccttcatcttctatattccaattattctataataaatattattttcatagyaaagaatacaataactttttccaaggtatgctaatgttgtattaagaaattaaggtgactggaaaataaaaattactataattgtttacaaaaagataagctctcccaggcttgcctcaccaggggtctgcaccctgcacccataccaaccccagaccagcacctgttctggtcattaaccctggtggctacccattggttagggtggagggactgactcactttakccacaagtttctcagagtgggatttccacctcctcaaatgtaggcaatgcgctggggacacagcaagccactgcaccagtctctagctggaatgtcaccttagctgacggtaagcaatttgtaacattctttttatattatgagcaaaataaaaaaattgcttgaatgtttcagaaattttgggcttgtgagaggctacttaargccatgccyagcaagttccaactcactgctctcactgagcagggtttctcagcctgggcmtatggacattctgggcaaaatactgttttgtcggtggtgaggaggytgtcctttgcatagaagtttagtagtctccctggcctttatggactagatgctagtaaaacacacatggttgtgatcaccaaaaatgtctccatcactgcatcctggagmaaaagwccacactagttgagaaccagggtggttaagtacactccatagtacctaggttaaaagtttccatttggtaaaaacttttgagaaacactgtaatcccactaaactccaaaagactggcagaattcaaagtggagttgcaccactcacttaatttcacctaaatgcacttgcctttttttttttttttttttcctttcacccrggctggagtgcagtggtgtgattatagctcactgcagactccagctcctcaaactcctgggctcctcccragtagctaagactayaggtgtgccycaccacgccaagmtaattttttcttttgtacagatgggggtgagtgggcctctcgctactttgcccaggctggtctcaaactcttggcctcaagtgctcctcctgcctcaagsctccacttcccagagcactgggattacaggcatgagccatcaggctggcctacttgcctcaggcagctgacagccrttccactcactgagcatgagctgcaggattagggtggagaccccgccccccagcagacagycccacccacagtgctggctcttgggtcatggcctccctttgtccttcagctccagggccaccctctaatccatgggtgamttcccatttcccttttgggttttaggctttcctttaacacctattccctggataaaattccctctgttgacctgccaagtgtggcaatatttgcctggctgaatttcaattgatatattgtatatttattgggataatgttacatatatataaatatacatayatatatgtatgtatgtatatatatatatgtatatttgagactgagttttactcttgttgcccaggctggagtgcaatagcgcgatctcagctcaccgcaacctccgcctcctgggttcaagcaattctgactcagcctcccragtagctgggactacaggcatgcaccaccacgctcagctaattttgtatttttaatagagacgaggtttctccatgttggtcaggctggtctcagactccygacctcaggggatccacctgcctcagcctcccaaagtgctgggattacaggcgtgagccactgcacctggcacatttatatattaacatagggaaaattgacatctctgtgatcctgtctttctattcgagaatatggccaatatctttccatgggatcaaatcttcatcttcgtccctccttccatagagttcagagagkttcaaagccttatttagcacttccttagcttttttttttttaagtttgttgaatttcttcccttttttttttttttttttttttttttttttgkgacggagtctcactgtcgcctaggctggagtgcagtggcgcgatctcggctcactgcgggctccgccccctggggttcacgccattctcttgcctcagcctcccgagtagctgggactacaggcgcccrccacctcgcccggctaattttttgtatttttagtagagacggggtttcactgtgttagcyaggatggtctcgatctcctgacctcgtgatccgcccacctcggcctcccaaagtgctgggattacaggcaygagacaccgcgcccggctcttcctaagtattttatcctttatgtggccagtgtaaatggggctgcctgtagggtggctgtgaagactgaataggataatatgtgaagtacttaacaagtccctggcatgtagtaagtgctatrgaaatgcttgctgtgatagtcaacctttgttttctgcacttcttcctctaacgggttatggtttaratgtgagccatagttgttctgtctcgatttctgcctagctcctgttcaggtgaagctgagaggcagaaatggatcaagccttaagcrgatgcccaagatcaaggcactggcaggttcagtgtcttgcaaaggctcactctctgcttctaagatggtgccttgttgctgtatctcatagaggggacaaacactgggtcttcccatgrtggaagggccaaaaggggcctagctatttccctggagcccttttataagggcagtaatcccattcatgaggaccaaactctcatgacttaattacctcctaaaggtcccacctcttaagactatcatgttgtgtctcaggttctaatatatgaatttgggggggacatataagttcaaaccaaagtagggtggcatgccagcaacagccccatcccataaccagctctcagtcctcttatggaggtcccttccccactcatttctgcccccagaactagagaattttcctcactggcccatcttccccagaagccagagactttttggtgctaaaacccaatcaccagaagcaaggacacaattattattgcttcatgtgtcctatctagcttaagaaaacaaagtttaatattcctagaaaacgaagcattcttgtgggcaagtctcatggtttaaaacaaaattaacgtttgctgtttactgttcacggttcagaaacaggctgacaattgctctctgtgtaacagtgagctggctgcataacaaactgccccaaaactcagtagcttaaaataacaatcatttaattttgctcttgggtctacaggtcagctgcgttgttctgctgatctgcaccaggctaggctaatctcaggagagtgagttagagactgacggatcgaggatggcttccctcctgtgtctggcagctgtcagcaggggcagtgaatttgactggaatacttctctcttatcaatcaggaggctaacctaggcttatcttcatggtgcaacggagttctgggagagatcagagaacataggagttcttgggactgatgtttggaactgatacagaatcactttcccccacattctattggccaaagcaagacataaagccagcttggagtctaggggtaggaaatagaccactcttcttgatggatggggctgcaaagkcatagtgcacagggcataaatacagggaatcatgaataattagggtcacaatcaatctaccacactccccacacaaagaagagaatgtttagcatcgatttccttcattttagcaaacgttgcttcatctcactagcagtctacatatggactgattcaggagaaagttctgcagatggtcaacctcactcacccatttattgtgaaacacatcagttgtactttgctttttttttttttttttttttgagatggggtctcgttctgtcacccsggctggagtgcagtggcacaatctcggctcactgcacctcccgaatagctgggattacagacatgtatcaccacacccagttaatttttgtatttttagtagagacagggtttcaccatgttggccaggctggtctcgaactcccgaccccaggtgattcacccacctcagcctcccaaagtgctgggattacaggcatgaaccwccgcgcccggccacacttttgctatttcttgataccgagcccaaatctgagtctgtttgagagtgtgatcctccacaccaactgtagggatgatmtatttccctcgctgtcctggtttctgagagcagttccttgttttggttggagttttccagcatagatttaccaagatgctgagaatagttcccagctagtggttgaataaatatttgttcacttgtcgattcaatcaatcacaggctgattaattcccagtgctgttagaagygattgaaaatgtcacatctgattgtcaggcggcagagagcacttggaggtaatccagtcatctctcttccttctggcttctccactcttaaaccactgattctgtgtcagtttcaagcgtaaggaccatggacacctggtgaccacacagggagagactttccctgacaatctcttctgtcttctccctctagagggtaaccaagccaccctgggccaggctgtggagtggctggaggttgcacctgccccttgcctccggcactgcatggctgcactcctatccaccctcccagcccacaggtgaacactaagcagccccargccccattgccttggggtaagaaagtgggaagcaagaaactaatggtccaatcctgggttgtttargtagagaggaaaatmctcagaagacaaggaaaaggatttttaagaacctctaagaacatggtttgaggagaagagccatgctaactgtagggacttatgcaaagtttgccatttaaactaattagcatgkggcaataactactgtgcttactactgtgtgtttaaggttttattcactgtgtgttttacttgwtcatattagactttcctcctacatttggagttcccttgctcaagtaaaatgtcatatattatgtgtttaaaaggattctagtatccaattgaataaaaaagaatatatacatatgcacacacacgtaagatttttatawatcatggagtaaatgtatgctttatatttataatgtctacatatcatatttaaatttatatattgatatatagctatttaaaataaaaggtatatatcttctataaatgttttgtatagcttatgtagctaagaaaaattatatgtccatatacttgcattttcactaaaaaatgtctgatacataaagagatgtaagaatgagataataattacctctaragagttgttttttattttcctttccatacagttagacttttcattgtgagcatgtaccacctttctagcttttttaaaaagcagtttatttgtaaattttaagacagttcttccaattttcttacctcattatccccagcttaaattgtaaattcagttgacttttttagattgaattcttcctggaaaaaaaaagtttcccacaatgccctgccagaaggatatggtgtccaacccagtttaaaaagtgcacccagtctttagsttcaactgctgaagaagcccaacccctgggctggagacctcccctgccccctcgcagcccaggctgtgggtagcggcagcgtctcccctgctctccccagggccgcggcggcaaaggcagcatctacgtgtgggcctccggggacggcggcagctatgacgactgcaactgcgacggctacgcctccagcatgtggaccatctccatcaactcagccatcaacgacggcaggactgccctgtacgacgagagctgctcttccaccttggcttccaccttcagcaacgggaggaaaaggaaccccgaggccggtgtggtgagcacgtccccttctgtccttgtttccttagggccactgcacctctgtgtcagggtgggatgctgggacactggcttgctcccctcctgtcccctccctcagagcctgaactaaggctctgaagggaagaccccttttctctatgcccagtcctgctttctaacaaagcacagacctcccatctgcgagctagtagcatgatcggtgaggactcctttctggatcgttttccatagattttcttgtttattgtttctggcttacaagtaatgatgaagtctggtttaccaatcagttgccccattccatcacttacaagaataactaactcattgtaagaaccaaggcatcacactgtaaccctgtctgaaacaagaacccatctgtttatttatagcaatttaaaaaacaacattcacggatggacttttctggatccataaaccccgtaaaattgcacacacatctgttattttctcagggaaagagttgtgattttcatcatattttaaaatggagccatgatttttagaacaaaaagattaataatcacagatttattgtttgttgctcttttctgagcaaagaaaaaaaaatcttcctttcttggcaactaggtataatggtgaattttccaagcccctgggaaatacatcrtctgtaaagcataataagcttttttggatcttttcctctctggagattttgctcacagatcagccttttcttacacctccaaaccaggatttagtaggtggttcagtagtcatgcatgaattatatcctgactggctgcacccatctccactgaggcttcttgagacaggaggacaggagctcaggacaaaatcattagtaccatccagtgtttcgatcccacgctcccacgtgggatcccaacttggcaagatggccatgcccctgcgtgagygaggagaagccctttacctggaagggaygcagaccttaaaagcctgtccttcccacgagccctcctgcattcccccttggtcttggggaggatgaagaatgtgccagctcctcccaaacagaagggggctttgacccctcttatcctgtaagctgtatggacagaaagggagaagggcagagcagacagggacaggtgaggtgacacttcactctcacgcctgaaagctccactccctaccccaaagacctctcagtggtgtaaatttgtcctcgacccgtatttatgactctttctacttgggctggctaaaggccttgagtttcctgtgagtactataattttgctcaatagatgccyttaaacctccctggtaatttcttcctcaaaataataagctctcttgaggatcctacagacagaggaagaattcccgtcgtttatacatgattttaatgaacaccctggctctcacaaacattgaaaatgaggtttttcactttgtgaaagtcctttaaaaatctgtttaccagtctcccctctaaataagagttgtggaggtgatacccacatattgggttgtcttgactcaacacatctcakaatctctccgtggattttagatgtasagaaacatgttttaatagcctgcccttctagagagactttagctgagcatgttgattctttcctcttcgggaatgccttctttcccccaagaaggaaaaagaaatgctgatgaagtggcctttggcctttcaagggccagtcccaatgcaacaaaactagggtgggggtattgacatcactttccacttcataatgtttccttttaggtttcaggaaataaatctctctgtagtctctggaatagccacagatatgcttctttgaacaactcatttatcttgtggacactgtaactataactgactakatatccccttttacgtgggctactaggaagctcagataaaatctagggcaaaagagaggcatatggatgctaagtttatccttagtttcatcttaatyttcttgggaacaaagcataggttaaataaaaggagtaggctgggggcagtgactcatgcctgtaatcctttggaaggctgaggcaggtggatcacctgaggtcaggagtttgagaccagcttggtcaacatggcgaaaccctgtctctactaaaattacaaaaattagcygggcatggtggcacgtgcctgtaatcccagctaattcaggaggctgaggcaggagaatcgcttgaacctgggaggcggaggttgccatgagccaagatcatgccactgcactccagcctgggcaacagagtgaggctgtctcaataaataaatrartaaataaaaggagtagataatcccctgctccacattgtgcgggggttcaaaatagcgtgatttatccactcattactcattatcttcccttccaggcaaccacagatttgtacggcaactgcactctgaggcattctgggacatctgcagctgcccccgaggcagctggtgtgtttgcactggctctggaggctaagtatgttcatagctctgggtccagggccagctctgcagggtggactaacacgtgtctctctgcccacatgccaggtgtccatggagggaaaagttgatgtgagaggccatgaatagtcagggccaatgaactctgctgtgcatttctaagtggcccatgtgcccaccagcacacgtgcgtgtgcatacacacacacacgcacacaccataaaaccacattcctgggagcacacaacacccagcagcacgtattagcaacttactcagatacccagtgaaggcacagagatatttctttcttcatcaaatttacccctctatcctctgtgtatccctgggctcttctactccagtgatattcacaatcagctacttgaagacaaatcaaattgccargctggtgtttcagaacatgtggcaaacaaagtggtcccactcaagatttgttaatttgtgaagtggattcactttttaacactgaaacaagataggcaaagtcacgcagtgtagaccaagatatgggctttcctgggagaccttccaagctgaaggtaagaggagaccatctcctatgtcctcaccatcctatggagaggccacatattgctactgctggacacaccttggatttgagtagcagtggaggtacctgcccacctgctactctactttcttttaatgatacctgaggctggccttatgttcacagaatgaacacatgggcttcagacaccacacacatagtgtgagtgtaagtgccggctgtgtagggaattgtcagagaatgcagttcccagcaacttgtgagaagttggattcagtctcttggggaaggagagtagagttgctaggcaaccagggctcccagcatcaatctctaggcagccctgcttgtctctctccacataggcagtgcattttctgatttgcaaaggaggcaggagttsgttcctagaatagaaaggggcttcaacagattacctagttcaaccctctaccttcacaagaaaaggcataattatcctccytttacagataagacccyaaattgagagtgacttctctttttggacaagtctaaactttgactcttctaacaaaattcagatagaaaatttaygatgccaagacactggtcaaagctcaactattaggcacagagacctctgccctatcaagcacagaaaacaaaatttactcatatccaatgtacatttcctgaagataaaactgttcatctcagggtctgagtgggccctggagcctgagctggccttgctcactgcatccgcaaggagacaattagcacagcctgctgcctgtagctgagctgygcagagccagggaacaggagtgctccaaaagcragaagggtttccggttgccctttcaacctcagaagtcaggacttgactcacagtcttctggatttttgacaaacaaaatcctatgcctatgcctagatccataggcacacaaatggaagacctaaataaatcaaagtgggggagtgaggctgctggactcctagagattcatggctctgccttgattagtcaccattcttttagcacatacgtccagatatcctacagaaaagaatgcagtcaccattcaggcatgctttgttttgaagcaatgatcatgaacttaatattctctgctggcataaagaggaaaaaaatataacacctggcagcttgtgggtaagtccatcacgggagccggtcctaaaattcttcaaaataccaactttctgaggttggaagcagaccctgagatgagattttggtgcaagtgatttattaaggaagggatcccaggaaaggcagtaagggagtaggggaaacaagttagggatggggaagaatccaagcaaaggttcaacttcaaaagttctggcctcagtctaatcccgagtgtaaattaggcctcagagtttgttctacctccaggcaaggaagcaggactgtcatattcttatatgagtcagtcatcggctaagagctactctggagaagtaaactccaaggcatctctagctttaggcaaagcggctccaatagccaaaagtgaaaaccattggtcaggatgagatactccaaatgagagcccagagggatgaggaatagggcctccacagagcagtcccaaagctcatctctctcttatcttgagataaggttacaggaagtcctcatgcataacaacaaattatctaaatgtatgtccatcaggaccttgaaagagagagaacaacacttcccccatcatgactgtaggggagaaaaagaaaaccatctctctctcctaaccagttgtcactttgtagtttaatatcataatgtacttttctgcctaatgcttgaaaatgcctacttgagtcacaggaaatattgctcccatctcccagtatcaccaatatcagagaaatttcaaagaattttagtgggggatgactgccaccttcgaatatttaggtttctctcatatgacctggtgctttctctgtggtcctagagggtgagctaggctcgaggggtagatgtcataagaagatcagtttttgactcaagaaaatcatctggagtaaagtggtccacatgctggactggaacaacatttccaaaactgaccttccaggggatggatttttaatgtaaactctttagcgagtatagtatatagaaagaaattcattaggtgtggctccatgacattttaactaaatgaacagacccatgtagccagcacccaaatcaagaaacagacgatttatgtgccctgttgctcagcagtgcaagagattcctccatgttcctgtatgtagttataggtcgttcattctcattgttgaatatcattccattgtataaatggatatttggattgtttccatttggggctactatgagtgatattgttaggaacattcttgtacatgccttttggtgaacatacagatacatttctgttgagcgtctactagggagtcaaaatgttgggtcattaatatacatatgtgcaattctagtagatatcgtcaaatagtttcctgaagtgggtgtacccattgaccctaccttgagcagtatatgagaattacagttgccccacatccttgccaaaatgtggtattattagtcttctatattttagcattcttatggatgtgcagtggagtcatattatagttttaatttgcacttccctcatagctagtgaaattgagcacactgggtaaagttttttaaaaaatacattcccaagcctcacccaagcctcatagaatacaaatccctagggatgggtggcccaggaacctgacttttcaatgcctgttccccrggaatacttaagctgccagcctgtcgctgatctgtgractagggtgtgaggatgatcaataaggcaatagctctgtgaatctatgactctgggtgcagagtgtgggtagctggcttctgcctctgattaggtgttggtattcagtcaagatttaatgtttctgcatgaaacaacgaatccaaataataacagagacaagggtttatttctctgtcatgtgaaagaaaatacagagataaggaacccagggctggtttagggtaccggggtaccattgtgaatcagggaatccagctctttctagctttctgctcctttgctctgccactttcatgttctctagacgtgctggaactccagccaccatgtttacatttcaggcaggaaaaggagaagcacaaagggcaaaaaaataaataaataaacaaataaaagagagagagagaaggagagagagaaagaaagagaaaaataaaaaaagaaagaaagaaaagaaagaaggaaaccagctgagtcagccatgttgaaggggttttccaaggagccccacccagtggcttctgcttatttctcattggctagaactgtcacatgaccaccgccacacttcaagggaggctgggaaatgtaattttatagctgaatgcattgctgttctgaataaaactgaagttttcttaataaggaaggagaaaagatagatatggagggaaatacaactgctaatgtcttctggcatctaagtggacaatcactcatctctggatctctattgtcttatcaacaaaaggtagcaagttagatcatcaataaggttccaatgacttcctggaatattttagctctgcttctgaaatattgtttttttagggaagttaatattttaattggatgtctggtgatttttaaggttgaatatgccttaaagctgaaaaacgttcatttacatacttttaaatattgaggtcaatacttaggaaatagtaatctaatttactttaacttctgatatatgtgatatatgttatcattaataataataaagtctttttattcagtgtccagcactgtgctaggtactttacatacataatttacatttacatcctgcaacaaacctataaggccttatgcccattttaaagatgtaaaggctagagctcgaattgttaaagtaacttatccgagttcacacagttggctttaagcattaggatgcctgttccactgggctctcggtggaacatagaaaaggccctgccactgtcttgcctgtggggctcaccactcatcctgccatggcaatgggttgcagtgaatgagttagctcttcctcaaacatgatgcacaaaatcaggtttcactttctttgagatgagattttccacaccacaactacaccagggagtcatgaaaactgaatttcctctcacgtccttataggacgtgagcaaacaaaggctatggagaaaataccagcttgactcacaaatgcattatttttctcagactggaaataatccaacctttgaaattattttttaatcctatcaaaatttagaggatagactcagaattttaaaaatgaaagaaaatgaatggatcttttacgactccaaacatctcttatgatgaagagaacgagacccagagaagtgaaacaacttgctccaggtcacacagtttacattgtcagataaagatcagatccaacaagtaaagggattaaaattctcctgttgacttctagaatttaccagatgttaggagaagtgattcctccaaccttaagactacagcatcatctttaaaacatttccattttcaatttctctaaagatgcatgtgctgactttaaattacttttgctgccttgatcattaggaggaaaatgttaattgggttcargggaacttgatgctgtaaatagaagtactatgctctgaaagagaatggtgagggaacagccttgcacacgagaaaaacaatccattctgttagaagtcaggttcctacaaaggataaatgcttgaggtgatggataccccatttaccctgatgtgattatcatgcattgcatacctgtatccaaatatctcatgtaccccataaatacatacacctactgtgtacccacaaaaattaaaaattaaacattaaacaaaaartcagtctgctggtcagccacttcctaagagatgcttgctgacccctggacccaagtttctcagatttcctgatgatcagaatcctggagtgcttgttaaaaacacagataccctaagcccactggagatccatagaatcagaatccccaggggagcccctggaaagctctatttttcaccagcgcccccacccccaccagtgccgtccaggaagttaggaagctctcccctgaacgaggtttgctgcatactgaaaatactaaatgtttggaggaatccatggaatcaaaacctctgarcctggacatcatttttttaaccatccccaggtgattccaatgtgcagacaaggttgagaaccactgtcccagactaccaatgttctcaaacatcactgtacagaagaatcatttggattaaatgcaaattctcaggcccacaatctccaagatgctgattcaggacaggtggaaattcacatatgtcactaatggtcctgacacagggggattgaggatcacagtgagaactcctgactaggataacacagaggctccactgatgcctccctcagcatcytgagctcccccatcatgacagccctcacattttcaatactgagttgtccctctgtccccctaggctatcagctggtggggacaggracatccgtctgacatgcccagagttagcacgatgcctgaatgtggtagacactcaacagacatccatacaatcacttcattgcgcagyaccttctcatatatctgcatcttattttcccgactcatataaaacatttgagaacagggaagaacatgtcacatttcttgtcctacagtctccaaaacagtgacctgtatatcgcagatactccataaatttattttttaattatttaataactatcacctgtaattcttgggctgctatggtacaattaaagcaggttgatgaaataaatacctactttacagaatattgtagtctgtcaattcctaaatcattcagaagggatactagaaggaacctggttttactcttcagacatatgcaaatagcaggtcaaacagtgtcatagactcagttacactggagagtgaactatgctgtggtttatctcaaaagtgaaaagttccttgttctgaaacattatttctctctctctcatgctctctctctttctaaaatgcaccccatgagaataaatctgcagagaaacatttaagggagcccttctccaggcatcagaagtacagcccattttcatggcaaagatgagaaatgagaaacctgctagccagccctctggtcatttagatcctcatttgtcaacacttctgagattaataaactcagaatccccttccagcaaaacactcagtttttagccataatcaacttaaggaacttttacaccattttacatcatttacaccattttacaccacttacatcattttacaccatatgtccaagacatgttctgaatctcctcaaataagcattgaccttccttggaacttgcttcttttctttttttctttttttttttaattatacttttaagttctagggtacatgtgcacaatgtgcaggtttgttacgtatgyatacatgtgccatgttggtttgctgcacccattaactcatcctttacatgaggtatttctcctaatgctatccctccccatccccccaccccccmcacacacacatgacaggccccggtgtgatgttccccttcctgtgtccaagtgtggaacttgcttcttaatagaagaaggtctgcattcaagagcacatggatcatttgaactcttggttctgattcagatcttccaaccaatgaactttgcatatgttgaaattttatcaaatgagttatgttgctcctggtcctttgaattgtttgacttctgaagagaactgtagtgcaaggttttgccaactttttgaccagaatcctcggtgagtaataaattttgcactgcagctcagcacacacacacacagctaccctccaagtatttcatgaaaaaatagcttcctgtattatgtgcagtgcatactgcttttctattctgttccattcattttttaaaataataacaccaaccattaaatcactggttctcaacattggctgtctgttggaatggtctgagaagttttaacagtttccaatgcctgggtctcactcccagagattctgatttacttggtcygggatgaggccctaggcatgagatyttcaatgcccctaggagaaaattttcatgggcagtcccaacaacctgtgcgataacctggcccaaaaacaaatcatgatttgcaatttgaaaaacatagacaatgtgtagtaatagacactaatttccaaaaacaataacatttacaagaagactagtttattcactgaacaaatgtgccaaggaccatcctggacactaaggatataaatatgctraatataatttctctacccttgaagaactggtaccctccttttcaaaaatggaacacmcccacatgccagttcccagatgaagggacagcaagaccagcactcagaagctccctgtatccccttccagtcactgccccacgagactgaccactaacatgacctccaacagcatagattagtcattcttgtttttatattttaaacagatggaatcatactttatggtctcttttctgcctggcttctttaggccaacatggtatttgtgagatttttccatgttgttcagagtacctggagttcattcattctcactgctgtatagtaccccacattctataagttacacctcaattagtttactccctrtyttttggatggcatgtaggggtttcacagtttggggctaggagcattctagtacacaggtctggtgaatatgtacacatttggtcargtatatgcctaggaaaagaatttccaggccatagcttaagcttaactttagaagatacagccaaacagttttccagtttagttggaattacttgcacgctcatccacaaagtacatgtgttccagttgctccacatcttcaacacttaacattgtcagtctttttcattttagccattccggtgtgtgtgttagaatagacttttgaaatcaatttatgtaagtaagaaaagcaagaagatttctttaattgacttatatagtggttttgaatggtgcatggacaccctcccttgaatttgagagttcacagagattccaaaatcttacaagaggtctgtgtcctgagtaatatttctcttaatcattgtgcctctctccctctctcaccctgccttttgcccttgccctcttgctctctgcttcctgtatccagcctgggtctgacctggcgggacatgcagcatctgactgtgctcacctccaaacggaaccagcttcacgacgaggtccatcagtggcggcgcaatggggtcggcctggaatttaatcacctctttggctacggggtccttgatgcaggtgccatggtgaaaatggctaaagactggaaaaccgtgcctgagagattccactgtgtgggaggctccgtgcaggaccctgagtaagtgggggtagtggtccctctgctgcatgtggaaagtgcccctgagatggctccatggcattggcataatatcacattccctcttcatgtttgggtcaactgtattttttgtttgtttgtttgtttktttgagacagggcctcactttgtcacccaggctrgagtgcagtggcgtgatcacagctcactgcagccttgaacttctggtctcaataatcctcctgcctcagacttccaagtagctagggccacaggcatgcgccacyacaccctgctaattttttttattttttgtagagacaaagcctcactatgttgtccaagctggtctcaaactcctgggttcaagtgatccttctgccctggcctcccaaagtactgggattacaggtgtgagccacaatcctcggcctggatttgactcagggacaaccagtttccaagcagagctgcaggtttgcataaatccaggaggcaccatttacatagaacacagaacccctgcttttggttgtgagccttaactgtttcagtgatgtatgccattatttctaagggcacaaatcaaccactataaacatcacccagctcaataaggagaacatgactaacacccccaaaggcccccygccgtgaccactgccattaacatccccatgccagcgtagccatattcttacttctaactccatagcttaacttgcctgttccatacttactagaatcatacactatgtcctgttttacaactagattatttcgcttggagttatgtttgtgagatccagtcatgtttaatgtgtacttayagcttttctcattgctgaagagtgttccagtgtatgactataacacaattcstttattcattctacctgtgggacaatctaaggacttgattttccgctgagtgaggtggattttgccacttggagggatttgtgtatggggttccctacacagaaaccacagcgttagtcaactgcacccacttcccttccaactgccccaccttggcaagtggattggtcagtaaggatacttcttaatttctctctgtcctccttgatgcattagtaaaatggagatagtaatttttattattatcactgaggtattatttacatgtcatcaaatacacagaacttaagtrtatcatttgagtgttgataaatgtatacaccctggtaactaccactgaatcaagagatgaggcattccatcaacccaggaagattcgtcatacctgcttccagctcgtccacacgctccacaggcaccctttgtttttgcttctctctctgtagattcgtttcaccagttttcagactggactgtgtccagtttctttttctcagcatgaggcttgtgagattcgtccaggtcaccatgtgtagtcgtagctcattcattctcattctaccttgagaatacacctccgtggcttacatcatttaaatggtggtaaaattcattccctgccagggtcatatttccgaggaccatcgagcctggccagagtccaacccctctcagactttatcctcctcgccactcttcattggtcctagacttgctgcatctcttctactcagttacccagacctgaattccaatcttgacttcaccaacttagacaatacttttgacatttctgaccctctgctttagcarttctcaacctttgtgccctgtctccctttgacagcatggtgacgtctatgggccccatcagtctaatgttctccaaattcattagataaaatgcactggattgcaaaggaaaccaattatgttgaaaccaattagaaaataaattcatgctgaaatatatgtccccttgtcagcacattaagtaaaaagctctagtggcaagtctaatggccacaataatttcagagcagcagtgatgactaattgctgctgcaggatccatgcagtggctgtggtgggacacgaaaatctrccagctctttgatgacaaagtccgaggaggagctaatgccactctgctttgtggcctgcattcataatcgaaagagaagaaaagtttctgttataatctagtgaaaattaaaatgtggaattttttccattgaaattattagaccccctgaattctatccaaatgggccccaaaataagagatttttttctctttcctcaccagtaaaayggagctaatgtttttcctccgcaggctgctgggagactttagcaacacacaagtctacagcaggcacacagtaggcacttaataaatgtaacattgcctctccttctcattcatgactagatgtgaacacttctagcttacacctgtagaatcaaaagacagtaatctcctagagtttttggtgaaataattgtctgatttttatgcaaattccaaatcagatatcctctcagcctaaaatrtcctccaatggacaagcatgtgccctgggattcccatcctcccatgggccagcagcctgccatagatgggcwgcctaccataggtragcatcctcccayrggccagygtcctcccgtagatgggcagcccaccataggtsagcatcctcccayaggccagcatcctgccatatacgggcagcccaccataggtcagcatcctcccatgggccagcatcctgccgtagacgagcagccaaccataggtcagcatcctcccacaggccagcgtcctgccgtagacgggcagcccaccataggccagcatcattccacaggccagcatcctgccgtagacaggcagcctaccataggtcagcatcctccacgggccagcgtcctgttgtagacaggcagcctaccataggccagcatcctccacgggccagcgtcctgttgtagacaggcagcctaccataggtcagcatcctcccaygggccagcgtcctgctgtagacaggcagcctaccataggtcagcatcctcccacgggccagcrtcctgctgtaggcgggcagcctaccataggtcagcatcctcccacaggccagcgtcctgctgtagacgggcagcctaccataggtcagctcctccacgggccagtgtcctcccgtagaagggtagcccactataggtgagcatcctcccatgggccagtgtcctcctgtagacgggcagcccaccataggtcagcaccctccaygggccagtgtcctgctgtagacaggcagcccaccataggtcagcatcctcccacagaccagcatcctgctatagacgggcagcccaccataggtcagcatcctcccaagggccagcatcctcccatggacaagcatcttcccatgagtgagcatcctcattgtttactcactgaacccctagaaagtggcaccaagtggattactgccaagctgagtattttttttccatgaaacagtccatgatttaagaaggcctcactctaatcagcaccacatggaaaaaataaagcttcagcccaagccctataataatctaaaaacacagagctgcccaagtcccaagtgatgttrcaaatgtcctataataaaaatagctactctgcacagttcctcaccattttccaaagcttctgtgtccacacatcatttctgttcactcccgtatccctcctcttggcaggacagacttctctgagctctaaacaagttgattgacacagtcaagcccacagaggctgtaaatgtgagactggaagtcacttttattgagtgccaactgcatgctatgtgctttcatacacgtaagcttcacagccaccctattgttgagggtgtgccttatactcgcacagtcgaggtgggagcaggggtgaatattttgcagccttaacaacaaactggtcccatgctgggtgtcagggagaaacaccaactaggtgtggtatatgctaggcccatttacattactgtatttaatccttgtaagcccaggaggtgtgtcctatcattattactttttatacacaaggaagctgagatccagaaaggataaaaaaaaaaaaatgtgctcagagtcacaaagggcagagcaggacttgaagcaaagcccatctaaacccaaaccccaggctcttttcactacatgaccttgaccttaatcagctcccgtgcatacaggtcctacattaggccgtatgtgagagcagccctactgtgagctcacagtgccattactgatgacaggaggttgggaaaggtcaagggcatgctaaatgtcatccagctactaagcagccaaactgggatctgagcccagtcactttgacccctcacggtgggctctcaggtatctcagtgactccccctggagaaggtgaggcttgggtargggagggagtttcagtaaacattcccctggggattctgaaacacccacytagtgggtgctcccatctcccaaaccccatcactggcattccagaggcccttttcactggtctacaatgccaaggtctgccgtgtcttttgggaatgaacaaagagacaagactgggaaccactgtccaaatgggggatttaaggctaaaccctactcatcataactaactttacccaaagtcaacatgaaatgggcgttgacaactgtttcccttgttagagttcagaataatttcttgagaaatttggaagtgcagtgactttctgcagtggtgaaaatgttctgcactgtccaatacaatagcttgtggctattgagtgctagaaagtggatgaccgtgattaagaaacaagagttttcattttatttcattctcattaatttaaayttaaatagcaacatgtggctggtggctaccatcttggacagccatgtctaaggcacatctggtagttacatcttagcaggagggatgctgaattgtgcaaaccgaatgggaagtggagatttaataacataaactctatgaaggggtgtcaagaagatgagactgcaagaaaggcttgctggtccattttatagcctcatgccttcccccagcacgacatccaattgcagcatcctagaagcctaaaggcrgccttgggagggtgctagtaagaactgctgctaagaacttctctcggaaagtcactgggatagcrctttattccactatctcatttaatcacaggaggttggcatccctagtcttaatttaggtgagaaaacaggatcagacaaataaagcaaacggccttaactccaatgtccttatccattccacaaggccctggggcctggtacctcattcccttattgcaaaaggagaaagacttacgatgtctgtgcctttacagacactctgcaagcagggagtgggggctggaatgtccctcacaggcagtgcaactggcacgatatctacacttacttgcatataagcaatatttacaattaacaaaaaggcagcaccgttgcagtatttaggggaagagttagcttggaatgtactgcggccctcttagtcaagctacgtgtcaataccaggctatattttctgagattgcactggacaagccagacggacttctaatgatcgtcaagcaccatatgattatgagagagggcaggaggggagcaccgcgggagagaaggagagagagggaatgagggcgtakgctgagatgaacggcagtttatctcccagtttctgaatatgcttascattccatcataatctgcatacatgtggaatttaaggccagagagaacactggaaataatgttatccaagtccctgtaaggaatctgaggtccggagatgtgatcatcccaacatctcacaactatccaggaactttatgcaagatcaatgcagtgttttcaatgaagagaaatgggaaagcactatatttcagcactaactcagttggggcctcccaatggactgggccctcgtctgtcatattcatggtgtaaccctagtgcctacaatagtgctgggcatatagtagacaggtgataaatattttttaaatgaatgagggaatgaaaatattcagccagcagcagccggacacaagggaaatgtctgactgctggcaataggaccggcgggccagcaaggcaaatgtgggaaggaggctctgccttggttggaagggctctgcctcctctcagtgccctccggtccctcgtccacccccacaccagaacttgttctcagatgcagatgagttaggtctagggcaaatacacttgttgaagaatgcagaggctccacagggagatttggagagcagccccagggctggctgtgccgcttgacagaggaggcccttgtgaccacgaagcacactcgaggagcggtggggtacaggaatcaacagccgtggcaatcgccactctccataatgtgcagggctgcacagaaacagcttccaaggtggagtgagtggtgattgtcaggtttgtgggtttccttggcattaatcttcccggagatggagtcaatttgaaaagcaattttctaaagaggctttatcaagagagtcagtgaaggatgctcagctacaatcaaaggggaaaatacacctggctgtgaccagctgcaccagctgtgtgtagaatgagcagagccagcccaggccggccccatcagccagctgggagtgacctgtctaacacagctgcccccagcccctctgggcaccctgaggggactgttcactgagctcctttaaggctgtgccaaaatatgtgatccagctctgaagtttaagtgaatttggaaataaatgttaaaacctggtatcaatgccggaagcagcatgggagtgagaggtcagcgtgtgctcggccctgtgccacctgggggactgtggaccagcactcccgagctgcagaggcttcctgcacaagttcatgcccacctgactctgctacagggggaggagaaaacctcaccatggccacctgctgcgtgtcgtcatgtgactgccacaaaagcagrcatcttgggcacttgagaaagagtggctgtcattgttactattgtgattattctatcaaaacaatcacagccttataactttttctttttttttgagacagagtcttgctctgtggcccaggctggagtgcagtggcacgatcttggctcactacaacctccactgcccaggttcaagcaattctcctgcctcagcctcctgagtagctgggactacaggcatccaccaccaaacccggctaatttttgtatttttagtagagctggggtttcaccatgttggccaggctggtgtcgagctcctgacctcaggtgatccgcctgccttggcctcccaaagtgttgggattacaggcatgagccaccacagcttcataactttatcttacagttgaagattcataacacaagaagcattccccagggcctcctgggaagcaacacctatttcttgacacaaggmagtttaaacacttacttgcaatgatacmcaataaaataaagatacaagccaccccgacaaccccaagtttgtcttttataagactggaacactasgattttgcatgttatctctaataggtcaaagaagaactctttttttttttttttttttttttttgagatcgagtctcactgtgtcacccaggctggagtgcagtagcgtgatctcagctcactgcaacctccgcctcccgcgttcaagcgattctcctgcctcagcctcctgagtagctgcgattacaggtacacaccaccatgcctgactaatttttgtgtttttagtagagacggggtttctccatgttggtcaggctggtcttgaactcctgacctcgtgwtccracccctyggcctcgcaaagtgctgggattacaggcgtgagccwccgcgcctgacctaagaactcttaaacctccagaaagcatgcttcattttctgcagcaaatgagctccagatcatggcctggaaactaacaccctgtgactatttaaaatgtttctgcagagcctctttttgttccaccaccaacctcctcctatttaaccttcttataaattgataattcctgagcatatatctcctttttgctttaaaataagaatgtttcattccttttcttctcataaaagcaatacatggtcactgtaagaaaatcagaaaatrcaagtgagcaaatgaagagagaaacaagaaacatctggaaaatactgttcctaggctctcccaatgccacgatgccagccaaaaaaacctgacctgtgaggggagaatggtgttctttctctaccaagttcgctgcctctggaattcacagcatgcttttaatttaatttcatagtaacttaatattctcagaagagtccagccacatgtctcctctctcagcagacccagctcctgtgcaggaagcagttcacatggcagggcaggatcggggcgtttttctagctggcagtctctccgtggtgctaaaaaagccagactcctcagccaacgtgaaaagagttgttctagtgctgggatgatctcttatgatggaaggagagaaatacagattggaccaaacctgagatgaccttcaggcacaccatggctaagggggtttcagtagatggtgacagtgcctctygttcaggtccccttcactgggctatgcaccaccccagctactgtgggcattggctgctaactgtggtcttctgcctgtgtctctgaagaatcaccctcaggggctatggaaacctggctgaaataagaatacataaaacccatgctcctgcctccaagcaggacaactgtgtggtggcgtwgatgctccaaagccagcatggcctgtgacccccaggcacaycccagtgtccaaggcttctaggaaaatgtrtgattcttaacacaagtttgtgtgtttgtccctactcccacctgtctttcggctttccaaggtgcatggaatatgtctttcagtctccctccatctctcccttgcaccctctatcacaaatgcacaccactcactctcaaataagacctttagcctgggcaatcrgtggcctgtgttctagtttccccttctcagcctcgctgtcattttccctcccttagtcttagtcgctaaggccttccccatgagcgtgggkctcctgggagaaacagatacgacagccaccatagaagattcacacagacaggaacacaccggcccttgttgttctgccagtgaggctccttcttgggactcaaattccaggctcctctgccatgcccttaatgtcaaagtggtcgccggcctacatctatctttacaataacttcttaagggctttttaaagaaagcaaaagaagtgagggtgactgagcccacagatggaatgaggcccatattctgtatcaccaacgatgacataaatatagtcaatagtcctcagacactgtgcagagggatgtggtaatcagtttccaattgctcttctccagagacagataacacctgttttaggttgggttgctcggaagcagagcctgagattgggtttgagtacatgtgctttattgagggagggcttttcagggagaactgtaggagagtgagggatttgggaggggcagaagtagccaagaaaggatgtggaaccaggtatgtgcatgtggcctgacccaccgsgggctttggagcatcaacgccaccacacakttgtcccgcttgggggcaggagcattggttttatgtattcttatttcagccaggtttccatagctcctgagggtgattcttcagagacacaagcagaagaccacagttagcagccaatgyccacagtagctggggtggtgcacagcccagggaaggggatctgaatgaggcactatcactatctaccaaaacacccttagctgtggtatgcctgaaggtcatctcaggtttagtctaatccatatttctctccttccatcataagaagtcatctcagcactagaacaactcttttcacrtagcgaaggaccttatagttaattcacagaaacttcatgtatggtgggctgtggtcttatttctagcaaaagtggctgtctcatctctgattcttagccaattgaagaaatattttcagttttccacaaggcaagcaatgccatttttctgccagagtttctacaaattgacttgtaaagggtctgtcactatgactccagtccacaagggtcctgggtgcaaattgggacagaaaacaaattttcttagaattcagctggtgttctgaattcttaagataatagtgacyactgcacttgacaaatgattagtgatgttttataatatctataatgattgccactcagttacagtctttggttgttggcttgtgaatttccttcttgaaacttttcaagaagccctagactacaggaaagaaaagagagctcaaattcaacacagaactcagagccagggtctctcttcctgktatcattctctgcttcctgcaactgtgcttctcaaagactcccaaagcccctctggctcaactctagaaggaaagcccgattctgggcctggctgcttgtctgcctagaaaccctgtgatagaatgtgtcatttccctcataccttgaggttctggatgaatatttcagagtcctccagagaggtggccagaaaacctgcaaaacaaagctgcagtttccccaactgcttttcctagagccygtgagccgggaaaaaactgaatgcccttgaaacagaaggccaagagactctctgcctgttgttgttgttcttatcagattcaaattcaacatacataaacaatttagaccyscactgtccagtacagacgcaaccagccacaagtggttatataataacatattagattagttaaaaytgaataaaataaattgaacattcatttcagcactcacatgatctatgtttcaattgctcattagccacatgtagccagtggctaccatactagagattatatatatagaatatttccatcatcgtagagtgtcctattggccaatgctrgtctagacatttgtaaatatactatgtatatgagtatacatgtatatacacatatagacacgttatatatatgtgcatatataatgtatatgtaggataatttatcttgccagcaactgttcagggcaggaattaatagctcagatcatgcaaatacttgcccacaactggactcgtactctgagactctttgtgctaccctacacagctgtccactgctgggctagagcccaatctttagttattcatcaccttacctgttttgtttctgatcttgttctgaataaatagcaccatctttgagaaatccaggttatggccctcattaccccgacccgcaaagttggcttaatgcctgctttccaccaaatggatggtttccccagatcctgggaacagaaagaccaaccccaccatcactggatccccatagctgatggacactccatacatgattcagcatcagtatccgggggtgggagaggggaatacagcagtactccrtgaaaccgtttaagtctatatttgtaaagttcctccagagagtattaatgaactgcactgtatgtttcagcaagccctcccaggttcatggccttggttcctagggcaatgcagaaccaaggcttgactccaactgggcacatgaccactgtctttttgtaaatgtgctttacaagatgtgtgtttaaaaatattttacttatactccaaaataaaagccatattgaggaaggatatttgcataggcaatgggccagtacatgtgccaagcattgtgcctggtattttattttattttattttatttatttatttatttatttttcagcacaggaagataatatttattatattttaactagaaacagaacagatagcaagttcacgaggtatgaatatttttttcttaaatcaggcttaaacaacaataataaaaaacaagtctgcatatatatgttggtcactattataatcttcaagggcacaaaagccagcagcataaagaaacatgaataatgactgagaagttttgatgtgccaaaaacaaagatcactgcgttgaactcctttattttgttaatattattattaaacatttaacaggtattaattattgttatttggcaaaatatccaacatgcacatggtattcctacawgaatcttgccttaatattgttaatattaacactaagtttattcctctccaaaattcaatgagttatgattccactctctgtaagtgttagtgttagtggtaatatgcaaaactgattttgtktgcarggttaagtagcagattgacttcgcatttggtggccagctgtgtaccctaatttttatctattttcttaataaatttaattacatttcataagccctgagataacctgctaatgattgtatacttttaatctatactttattccactcaatttgaaccccacataataagtcttcaaaattatttacagatggttgtaattaaagcaatgacaaaatttactacttgtatagataagactgataataaggcctttaactaagagttgcatattttacatgcacttttaacttgctaggagcaactcttaaaattacatctatcattctgtcagaaagcagttaagtgcttttcattttgcttacttctatatgtgtaaccagactcacttttttcctcccgtgtaaaacaactgttttttttccttccccaaatattaatacttgtcttccaactgaacaattgctaaaaggaacttagcatttacacagcacattgataactatagtgctcagcagagacatatgcccataataggcatctgataaatgtttgttccacatggaatgaattgtaaggcagctgtttgagtcatatactgttcatcatatactgcaactaattttgtttaactaggaaattcagtttaccagatttaattcaccctcaagtataaatccaaaaaytttaaattaaaaaaaatcgatttactaatcctcagaaaaagtaaacaagttaatcatagttgttactatgctattagttgatagaaaatttttaaaaattactttccactaaatattgtgtacaaytaagtgaggggaagaaagttttaaaaaatgaaaagatattagctaattctcatcattttctccacatttatccttgcagcttatttgttcatatatttattcctgttaacttctctagctgaaagagaattttattatctgaatggagttccccatcaccttacgtacaaaatattagtgaaaagctagtgtaaatgtaagattgtattttcatgtcatgccatatttctgcatttattttttgctagcattaaatttttcgtatttaaatgatgctgtatagaatatgagataatctgccaattgctatgataytgcttgcttacaatattcagtttttgttgatagctttaaagtatattgcacacttgtcatctagcacactaataaataactatttttgaaaggatacactgacaaattcttaagttaatggctttaacccaacatttttagtcagttaaagaacagcaatggcaaaaacattgacaatacagttcatggtccagttctcccatcttacggtacaggttccatcagatgtggtatcccaaaaacaggagctgctgtgcgaaagccatatgcgctcttctggaccactgcacatttcacaatacatttatargcttttcccarcttaggcagatgtgttaacgatwattccactatgcttgcggtccactggttgatgttgttgtaattataatcttcaccacctaaaaccccgtctgcacattctttgacaatattgtgggcttcctcagcattgaggccaacctcgtcgcagtggcgatggtactcctccatggtagcgcctgttctccctgggggcggagctacgcctgtgcctggtatttcatacatggtcttatttaaccacacaagaatcatacggccgggcgcggtggctcacgcctgtaatctcagcactttgggaggccgaggcaggcggatcacaaggtcaggagatcgagaccatcatggctaacacggtgaaactccgtctttactaaaaatataaawaattaccygggcacagtggagggcgcctgtagtcccagctactcgagaggctgaggcaggaatggcgtgaacssgggaggcggagcttgcagtgagccgagatggcgccactgcactccagcctgggcgacagagcaagactccgtctcaaaaaaaaaaaaaaaaaaaaaagaacyatccacaatgacagtgaaacttcgagtgcttaaataacctgcccaagctctcatgagcagtaaacatagaagcagaattctaatccaaatgggtttattctcaaagtctggagtcttgatgttacaccacgcaatcctcaaatgcggtttccttttttccttctttctactgcaagaacctttgagcttctcccactccaagaaggccatctccagaaaggagattgcctgtaaggacagcctagagagtacttgggcttaacctcgctccaactctcgccaaagactcccccaaagtctcctgatcattcattggactgcctttcactggaattaatttacccattttcagcttttctttttttttttttttttttttttgaggcagagtctcgctctgtcacccaggctggagtgcagtggcgcgatctcggctcactgcaagctccgcctcccgggttcaagccattttcccgcctcagcctcccaagtagctgggactacaggcgcccaccaccaagcccggctaatttttcgtatttttagtagagacagggtttcgccatgttagccatgatggtctcgatctcctgacctcatgatccgcccgcctcggcctcccaaagtgctgggattacaggcgtgagccactgcgcccggcccagcttttcttaatggtagtaatggcagtcatattagcaacagcttctatttatcaaagyacttagcactttgaaagaaagacattatgagttcctgcctcagtctgggttgtcccagaagtccaacctgagacaagacttgggtgctgacagttttttgagaaatgatcccaggtaacacaagtgaggaattggagatgtaaaataaggaaggggagaaaagccaatgaagagtgcattaatgagcgagttgccaccgtgggcagctgagctcagtcccactagggacactgagttgtcacgctgaggaatagagaaaccggggtaaaaacctgtcagtcactgggagagagctacccctcaaaggttaaatccctgccacctttgggccgccctgcacgcaggctgtgcaggcttccacggaggtgggaggaagcccagggggaacacggggagattctcgtgcctggggtgggaagcagtggacgtgcaagggagcttcagctgcaggtgaactcagaagggacttaggagactcaggagggacatcacagcatctactacattctccttccacacagaaggttccaarcgtaagtaacttgctcacagccgggcgtrgtggctcacacctgtaatcccagcactttgggaggccaaggcagctggatcacttgaggccaggagttcaagaccagcctggccaacatggtgaaactccgtctctactaaaaatacaaaaaattagccaggcgtggtggcacatgcctgtaacccyggctactggggaggctgaggcatgagaatcacttgaacccaggagctgaaggttgcagtgagctgagatcacaccactgcactccagccygggcaacagagtgggaccctgtctcaaaagacaaaaaaaaaaaaaaaaaaaaagrgrgagrtaagtaacttactcaggctcacacagccagtgtgggaactaaacccaggtctgattgatcaaccccaaagcccttgccctttccgcyacctgaagctgccctcaaaatcccttgtaaggtgcacccaccactgcttatcctatctcctcttcactctgccctcaggaaaataccatccactggcaagttggtgctgacactcacaaccgacgcctgtgaggggaaggaaaattttgtccgctacctggagcatgtccaggctgtcatcacggtcaacgcaaccagaagaggagacctgaacatcaacatgacttcccctatgggcaccaagtccattttgctgagccggcgtccaagggatgacgactccaaggtgggctttgacaagtggcctttcatgaccactcacacrtggggggaagacgcccgaggcacctggaccctggagctgggatttgtcggcagcgccccgcagaagggggtgctgaaggagtggaccctgatgctgcatggcactcagagtgccccgtacatcgaccaggtggtgcgggattaccagtccaagttggccatgtccaagaaagaggagctggaggaagagctggacgaagccgtggagagaagcctgaaaagcatccttaacaagaactagcgctgcacatccgcytttcccaccgccctccctccccagctccgcctctgtcctcgctccacgtttcaggcaggcacctagcaattccatcacccgtacaggcaattccgtyttyttaatctgaagcttcactcactgtcaatgattattttcattacaatggaaacaatcttttttactytatgccccaaatatagcgttcccaacaacatccatgtcctatgtgtgactctaaattctttatttctgtcattcaaatgggtgatatcctgaaaaaaaaaaaaaaaaaaaaaactgggacagctttcccctcatttttttttttgtttctgagaaaagaacgtattttaaaagccacatagagtgactccaagaacaattgtccatggtctcaaacaaggggctgttacataacaagaaaatcaaagctgaggacagggtgtgagcgccacatctctgaaagcacaggagacactgtgctataaatcctttggggagcgatgttttgaatttagtgagatttaccagggatgtagattaaggtgatgtgattcaaaagatgccattcatagagagccctagttactgcatggggaaagagatccaggaagcatgagtgctggatattttactaccaatgccaagataattcactctactcagccggcgtggcaaatataaaacttacagagcgtggctgtgctctcaccagctgctgctctgagttatgttaaaatccgctagagcagcccaaatttttctcagtttgtatagagttcatcccagccccaattttctggggctcctcacatagctacccaaaagagaaaaaaaattaagacaagcctggcaacacacctggwgaagagtagtttactagcttttcaaacaagaatgtcccttttcctaagtcactttgaggtgtctcaatctgatctgastgagaggcgacaggagtatttttttttttttacagctttacacacacagatgtgggctttgatttccaagtaatataatggaagagaaatctcatactcccccacagtttgatgtcattaatgtgttgggaaaaaggcctctgtcccggaagagtcatgggaggtgaaaggggcacgtttgaagatgcgagcgctatcttcacatagttctccagttgtatggagcctcttctgccaagagagggccatgcaattcatcccrgaggaacctgaggcctgaaggaggtgagagaagacctctgtgaggaaagcacacagtcaccttctcggcaactaagcagtccctgagaccatttaacatgcaacccgaaggttatggtcaatccyaaaagtcaccactccattcccaactagacattaccaaagtgacctacccagagattgcttctcatccccagtcccaatgcacatccattcccaagaaatgctttgtcttcagcctctccaggcaccatctcccttcctgtgggagcagagagcttagcctggagcacctttccttcaagccagcaacacagagcactargttcaattccctgaargtggccactttaagagagaaatctgaaaaccccatttgctttcttttctcccatattggcatggatttctgtcttctctaacaccttgtgaccttctctatatcatgctttaaagtgtaataatatgattttttaaaagaaatttattacttgttgcaaaggtctttttaaaccagtttagatttcaagaaaaaataaatggaaatcatcgaaaattcatttcacattaatggtctaaaaataaaccaaaggacattatgtgtgcatgtgtgtataagtgcacacagaaatatatatacatatgtagactatatacatgtgtgtatatatgtgtatatatacatacacttgtataaatgtatatacacatatacctataatgtgtgtatgtgtatttattgaagaaacagataccatactcatttctaaaagaatattcagagaatatcaagatgattctggctgaaaaaggccagtggaaattcaggtgaaaatgttcatcaattcccattgcatcacctctgtaatttttcagctctctgtataaacattaaatgtcttatatagcagcaaaaatataaaatagttgtccatattttcacaggtgtggtgtaatttataaaattagaaagcaacttatcagctacttaagagaaatggcaagttttgatatgagtatacaatatataaaaatatatatagtgctatatatataaatatttggtctctatttcattttttgcatcagtattaatactaaaatatgtctcgctagtgatgtttttatgatatccctgatcctaactgaagagacagttatttatagtcatttattttaaaaaatgaaaataagtgaataataattaggttaacattgttgctccctgtgacaaaattttataagcaaatttcaaaagacatgttgtaaattaggaggctcaacaataaaacattaygctccagaaattatgtgagatgtgctatattgtacatgaaaatactttcatccattctaggaacagataatttaaaaattgccaaagagagatctaaagagcctgctttactaagtatgcataaaagacttataattaacatataaatcatacacaaattattatctacagcagtatttttcaaactctagttacatccattagtgggttgtaaaatcaatttaggaggtcagtttttaataaaatagagtaatttagaatacagtaggagagaagaaaatcacaggataggataggatagaatagaatagaatagaatagratagaatagaatagaatagaatagaatagaatagaataatcatgcataataaggataagtattgtttcctgaaatatttgtttcagatgtgtgtgtgcacacgtgtgtgtgtctgagtgtgtgtactggatcacaatgtaaaatacatttttcattgtgagtgatggtcaaaaatcttttagaaacactattctaaaatatattaatcaggctagactaagttatgctatagtaacagacaatctcaaaatctcagtggtttaatacaacaaaggtttatttatcatccacacaaattccagtgaaggttcaggtgactccccaaagccacagacctccatgcagtgactcaggatccaggctgtttcaccgtatggtttgtaatcatagcacaaggctgctacaatcaccatgcagaagagaacccaaggaggacattcatctgctcttctatgtttagcctgaaggagacacatgcatcgcttctgcccattgcccactggcyagtattgggcaatagccctggctaaatgcaaagcaactgggaaatctgtgacaactaagggaatatttggtgagcattagagtctccactacagagagtgcttgacattcccttaaaacatgttcttaagaacmgatttaacatggcaatcactcttcatggatggtaccatgaacattattacaaactggctgtaccttaccccatagaccacagactattctagaaaaagaccttaataattattcataaaatattaatatactatatttaccaaagttaattataaaaacaatttataattctgtcctctgatataacacttaaactcaattattaaaatcttagccgggcatggtggcatgtgcctgtagtatcagctactcaggaggctgaggtgggaggatagcttcagctcaggaggtagaagctgcagtgagccgtgatcacaccactgcactccaacytaggtgaagagcaagacactgtcccaaaaataaataaatataaacagagtctgttactaaaaatagatattggcggatataaggtccaaggtttgatcttgtgatcctgagacactcctttttaatacttaggtttaaagatggatttccaaaagattaagtttaaaaaatgatttttaaaaattccgatagagttactactctatgtcttcattcgtatcacttataagttaatgcatggttttcatgtgatcagcgcatttgcttggagtgattatatgaaaaccacacagtgtaagaccttcaggacacataagtattttatagttaacagaaagaagtgctgaattaggggaaatggtgatctcacagctaaagtgtttagatgcaaatagtctaatttggtagaaatttctaaaaagcaaaatgcaaagataaaggacagtggttgtggaagagagttaggggatccttaaaactctggaattgtgaaatgccagagacagaatgtctcctaggctaatgtaggtggttcagttgtggccagcarggtggttctttgtctctaaagaataagtcaagagaaagggtgggaggatggagggcactcagcacatgggagcttagaataaatgagagtcagggtgaccaaagctggaagacagtgtctggcagcattcagggtagggaaacatgaagcctgacataagggagaattccagtctctgaagagctgaagtctatcgagggatacaggccaatacattggcaaagccacccccagagagagtgcattaaaacaccaccacttgccaatggtcccattgcatgctcacccacagcctcctcatgccttatgcagcttcccaagaacattaacaccggtataaacgatccaagcagctagatctgcagaaaacaacaccctctctttgaattgtaaactaatcagctagtacttgagtttttccattagtctcttgtgcatttagttgaaccctttccttggcttcaaaaaaccctgawcaaatttggtttaagatgtataagggacctggaatcaaagtctgagaacctagggtaaattctccaagccaaggtcctggctccatgtttctcttagaactgagaagagactcacgtttgtgaacctgggaatagaatgatctcaggtgagggatgcactcagcctaaaaagatgaagattctgtgtggctaaatgtttaatgctcattcatgcatgatttgcggtgggatgggatgggaaggcaactagaaatctcagctcacagagtttcaggtgccagaagagccamatgaggctggtaattccttaggcctaacgtcactgttactgatttccaaccaggaggctttgggccaacctgccctccccatcccaagatggggtgtgccasctccccatcccaagatggggtgtgccacctcacaacaccctcaaagatgtccctctgaatctgagaggatatcccatgagctactcaaactagatggagggaagaagctaaaatttatctttttcttttctggcaccatgtcccaggaccactgatgggccacaggtgacaggcaagctcctggtcacaaggatgcaagcatgagggtaaaggggcaggtacagctggtgagggcatcagcccagtggagtcattgaccaggagtgtatcttctgataaaataagtttcaactcaaaaactctgtttgaatacaacataagtcagtgtggctttttatgttgtttgcttgcttttatccatgcctgagaaaatggagtcaggtattgtaccaatcaagataccaatcatcaatgtgccaaatgccatgtgagttttggggtgacttcattcaccagcagtgtcctaaccacaaatctatgttagaaaamttttaggataaacttgatagtaatggctgcttgaagattttgtttgtttgtttttcggggttttttttcatttaggttttgtttgttcgtttgtttgtttgtttttgagacaaagtcttgttctgttgcccaggctggagtgtagtggcatgatctcaggctcactgcaacctccgcctcccaggttcaagcgactctcctgcctcgacctcccctggtattacaggcgtgtgtgaccatgcctggctaatttttaaaatatttttagtagagatggggtttcaccatgttggccaggctggtgtcgaactcctgacctcagatgatccacctgcttcagcctcccaaagtgctgggactacaggagtaagccaccatgcccggccagatctttcttataatgtaagcttcaagtcgaggagagaactaaatggaatttcccaacatgaaggtggaaggaagagacaggttccaatgccaggtttagaagtgtcttctgagatgttaactgaattttgcggcagactgttggtgcatcctctgtatcagggagtctgcaaactatagccaaacccagtacgcggtctgcttttrtaaatacagttttgttggagacaactgtgcttgtttgttgttgtattgtctatggctgatttcatgctaccacaagagagctgagtagttacagcagaggctgtgtggcctacaatctggccctttacagaaaaggtttgccaacctctgccctatatctccttggcccacctaaaggttatctgtaggcagtttccatgcatgccaaaggccattctatcactctgcccagctgcagaaaagccccagacctcgtgtggagcaggccacaggtgatagggcatcagtgccctagggccaccctctcctgaggagaaatgggatggagagctggtagacggatagctcagcttcctcacctcctgcttgggacaatttgaagatgttccacccgctctcttgaagggtccccagtgggatggagccccagctgctcacagtggtggccacctcattaatgccccctgcgtggacacatccattccccatctcatgcctcctctttctccagtcaggagacagaaaccataccagtggttttaacagagagaatttaatacaaagtaccatacaattagtataatgaattgttacctagttaattcaaaaagcaaaagaaaacacaagaatcacatggaccaaaaagtccaacatttgtgggagtggggggctcacrcaatgaagatgccctcctggctcgggcaggatcctaaggcatccgtggcaccccagcctgccttacccacccacagtgcccggaagtggagcacaagtgcacgtgttaggacctgaaagatggggagttaagacctggcagagtgaagccagaggaagctcaggtggaggtctgtagtggtcccaatgtgcaaatcagtcatctgacttgggtacaggtgcatgaggccaaaagattagagaaaccacccagcagctggttcatgccaagatttccctcaggaccactggcactctctcaaggaaacccatgcagattttttcttgtaaaaccaacgcttacagtctttagggagaagcccagcgggtggtatggsgctggttatggaatacaagtgcctagtgggccacttcttgtcagcagaccttcaagaagcagctagctaccacctaagaggagaggttggaattaatacaacttggaagtctcagaggtgggagtgtgctgggacccagaccaaggaggggcatcagcaggctagtgcaggtrtctctgcagagactgcgatgaggctggtcctgcaaatgctgggaaaatggagaactggactcagctgctgctacaggaaggaactgccactgccagggtgaagaagctgtctcagtccatttgggctgctgtaacagaatgtcatagactgggtaccttataaacaacacaaatttatttctcactcttctggaggctgggggatcyaagatcaaggtgccagcaaattcagygtctggcaaaggcccacttcctggttcatagatggcacctcctcactccgaactcacatgctagaagggatgagggggtctctaaggtctctttcataagggcactaatctggttcatgagggctctgccctatgacctaatcacctcccaaaggccccacttcctaataccttcaccttggggtaaggccttcaacatatgaatttgcaagggacataaacattcagaccacagaaggattgctggggtggtgtggacaagagcagaaagcaaacaaaagccagcgagtgccttctycctcctccagactttcagycttcccccagctcccctctaacagcacctcccagggagcagctggctaagcaggacctggctgcagagtcccagccccagcatcactgggtagagaggggcaggtttgaagcaagagacaggagcttactatccttcctgcgacaccaccctaacaaaccgcctgcacccaagacctttctccgggtctgctttgggggacaacccaacttcatccaaacctccttatctgttgatacctaaccttattacttagcagttatctttggggttacaagcaaagaaaaccaactctaactagcgraaacaagtaagcagtatgtcaaaaacatgtggtgtagccctcaggcctgaagaaccagccaacaccatcctagaaaaaagacagtgattggagcaaggctggggacccggaaacacagcaaggattggcaggcaacc

SEQ ID NO: 10032 - DNA, 32581 bp, Homo sapiens
aaataaaattttaaaaataaaataaaaacaggatatttgcaggaggtaatgttggaaagggaagttagggcatattatgaaggatctttgagaaggaactgatgagaagaaagacaaagtatttgtgattttgtgatattgtaaagggaataatatttcttcaacccaagcattccttgaaaggaaataactccattctatgaatactttggggaaaaaaaagatgcaaaatataattcacacacaggtatggcctgaaaactaagttatatagttaggtttgaatcctctttaccaccatcatctctaccaccacaaagaaaatccttaagagatccctgcagtaagaggtagctttgctcagattaaaagaaaagatggtatcagaggtcacagccaaacactaccttccatttcacaggctaatgaaatggataagggaagatggtattgataaattatttttttcgcttttgggaatcactttcttaaataaaagaatgtgggaagtgagggaagaaaaaggggaaatttcttcattgtcctttgcaatgctctgcagggggaaggtaaacccagtcccattgctctgcccatttacttaatgtgaacaaataataattagaaaaatatttattgtgggcctcctctgtggcccagacatagtaataaatgcagacttcttccccatctcaacctttttagatattattttactcagtgcctttttaaaggttattttactccatgcctttgcagacaaaccagctgttcaggctgaggtgaccctatggctgctggtatgcattatgatcatagtatttcccccaaaagccaaggataagcctctgacacagcacttctgtaatccaacacgcctctctctgggtaagaatgctttacaggcagaactgagtgcagggaaggaatctgagctgtatgcagctcccttggatattttggtggataaaaccatgcaatccagcagagcagggctggagttctgccaaatgagctcagacccccagaaaaactaatgacattcatcaggctagaagagaaggcccagcatcttttctktatgaattgccagagctgccttaaatcttatggagactttaagcattgaaagaattatgatgttcttctctcctatgaacacctaattcaagatgagtgcaactaattgcaagtaaagctctgatttttcatggggacaactttaatactttaaatgccaaatatgaaattatttccagaaaaacttagagatgcccttcccactttgttaagagtgtgcttaatttacctattggataatttatcactatacattatgaaggcctgggggttgagaattccctaactggtttaaacttagccgatacttttcaaaccatttgagatttatactatcttttgccttgtgctgactccagtgcataaccaaggaaasagcctataatagtgccttcctcttgcacctcttctaacctcctctttcagtggtggatccttagacaccttcgacaattcaagggtccttcatcacagttcaaaagcattggtgtgccactatatctgccaattttgcttgacaagactgtggaagaagctacagaattggagagctcccaaaagatcatacttggtcattccagggggtcaatagttaaatgaaacaaaacaggaggctccatagccatcaaacactactacctgtgtctgacaatcatgcatatcacaggtccctaataatccccttgaggcaggagaatagtgtctggagacagggagccttcacttcagcctctgattggtgggagccaagtcttcatttgcaaagggtgtaacttcacttcagcctctaattggtcacaggccaagccaccacttcagcctccaataggtcgcaggccaagtcttcatttacataggatgtaattaataggaaacctctaaagggtacttaaacccaagaagatttgtgcaactggggcccttgagccacttactcgagcccactcccactctgtggaatgtactttcacttcaataaatctatgctttcatcttccattggtttgtttgtgcattttgtccaattctcttttttttttttgagatggagtctcactctgtcacccagcctggagtacagtggcacaatctccactcactgcaacctccacttcctgggttcaagcaattctcctgcctcagcctcccgagtagctgggattacaggcacccaccaacacgcccagctaatttttgcatttttagtagagatggggtttcaccatgttggccaggctggtctcgaactcctgacctcaggtgatccacccacctcagcctcccaaagtgttgggattacaggcgtgagccactgcgcccagctagtccaattctttgttcaatatgccaagaacctggacaactcgtagtcaagaccctccactggtaacacccttggaagggcctttgaattgcatcgttttactaccaggcttctgccatagcacacttcctaaattcaatatagatttttaaatactttataattcatatatgtatttaattttttatttagctttctaagtcttatacatatgtatcagagcattttctgtctttgcttataaaattctgggacacagatgctaatgctccacagttttcttttttcttttttttttttctgtttgagataagaggcttgctctgttgcccaagctagagcgcagtggcgagatctcggctcactgcctcctgggctcaattgatcctyccatctcagcctcctgagtagctgggactacaggcacacaccaccacacccggctaatttttgtattttttgtaaagatggggttycattatgtaccccaggctggtcttgaacttctgggctcaagcaatccacccgcctcagtctcccaaacagctgggattacagatgtgagccaccactcctgtccagttttctttatagagcactttggacaagtgctatgtgcaatttaacacttaaacatattttctgggccgggcacggtggcccatgcctgtaatttcagcactttgggaggccgaggtaggtggatcatgaggtcaggagtttgagaccagtatggccaacatggtgaaaccccgtctctactaaaactacaaaaattagctgggcatggtggcgcrcgcctgtagtcccagctactcaggaggctaaggcagaagaatcgcttgaacccgggaggcagaggttgcagtgaaccaagatcacgccactgcactccaacctgggcaagagagcaagactccgtctcaaaaaaaaaatttctgggctgggaacagtggctcacgcttgtaatcccagtcctttgggaggccaaggcaagaggactgcttgaggccaggagtttgggaccaacctgtgcaacacacaaagaccctgtctctgtgagaccctgtctcaaataatcctagctactccagaggctgaggtgcaaggatcacttgagcccagagtttgaggttacagtgagctacaatcatgccactatataccagccttgctgacacagcaagactctgtctctaaatatatatacgtatattttgacaatataatcatactggaatcatcacccagtggaatggctggaatactgttaaccaaggaaagaggaggataattaacagacacctatagccaatctttctgtgacattgtcagmctttggcagtgagcctgcaaaatactcatccagcacacataagcaattttagtactatcataatctacatttgcactgtaattaataaaacccaattttagcagggcctgagatcacaaggctgagtttctgcccctaccatctaatcagtgtgtgatccttccctataccattcagatctattgtctagtctctttgtgagacttgatgaaagcagaatctttggttaactactgctgacctttatactgagaccctgtgctagttagcggcctcatctctgcagttgctatggaaactgtccctttctccccacaacctattctggctctctgcctccacatggtactcttactgattgcagaagaggaggcctgtaaatctctccaagctcttttccagattcagatccacaaacggggggggggggggcagaggtacagcggaacaccgtctcatgtgtcatagtcatgaractagagggtgaggcatccccagcatctgacattctgccagtactcttattttcccctttctgtgcaaaaaggattttcagggccatgtccaaattggttgcagagtggactggctgttttcctgtaacacatgctccatggtagggaccaggattgctgtaaagttttttgttttgttttgaaacagagtctcactctgtcactcaggctggagtgcagtggtgcaatcctggcttactgcaaccttcgcctcccgggttcaagtggttctcctgcctcagcctcccgagtagctgggattataggcgcccaacaccacgcccagctaatttttgtatttttaatagaggcagggtttctccatgttggccaggctggtcttgaactcctgacctcaagtgaaccacccactttggcctcccaaactgctgggattacaggcgtgggccactgtgcccggccgctgtgaagtatttaacatgcagacactgcccaatcagaacgtggctcacaggcagccttgctgaatctgatactgtgttcctttctttcctgtactatctccaaagcaaaggcaaaygggacaaaaaaaaacccaaaaacccaaaaaacaaaacaaaacaaaaaaacaaaaaaacaagtgctgctggagccctagggtgaaagataggcgctcccatacatacatgtacagaatgattcggtatcctgggtaaaagactactctggagtgtggagtaggtggagacacactgaggaatgggggaggctagactaacagcacttttttacaaagatgttccagtcagtcataaaacagtgcaaggcctcctcagtcctttcccaacctctggttttgatcttagaactgtcaaccccttctttggtgcaaacactgctccttctgttttaagaactcccggggggtgggagggggggaagtaatacaacagtctcctgagggagacccatctcactgtcacatcacttgaagatgggaaggtctttcctaggttttactcaaatcccccttgctgcagtctgagctcattgcactcgagtcctgcactcagcagagatggaaactagccagccaactgctatcttcagaataacaactcaccagggactcaaggccggaaggtcattctgtcccctccaatactgcgcagccttccagagcactcccagggcccggggcaaggacagggaaaccgaggatggagacctcgggcaggacccaggcaggcagtgacaaaaaacaaaaaaaaaaaaaaacacgccaaacaacgataatacagacacacagacacagatggaggcaacgatacaaactcggaggcagagagggacaagatggctcccctcagttcgggcgaggctgcggaattgccagacagtacttatcagggatacatcttaactagaagcttcttccggcgccgaggcaaccgcctcgccccaccaatgggtcccccagagaccccacccccgctcaagtctaagtggaagctcccgctggtactggggagggcgtggtgggaggaagggggcggccaccaccctctagcctggcgagaccgcagagcacgagcttccagctccggcccgcccctgcggcgcctgtgccacgccccctgacaggcagcagccaatgaactgcacctgccgccggcctttaagagccgcgcgcactctgcctgcagcggaagctgccggactaacactccgcgggtgtttccatggagaccgaggccgagcctgcgcggcctcacggcgttgccatggagacaactccggggctggggctccgaagtcccggcgcaccgctggctcagaaccccgcggagctgctgtgcgaggccggagccgcggtggcggctgcacgctgggacctgcagaagcactctttgctaattgtgatcggcgatatcggtacagagagtcagctgagggccgtgcgggcccaccttgaacaaggtgagccactgttctggctgtgcttcaggcatctctaccctgtgcttctccgccttctgcattcaactaccaatgcatacgtctgcatctccatccctagtgtgcacttcctgagatctgcgcccttgtcacctgcatcttccatgccatgtgtccgtatcctctcgctctactaacatctcgcttgcccatccttmctgcacactccatggcgttccgcagtctccctgaggcagcggagctctatgcagcccctggggcccctctggtcacaccctccaccgcagtgttttggaccaggtgtcctgaaagtcctcaccatccctggagaatccacgtccctatcttgctgtatcttctttatggtccctgaaccagcacggggagctttctgaacgccccgtayaaatctcaaatctctgaatgccagtagccaaccactaagtgaccttcgtggctaccagctcctaagtcctcacctccttccccagtgctgtgcctgtggctgtggtgcagtgctgcggagccacctgcgggtggaagcaagctgtggagggctggggacaaggaagggaacacagaaggcgaacctagaatcctacttagctgtaaatgtggggaaggtagccctcagtatctgggaataggcccttaggtgtcacttccaccacaactggggaaccttacaagaaaattcctacctatagactcattaatgaccgagtttagtctaaactctgtccttctccctctggctcaggcaaagcctagaaaagctgtaaactgggagaaagacaccattactagccacctttctttgagacatcactgaggctgatcatggcaactatccatataccctccctctccttacctgttctgtgaacttgaaagtgttcctgcagtctcaccaccctacaacmtgcaaccttatccagaaccttctttgtttttctcccacagggattctctcctggaacattgacctgtcatcctttgacttgaaccaacagttgagactcttcattacccggcacctagctcacttctcctcagaggtcaaaggttaggactaatgttttatttcagtcctttgggtaagagctggtcacagaggtccagtctccctgggagaagtggccttgcgggaggtttgagtggaggagaagggaggaactttatagaggaggaaaatcatggaattccatagctgtccccacataccaaatatactttgcagacatggtttgatactggagggagactggagaacataacttctccttgagaagagggttgtttgtggatagctgttgacatgcactaaagaaatgagggactcctcttagtgatcaatcatctctcacgcaaaaattcactstcttcatttgtgttcccctttctgcataccccgggtctccctgcttccctttacagacaccccagaatcccccattcatcttccttgacccttgtttagcatttttatttaggctgcacaggtttcagggtttctggttcctgcttcggcttagccaacagatctccagggcagagcagaatcttggtacttacatgatgatgggcaccatcaaatccagagtggaaggaggggctcctgaatttactgctacaagatcaagttgtactctgagatttggcccagatcaaagctcacataatgcagtttcccattctgctgggtgggaggaatgggtgggttagagatttgagaaaataagatgttaggcactaccattccatgacagatgtctgtgaggtgactacggaaagctctacatgctattataaaagaactaaggccgggcacagtgctcacacctgtaatcccaacactttgggaggctgaggcggggagatcacctgaggtcgggagttcgaggccagcctgaccaacggagaaaccccgcctctactaaaaaatacaaaactagctgggcgtggtggtgcatgcctgtaatcccagctactcaggaggctgaggcaggagaatcgcttgaacccgggaggcagaggttgcagtgagccaagatcgtgccattgcactccagcctgggcaacaaaagtgaaactccatctcaggaaaaaaaaaaaaagaaaaaggagctaggcatctagtcatgttactggaaaatgttgacacaccaatccatcagcttagtggaatataaaatccatccaggtcaacagccactgcaactgaatgattgaattcatgtcttatacagataattctcaattactcagtatagtagtcacctttccttaattatctctcctccttttccactgctcctaactgccaaatctttgatcacttcctgatcactgatacttatagatgctgctaggaagttggagaaaataaggctaatatgactaaagctccattagcctaggaatatatacagcaattttatattaatatatgtgaggctgacatcttcctgatgtgactggcttcctgtaaagcaggctactcactcttttgagaatgtttctgtttagaattactcatgtcatggcttcctccatttatcccyaatgatgaaaatcggcagttttaccacttagtactcctaggagctttggtgaaaggccagatacagggatgacagaggatgaaattaatgactgaacagaagtttggggattatctgctgatgttaataattcacactgaatgctctaaccttgtccttttggctacagagacttgagagtaggctgctttctggaataatgtaagaaatgaaaagaagttaaaccaaagtacttagccattcttcagattaagatgcagcgatacttgggaagacacttacagagagaacatagttattctcaggcacttcttagaaatgagcattgatatataaacacctactaggccctttccatcaaagagtttgtctgtggtgtcctcaaggagcttagggccatgtaccctagatcagagcttactttggcatactgcatatttttaggtttggacatttttatcatggtctgtctatgtcacaggagaatagtagagaatttcctggaaaaacccacacagctcaagacagccacagccccacccctgctggctcctctttcagctgtccccacaaacaacagtcagcccagagcagctgcagacactgcccctccctccagccttctgttagtgaggacgcaaaggggaccaggcagctgggatgagctcaaggggatatgctagtgccttatggcttgactaccccacaggctgggccaccattcctatcacctatcctcaagccctgggccaaaatgctgagaaagcagacaaaaatgtatcctacagtgacaaggagagtgcacttattcctaggcactgccccctccacattgacatacccacacacagaaaagaagggaccctctgataaagagtcagtggcccagctccttctagtggtcaagtctggtaaaagctttcaaaggtgatttttgcaccaggtagtctctccagtggtgactttctaacccctacaaaaaatctggatcttccgagcrttctaatacaaattcagaaacaattaggacagtggaaaactgagtttcaataactctctgattcttttactattggatacctataggaaatagaagggggcttataattcataactaatattctaagactctaaaaaacacagggccgggcatggtggcttatgcctgtaatcccagcactttgggaggccgaggtgggtggatcacttgaggttaggagtttgagaccagcctggacaacatgttgaaaccctcttctactaaaaatacaaaaattagccgagggtggtggtgcacacctgtaatcccagctactcgggaggcaggagaattgcttgaacccaggagacagaggttgcagtgagctgagatcatgacattgcagtccagcctgggcgacagagctagactccatctcaataaataaataaataaaaatacaggctgagggaccagtctggaggccttcggtctgactctccatttccactgacggacttaggaagtgatagctctattacttctaccaatacaacagttaccctgaattaatacagcagctcattaacccctggaaccggggtctgcattgctgtctgaaatgggaaagcaaggacatgaataggacttcaaatctcatactgcaggcatctttagttctgggtttacctgggagctaagagtactccagagttgatctggtctgagatcctgatttatgatttccttgatcacctagatgacctctcagaaatcttccacaaaagggagaaagacttccagtggcatttgtacattgcagatttggaagtctaggaatgaagaagcttttttttcatcttttatacaattcaaacctcacagcattatcggaggatggtactaatattatactcatttcatagtttatgaagtaggctctgagagaggttaagtctcttgtttagcagcatgattagtaaaatggtggatcaagtctcaaatccagggtttcatatcttactttgtagctcagctcaagcctctctttcttctttggcatctcaccatttcattgcagcagagcctaggaatacagcaggtggagagttggttgtggtgggtagctgttcagagggtgaaggctgaaggaaaactccactgtgagttggcaccatgcccagggtgtggcccttgggggtggcagctgagaatatgggtgggctctgtattggtctgggaaatgttattttgttcgtaaactaaatgtctacttaagtttccctcctaacacactccagaaagccctagaaagcagggaggagatagaaggcttgaggtgggaggaaataagaacgatgaagttgcagaagaggggtatttcccttttgtgatgctcagaactcagcctggttttccctgtgtatctctgcagatggccgcttctacccaaacggggttgttgccattgtcgcagatttgcatccccggatctaagcaaggattgctccccttttgtcccctcaacccccaagagtactagtgactcagctcctcctctcctctggctgcaattaaggggggatgggggatgctgagagcacagactattttggcttctctgaccttcaaaagtaactcttggcagcctggggcaagggtggggctagtgtttgggtgtgagtgggtggctgtgattgtgaggaaggccttaggagctggccaaactggggagggtggatgggaagagggcagggaaggactatgtaagagcatgagcatcctcgggttggaaggaagtgctaccactctccagattcttcctttgagtcctagagcgctttactaaatctgagatggaggtagagactaagggaaacaggatcaacattasaaagatccaaataatataatatagaaacagcaaagagacaaggagagagcaagaacccaatcaccctacaaagtcattatagggtttttttaatctaaagagtacttctgttacatttaataattggcctacaaccttgcttgggccggaggccctggtgatccttcttggtccttgttaactccttcactgtaaggcagaaagctccctgtcccttcagggacttgtctcttcatatccaatgactcaagaatcccaagaatcagtgcctgtgtggttactgtgttatgctgcattcccatgaaacttcatgtagctctcagggtccctgtgccccaccccaacaggctagggaccatgtgtccactccggaatttcaaactaccctctaaccctaaaataagacttatttctgccctccttggtttctgtagtgctgaggttcagaagaaggcagcacatctctgcatccccaacctttgtcttaagcagttccccacacctaccccatgcttttgggcccccagcctttgtctcctgctcctccagggactgaaggtcactccctggatccatctgaggagagaggcagcagatggtttctaagagaagggggagagcccacgcagcccatgcctcctatagcctcgctctgtgccctagcatggggctttggtcttttggctgatgccaaaagaatatttcctaactaagcagggttgggagagaaaggtcctatgggccataggacattgcagaggctccttgagctgctagacaatccctcagccccacagagccaagcaaaagcactggagctcagacgtcgtgaaggcaaagaaacagttaagtctccagtgcctcgtcacggaccagcccctcttccccgccctggcgccgccctcctcatcaagcacccccctcccccccccaccgcccgccccactcccaccctaagtgctgcagactcttccctgaagctgccggctgaggccggagctgccgcctccatgagaggcttcctcctacaccccagggtaagaaccgaaccaaagggcttggcatgtgggggtacactgtgatagggaggtgggatgggggtcatggaaagggtgctggtacctaatctggcacatctagaactagcccagtggcagtaggcaggatggggaaatggagagagaagatgaacgttactggctgtgggcccagcctggacccagaaccagasgccaccaggggctgtgacagtccacctctccagctgggcggggatgggagaaatcagcctgggacagcagcagagggtggtgccactggctctgcctgacagcccaggatgctggaggagtttgggggctatgtttctggtcagaggcagaagaatctgagagaaagggggatgttatgggaatgtgcctaataggagggcccctgggtgtcagctgctggattgctcagctgctcctatgctgggggtgagcagggcagtgagtttttgccaagtaagggaaggtgggggacactatggaaaagaagggaggaaagggtcactaagacstggcacgcgcctccttacagaccaaccggtttgcagtgggctcccccaccctattccctgcggctagctttagaatgggactctaaacccccctttctggccctgccgaggccactctggagacggagaactccctccccagcggctgccctgcatttccagtcgtgtcaaccccacaggttcccagtctcagccctacccccacctcatctctgcttctcttcccaagatgggggctcttgaacagaggagccagtttcttctctctctctgcatccccccatccccaccccccatgcagaagcagccaagaaaatgacttgtcatgctggggtggggggtgggggcggagctggagccggagctcagcgcgcacactcacacactgcggcaaactgcagctgcccaaacggtccccctccccttctgcctcactgcggagacacctgccctcctgcctgctcagcctctgcaccgcagcccacccccccccgcaactccagcactggctgagcactgtgtgtccctgcctcacaagatggtcctctctaaagaaaaaggaaaaaacgagtcagttcccttcagtgagagagccaggggagcagaagaaacggctttctcccaggcctgaaaaagagaggcacaggatataaaccatgtaatttcaagtcagaaccactcccagggatagagtgaggaacaggaccttatgccaggacaggaactgggatcatagaagtcttgtggtgataaatggggaccgtgaggaatggttgggggcagggaggggtagatagaaagcaaatcagtgtgtgctatagatatttgtctttctgaccctcctacctcaaatttatgaccttatttgtgtggagggagctcttgtctttctaaatctgaacgacttaaggctggcagcttcccgaaccttgatatccctcacctgccccaagccctgcccttgcctacatctgaggtggctcttgtcctctgaatttatctcaaatgttccctcaattctcaagtaaatagaagggaacccttgaattcccctttggcccaacccacgctgtatggggtttggtcttctgacaccatcgttcatttcccccayagctgcatctgcagccctgtgctgccagatctgcctgatcctggcaccatggctctgcctcttaacaaaggccctggccccaggcttctcttgtccaagcaccagaaagaagagagagctgggtcacagaagagggtctaagggacaaattatggaccctcccaccagtatcctccagacagcccactgccatctgttggatgctctgtgaggttaatgccactatgtactgcaattggaaaggggatttggcaaggaagggcgggtgcaggggatggcagcattcttcttcagcatcttctgtctsatttgccactttctttctttgctgaattgtttggtgtttcatgtgaggctggagaagggaaataggggatttggggatgccttatctttctccatggcctggggaacaccctgaatctctccttccttattaatgtgtttcttgttcaagaacctttcactccccatgcccgtggtagaggcccctaggagcggggcaaagatgagagaagaaactgttcacaatgaataggttgtggggtagtgaatctggcctctctgaaactttgggacatgaagatcaggttggagagggtgttgtgaaaacttccgagcaggaacaatatgattgtgtgcatgtgtattagtgcgggcttggcctctgaggaaccagaggacagaaaatgaagttatagtcctatgtccattctttgaatcataaaaccccaaaaatttagatagcacaggcttctccgggtcttctggaacaggaattctggccttggatggcaagaagggtggggagtctgtaccacacagaagctcctatttccttatttctagacactctgcgggcaggaaagcccagggcagaggcaagccaggaaggagaaagggaagtgagggtcatcatcscaggggccctctctccagctgagccccccatccccaggcagcaccaggagcttagtgctcgagaaggacaaaagcttcttgtcaatagggcagtctgaggccatagttccaggcagagggatrggggcacaggcagcasagggtgtggtagatgaagggaaggagaggacagccagtgtggragaggggaggtggaaaccctctaagggaagggctggatgagccagttcctagaccttactcagcagtatccaaggtggcagggcctaaggataccttctctttcgtctaagccccatttcctgatagcacattctttcctctcctgcaccacaatttctatacctattctcaatataaattcctacatctctccctcaggccagaggaccctttgccaccagagtgagatcctagagaccatcatcctggtaaatcccagtgcagacagcatcagctctgaggtaaggccagggcctgtgccttgccaaacaggcctggtgcaagtgctatacccacccttgccagtgctaccactattaggccaagaattcctctctctgccatctaagctgacgtattgtctccagcccactctggaggtgttatgagggacataagttgggagcatgttcttgaggtactgaggggccattcattgccttkccctggatttcctatatctgtgaccactccccttcttccattccaggtwcatcatcttctkagcagctcatcagcttataaactactaatcttgagtgggcaaagtttagagcctgggggagacctcatcctacagagtggcacctactcatatgaaaacttkgcccaggtccttcacaaccccgaggtaagttccatgccagagtgtctgggagaaagggtagcactagagctgtgggagggatctaagggaaagtctcataytgcatgaccatggggggccctggcagaaaggtaagagtscaccttggaaagaggtgaagattagggtactgaatctaagtcagaccaaaacaactctagtgacctgatcaggtttctatctcctattcttctagatttcccaattgctcagcaatagagaccctgggatacaggccttccttaccgtgtcctgcttaggggaaggtgattggagccacctgggattatccagttcccaagagaccctgcacctccggctaaaccctgagcccactctgcccaccatggacggcgtggctgagttctccgagtatgtctctgagactgtggacgtgccatccccatttgacctactagagccccccacctcagggggcttcctcaagctctccaagccttgttgctacatcttcccaggtggtcgtggggactctgccctctttgctgtcaatggtttcaacatcctggtggatggtggctctgatcgcaagtcctgtttktggaagctggtacggcacttggaccgcattgactcggtgctactcacacacattggggcagacaacctgccaggcatcaatggactactgcagcgcaaagtggcagagctagaggaggagcagtcccagggctctagcagttacagcgactgggtgaagaaccttatctctcctgagcttggagttgtctttttcaacgtgcctgagaagctgcggcttcctgatgcctcccggaaagccaagcgtagcattgaggaggcctgcctcactctgcagcacttaaaccgcctgggcatccaggctgagcctctatatcgtgtggtcagcaataccattgagccactgaccctcttccacaaaatgggtgtgggccggctggacatgtatgtcctcaaccctgtcaaggacagcaaggagatgcagttcctcatgcaaaagtgggcaggcaatagtaaagccaagacaggcatcgtgctgcccaatgggaaggaggctgagatctccgtgccctaccttacctctatcactgctctggtggtctggctaccagccaatcccactgagaagattgtgcgtgtgctttttccaggaaatgctccccaaaacaagatcttggagggcctagaaaagcttcggcatctggacttcctgcgttaccctgtggccacgcagaaggacctggcttctggggctgtgcctaccaacctcaagcccagcaaaatcaaacagcgggctgatagcaaggagagcctcaaagccactaccaagacggccgtgagcaagttgkccamacgggaggaggtggtagaagagggagccaaggaggcacgttcagagctgkccaaggagttakccaagacagagaagaaggcamaagagtcatctgagaagcccccagagaagcctgccaagcctgagagggtgaagacagagtcaagtgaggcactgaaggcagagaagcgaaagctgatcaaagacaaggtagggaaaaagcaccttaaagaaaagatatcaaagctggaagaaaaaaaagacaaggagaaaaaagagatcaaaaaggagaggaaagagctcargaaggatgaaggaaggaaggaggagaagaaggatgccaagaaggaggagaagaggaaagataccaaacctgagctcaagaagatttccaagccagacctaaagccctttactcctgaggtacgtaagaccctctataaagccaaggtccctggaagagtcmaaatagacaggagccgtgctatccgtggggagaaggagctgtcttctgagccccagacacccccagcccagaagggaactgtaccactcccaaccatcagtgggcacagggagctggtcctatcctcaccagaggacctcacacaggactttgaggagatgaagcgtgaggagagggctttgctggctgaacaaagggacacaggactaggagataagccattccctctagacactgcagaggagggacccccaagtacagctatccagggaacaccaccctctgttccagggctgggacaagaagaacatgtgatgaaggagaaagagcttgtcccagaggtccctgaggaacaaggcagcaaggacagaggcctagactctggggctgaaacagaggaagagaaagatacctgggaggaaaagaagcagagggaagcagagaggctcccagacagaacagaagccagagaggaaagtgaacctgaagtaaaggaggatgtgatagaaaaggctgagttagaagaaatggaggaggtacacccttcagatgaggaggaagaggacgcgacaaaagctgagggtttttaccaaaaacatatgcaggaacccttgaaggtaactccaaggagccgggaggcttttgggggtcgggaattgggactccagggcaaggcccctgagaaggagacctcgttattcctaagcagcctgaccacacctgcaggagccactgagcatgtctcttacatccaggatgagacaatccctggctactcagagactgagcagaccatctcagatgaggagatccatgatgagccggaggagcgcccagctccacccagatttcatacaagtacatatgacctgccygggcctgaaggtgctggcccattcgaagccagccaacctgccgatagtgctgttcctgctacctctggcaaagtctatggaacgccagagactgaactcacctaccccactaacatagtggctgcccctttggctgaagaggaacatgtgtcctcggccrcttcaatcactgagtgtgacaaactttcttcctttgccacatcagtggctgaggaccaatctgtggcctcacttacagctccccagacagaggagacaggcaagagctccctgctgcttgacacagtcacaagcatcccttcctcccgtactgaagctacgcagggcttggactatgtgccatcagctggtaccatctcacccacctcctcactggaagaagacaagggcttcaaatcaccaccmtgtgaggacttctctgtgactggggagtcagagaagagaggagagatcatagggaaaggcttgtctggagagagagctgtggaagaggaagaggaggagacagcaaacgtagagatgtctgagaaactttgcagtcaatatggaactccagtgtttagtgcccctgggcatgccctacatccaggagaaccagcccttggagaagcagaggagcggtgccttagcccagatgacagcacagtgaagatggcttctcctccaccatctggcccacccagtgccacccacacaccctttcatcagtccccagtggaagaaaagtctgagccccaagacttymmggaggcagactcctggggagacactaagcgcacaccaggtgtgggcaaagaagatgctgctgaggagacagtcaagccagggcctgaagagggcacactagagaaggaagagaaagttcctcctcccaggagcccccaggcccaggaagcacctgtcarcattgatgagggrcttacaggctgtaccattcaactgttgccagcacaggataaagcaatagtctttgagaytatggaggcaggagagcccacaggcccaattctgggagcagaagcccttcccggaggtttgaggactttaccccaagaacctggcaaacctcagaaagatgaggtgctcagatatcctgaccgaagcctctctcctgaagatgcagaatccctctctgtcctcagcgtgccctccccagacactgccaaccaagagcctacccccaagtctycctgtggcctgacagaacagtacctacacaaagaccrktggccagaggtatctccagaagacacccagtcactttctctgtcagaagagagtcccagcaaggagacctccctggatgtctcttctaagcagctctctccagaaagccttggcaccctccagtttggggaactaaaccttgggaaggaagaaatggggcatctgatgcaggccgagrayacctctcaccacacagctcccatgtctgttccagagccccatgcagccacagcgtcacctcccacagatgggacaactcgatactctgcacagacagacatcacagatgacagccttgacaggaagtcacctgccagctcattctctcactctacaccttcaggaaatgggaagtacttacctggggcgatcacaagccctgatgaacacattctgacacctgatagctccttctccaagagtcctgagtctttgmcaggccctgccttggaggacattgccataaagtgggaagataaagttccagggttgaaagacagaacctcagaacagaagaaggaacctgagccaaaggatgaagttttacagcagaaagacaaaactctggagcacaaggaggtggtagagccgaaggatacagccatctatcagaaagatgaggctctgcatgtaaagaatgaggctgtgaaacagcaggataaggctttagaacaaaagggcagagacttagagcaaaaagacacagccctagaacagaaggacaaggccctggaaccaaaagacaaagacttagaagaaaaagacaaggccctggaacagaaggataagattccagaagagaaagacaaagccttagaacaaaagratacagccctggaacagaaggacaagrccctggaaccaaaagataaagacttggaacaaaaggacagggtcctagaacagaaggagaagatcccagaagagaaagacaaagccttagatcaaaaagtcagaagtgttgaacataaggctccggaggacacggtcgctgaaatgaaggacagagacctagaacagacagacaaagcccctgaacagaaacaccaggcccaggaacaaaaggataaagtctcagaaaagaaggatcaggccttagaacamaaatactgggctttgggacagaaggatgaagccctggaacaaaacattcaggctctggaagagaaccaccaaactcaggagcaggagagcctagtgcaggaggataaaaccaggaaaccaaagatgctagaggaaaaatccccagaaaaggtcaasgccatggaagagaagttagaagctcttctggagaagaccaaagctstgggcctggaagagagcytagtgcaggagggcagggccagagagcaggaagaaaagtactggagggggcaggatgtggtccaggagtgkcaagaaacatctcctaccagagaggagccggctggagaacagaaagagcttrccccggcatgggaggacacatctcctgagcaggmcaatmggtattggaggggcagagaggatgtgbccttggaacaggacacatactggagggagctaagctgtgagcggaaggtctggttccctcacgagctggatgkccagggggcccgcccacactacactgargaacgggaaagcactttcctagakgagggcccagatgatgagcaagaagtacccctgcgggaacacgcaacccggagcccctgggcctcagacttcaaggatttccaggaatcctcaccacagaaggggctagaggtggagcgctggcttgctgaatcaccagttgggttgccaccagaggaagaggacaaactgacccgctctccctttgagatcatctcccctccagcttccccacctgagatggttggacaaagggttccttcagccccaggacaagagagtcctatcccagaccctaagctcatgscacacatgaagaatgaacccactactccctcatggctggctgacatcccaccctgggtgcccaaggacagacccctcccccctgcacccctctccccagctcctggtccccccacacctgccccggmatcccatactcctgcacccttctcttggggcacasccgagtatgacagtgtggtggctgcagtrcaggagggggcagctgagttggaaggtgggccatactcccccctggggaaggactaccgcaaggytgaaggggaaagggaagaagaaggtagggctgaggctcctgacaaaagctcacacagctcaaaggtaccagaggccagsaaaagccatgccaccacggagcctgagcagactgagccggagcagagagagcccacaccctatcctgatgagagaagctttcagtatgcagacatctatgagcagatgatgcttactgggcttggccctgcatgccccactagagagcctccacttggagcagctggggattggcccccatgcctctcaaccaaggaggcagctgccggccgaaacacatctgcagagaaggagctttcatctcctatctcacccaagagcctccagtctgacactccaaccttcagctatgcagccctggcaggacccactgtacccccaaggmcagagccagggccaagtatggagcccagmctcaccccacctgcagttcccccccgtgctcctatcctgagcaaaggcccaagcccccctcttaatggtaacatcctgagctgcagcccagataggaggtccccatcccccaaggaatcaggccggagtcactgggatgacagcactagtgactcagaactggagaagggggctcgggaacagscmgaaaaagaggcccaatccccaagtcctcctcaccccattcctatggggtcccccacattatggccagaaactgaggcacatgttagccctcccttggactcacacctggggcctgcccgacccagtctggacttccctgcttcagcctttggcttctcctcattgcagccagctcccccacagmtgccctctccagctgaaccccgctcggcaccctgtggctcccttgccttctctggggatcgagctctggctctggctccaggaccccccaccagaacccggyatgatgaatacctggaagtgaccaaggcccccagcctggattcctcactgccccagctcccatcacccagttctcctggggcccctctcctctccaatctgccacgacctgcctcaccagccctgtctgagggctcctcctctgaggctaccacgcctgtgatttcaagtgtggcrgagcgcttctctccaagccttgaggctgcagaacaggagtctggagagctggacccaggaatggaaccagctgcccacagcctctgggacctcactcctctgagcccagcacccccagcttcactggacttggccctagctccagctccaagcctgcctggagwcatgggtgatggcatcctgccgtgccacctggagtgctcagaggcagccacggagaagccaagccycttccaggttccctctgaggattgtgcagccaatggcccaactgaaaccagccctaaccccccaggccctgccccagccaaggctgaaaatgaagaggctgcggcttgccctgcctgggaacgtggggcctggcctgaaggagctgagaggagctcccggcctgacayattgctctcccctgagcagccagtgtgtcctgcagggggctccgggggcccacccagcagtgcctctcctgaggtcgaagctgggccccagggatgtgccactgagcctcggccccatcgtggggagctctccccatccttcctgaacccacctctgcccccatccatagatgatagggacctctcaactgaggaagttcggctagtaggaagaggggggcggcgccgggtaggggggccagggaccactgggggcccatgccctgtgactgatgagacaccccctacatcagccagtgactcaggctcctcacagtcagattctgatgtcccgccagaaactgaggagtgtccgtccatcacagctgaggcagccctcgactcagatgaagatggagacttcctacctgtggacaaagctgggggtgtcagtggtactcaccaccccaggcctggccatgacccacctcctctcccacagccagacccccgcccatcccctccccgccctgatgtgtgcatggctgacccygaggggctcagctcagagtctgggagagtagagaggctacgggagaaggaaaaggttcaggggcgagtagggcgyagggccccaggyaaggmcaagccagygtcccctgcacggcgtctggatcttcggggaaaacgctcacccacccctggtaaagggyctgcagatcgagyatcccgggccccacctcgaycacgcagcaccacaagccaggtcaccccagcagaggaaaaggatggacacagccccatgtccaaaggmctagtcaatggactcaaggcaggaccaagtaagtatrtcatgaaacttggcagagagtgtgggttagggctgggtgtgggctggtcagacttcaggagtgggacagaggggaaggttgccaaaagggttctacttttcctctacaatgaatcctggcttgtctctacagtggccttgagttccaagggcagctctggtgcccctgtatatgtggatctcgcctacatcccgaatcattgsagtggcaagactgctgacctwgacttcttccgtcgagtgcgtgcatcctactatgtggtcagtgggaatgaccctgccaatggcgagccaagccgggctgtgctggatgccctgctggagggcaaggcccagtggggggagaatcttcaggtgagtagcaaaggacaccaaggaagtagtctggtcaacgctcactcagaggcagtagtggaacacagtccctatttattaaaggatgggccttttctaagggcagcagagctgcttctgagaccatgaggtgscccttccccctcacctaccttccctttatgttctcacatcagacatatcttatctcccttctaggtgactctgatccctactcatgacacggaggtgactcgtgagtggtaccaacaaactcatgagcagcagcaacaactgaatgtcctggtcctggctagcagcagcaccgtggtgatgcaggatgagtccttccctgcctgcaagattgagttctgaaagagccgccctcccttccccaaggatccactcccccagctcctttagagaatggctactgctgagtcctttggggttgagggagatgggagctagggggaggggagggagatgtcttgttgtggggacttgggctgggctaaatgggaggggttgtccctccccatcatccattcctgtgaggtgtctcaaaccaaagttaacagggagaggatgggggaggggacamattagaataggatagcatctgatgcctgagaaccctctcctagcactgtcaaatgctggtattgaatggggactgaggatgggtctcagagagcaacctcctccctcgtagagggagattatatccccaactccagggacctctttatctcaatctatttatttggcatcctgggarggatttccaatagtaatttatgtgacctggggcaggataccgtcagtgaggtgcccagagctgcaccctttcctccatttcccatcccccatctcctcaaccaccagggtctgagttctagcagggtcctgggggtatcccactgctatactgttctactgcttccctcagtatctgaatgtctcaatttaaaacttgaagctctttagaccaatagactggtgagaggagaaaggagcttatcccccagaccctgctttataccattcacatcccagggctgtgtccagacagcacaaaacggcaaggagagcccaagccccaatgccagaattcttccaaactccctgactctttgaagtttttactcaccccatttcaattatcctgatcccttctcatcccctgcttggcttctctgcatgtggtcatctgctgtggcttggtgtttaatgggttaaaaataagccactgcctgacatcccaacatttgacaccccagcaatgtgtgactcccccaacattccactatgccatcctgcagctgaaatgggaacactggctgcctctccaaacccgctcttggacagaggatctgggaggtggaagccaggccagaggacttggggaaaatgagatggaggaaggaaaaagggagaagctgagccacagsttaactcctacagagtgaaatgaaaacgggctgaaaataccaccccaggagaggacctcgccccaagcaagccagtgagcagccctgccagactactgccagactgagaaacccagaagctggtagtcatgtgggcttgccttctctgccaaacgactgggaaaccaaaatgagcccaccttgtgttcttcctagctccaccctccccgtgctgctgtgttctgctcctccccacgcttccctgctatagttcccagctgctgtaacggagccacctccaactctaacaataaaccaagttcattgcagatagtgtagtgctgcttaggctttttctgactccatacatgcttagttactgggccctggcttctacctctctgcttcaaccagtattgaatttatcttggaagactccaatgcttttgattactggaaacacttgtgcctgagtatgaagaataggagcctagggtggatacatacatctggtctgggggagggaagaggggcagaaggcctcctgggraggggatatgcattccgtggggtcaagagttgaggaccaaataaccaggatcagctaccctggacagcctcttgggctaaaggggtaaaaagctgaaggaccctaagagatccagagcctaatgaggttggaaacaactctccttgtgcagtcaggatttccatggagtaaaacggtcgactttcctcctccatggaaaccctttatagtcctaagtatgtcagaagtggccaggttatgaatgtgtatatttggggaggggcatattctagccctcccactgttctgggctctctcatggtaaagatgtcaaaggagcagagaaagggcatagcccctttatataaactcctcctgacactccatcagagtgaaaaattaacaggatgattccaagaacttggtgagaaggcatgtaccctctggtgcttcacagagagggaacctctttccagtcccccatccaacactctacttactcaataaagaccttttggggaccgggcgtggtggctcacacctgtaatcccagcactttgggaggccgaggcgggcagatcacctgaggtcaggagttcgagaccagcctggccaacacggcgaaaccccgtctctactaaaaatacaaaaaaaattagctgggtgtggtgacgggcatctgtaatcccagctactcaggaggctaaggcaggagaatcgcttgaacccaggaggcggcagttgcagtgagctgagatcgcaccactgcactgtagcctgggtgacagagcgagactctgtctctaaataaataaataaataccttttgagatagtgggttaactgccataggctcctcttgggatgcctgatctctcttttttttttttttttttggagacagagtctcattctgtcaccaggctggagtgcagtggcgcgatcttggctcactgcaacctccacctcctggattcaagcaattctcctgcttcagcctcccgagtagctgggattacaggcatgtgccaccatgcccagctaatttttatatttttagtagagatggggtttcaccatgttggccaggatagtctcaatctcttgacctcatgatccacccacctcggcctcccaaagtgctaggattacagacagatgtgagccaccacgcccagctgatctctatatttttatagtctatttttggatgcctgatctctgtatttttacagcccattcctgctcaactataatggcttttgaccgattcagattaatcagttacagacacaattgactcatagtcgtattcctttttttttttttttgagacagagtcttgcatttttgcccaggctggagggcagtggcgtgattttggctcactgcaacctctgcctccagggttcaagtgattctcctgtctcagcctcccgaatagctgggattacaggtgtccaccaccatgcctggctaatttttgtgtttttagtagagacaaggtttcaccatgttggccaggttggtctccaactcctgacctcaaatgatctgcccgccttggcctcccaaagtgctgggattacaggtgtaagccaccgtgcccagcctatattcattcttgaattcacaaggacatcaccatcatccatcaccaccattctcattagtttatatttattgagcactcataatgttccagcccccgactccaatgaccgcattacccctcctacccactcccattcccatccctggatctttggaaaaagcttcataatcatatctggccctcagacacaatgatataaggacaaatttcttggggaccctgcagtgtttggtctttggccagtctgtccctggcacaactacagaaataaatatatatatatatatttattaaacctttgcttgtatctgtacaatattgatctctgctgattgcttaaaatagaacctgattatctctactactacagcatctcctaagccaaacagccccaccacagaggaggcccactttcacagactggctaagaatcctctagagcattttaagtagttgctctgaattttgcacagcagtctaatacctacttttccctagagctattgcccagaggaacaggactgaggcagaaggggcacttggggatgatatggaaggatctataaggcaagtctaaagatttagtggccatgtcagatgtttggggaagggactctattttccagacatttcagatagccatcccgggctcacctgaggagtgctggcaaagacaagagtcccctgaatgcacatatggtctaagcgtaccttgagaagtcgtgaacatttccccagaaaagtgaagaccctagagtcccctcttttgcatttgctgtcgccagatggtgtcttcagcagtgaagcggcatttcctttaacaatctgtgatttcctaggatgctcagagaaggctgggtaatgacagaccaacccaccccaaggaaatcctattcaagtctaatggctaagtgaggagccaatggcttcttygaacctaaaactggctcctcctcaaccacagctctggcacaggtatgcttcatacaaagagaactacttccccagacaccgctggtgagagctggccagtgagttagccaacagaaaaggttgctggctcaaatggctggtatagtgtgataccactaatgagaaaattaatcacatgttgctggtggaaggggtgagtgctggtcatgggctagagactggctctgagggtttggatcaccagatggatgctgggcttgaggaataccctctccaggcagctgatcaatcacttcagggaccacccaggacttctaatttatctcctcagggacctcctgggcctgcagatcaatctcctcagggaactcttgggatggtttatcaatctcagggatgccctgagataacagattgatcgcagaagtctcctgggccagcctgccaacctccacagagaactcctggtatggctggatgacctcctcagggatctcttcagctgggctgccaacttctacaagggtttcctggaccaagctaccaacccctacatggaacttatggaccagcttgccaacctccacagagaccccctggcatggctggctgacctcctcggagttctccagacatagctggcaaacttcctcagagactttctggcacagttggctggacttctggcatggctggctgatgtgagggacctcctggcatgtgtggttaccattgtcatggttctcctggcattgctggctgatgtcagggaccttctgacatggctggctgagcgcctcagaaatgtcctggcatggctggctgatgtcagggacctcctgacatggctggctgacctcctcgtatggctggctggtttccataggtggcacctgtggggactgatttggttcaaaaagctcttgctccccttctatggagagctcttgtgctccactcccaggggtctcctggagcagcccaaggccttgatgttcttcagccacgtgtgaatttagggagggttgatcactgaagccaaattgggagttaccatctactgtagtaggggaagaaggaccagcactggacacagtgctagaagggccactgctgtctgtaaagcaaagtcaagagatcaagttagagaagctggaagagtaggctctaccctgtgcagatagttcaaatgctagaattgttggcctatgctacttatgtcttgagggaagagtgtccaaattcttcctaagttaagcagagactcctaagtttgcttacctcaggaactgtcaccctggcctaatgtatactttgagagtaacaataaggtacatctaagacttcaggagagagtgctaagacccacttcatctggttctttcacaaatacactcccatcccaattccaagttcccaaggcctctcattcctactttggaagcatatgaatactttagcccagtggttcataaacaaaatcatgaaaaaattttttaaaatactaatttccagttttcaactccagagattctaattctataggtttagcgtaaaggtgtagtttggaggagggaggaggaagaaggcaatataattttgttggaacactctcatttgaatctgatgtacaccttctgttaagaatcattctttaaagcaatcaatgtatttctggggcagaggtaatcattatttatagcccaaatgataagttggcagaagaatgtagaaaaaccatgtaaatcagaacaataggaaagaaaatggtttacctggctgggtgyggtggctcacgcctgtaatcccagcactttgggaggccgaggcaggcagatcacttgaggtcaggagctctaaaccagcctggccaacatggcaaaaccttgtctctactaaaaatacaaaaattagccaggcgtagtggcggctgtctgtaatcccagctactcaggaggctgaggcaggtgaatcacttgaaccccagaggtggaggttgcagtgagccgaaattgtgccactatactccagcctgggcaacaaagcaagactctgtctcagaaaaaaaaaaaaaaagaaaatagtttacccaaaaatggaagayggccatggaatttctacatggcagttcttaacctttctaggggtcagtggcccctttgaggtactaagtcagatatcttccaggaaaaatctatataagaatattcacactaatctttacatgtgattcctgaagctcacagaccctaccctgaaaccacatctatggatccagagttaagacgcttgtaagtcttgggacatacaatgttacaggcttgtgcatattatatacacggaaaacatttaaaaactgatttcctacatcctgacagtagtgtaataaagacctcagagtcttcaattacactgtgggatgattcctactccatcctctactgcttcatygccctctagtacttgactaacctacttttcccttggtaaacatcatttttgttgataatattataacgatatattaaagcactatggtatcaataatgacagattctgggaaaagggaacatcagaacatattgccattgaagaaaaccttgaaaagttggtaaacctgagcctacaaaggctcaatccatcattgagttgaaggtatgctagttatctctcttctgtaaacaatcaaaggaggggctggacacggtggctcatacttgtaatcccagcactttgggaggccgaggtgggcagatcacaaggtcaggagttcgagaccagcctgaccaacrtagtgaaactcctcctctactaaaaatacaaaaaaaaattagccaggcatggtggcgcatgcctgtaatcccagctacagctactcaggaggctgaggcagaagaatcacttgaacccaggaggcggaggttgcagtgagccgagattgcaccattgcactccagcctggatgacagagcaagactccacctcaaaaaaaaaaaaaaaaaaaaaaaaaaaagaatcaaaggaggcatgcttcaagcagaaaaagaagccagacgcrgtggctcatgcctgtaatcccaacactttgggaggctgaggtgggtgcatcacttgagatcaggagttcgaaaccagcctggccaacatggcaaaaccccgtctctactaaaaatacaaaaattagccaggtatggtggcacgtgcctgtaatcccagttactcaggaggctgaggtaggagaatcacttgagc

SEQ ID NO: 10033 - DNA, 115353 bp, Homo sapiens
tacatagtccttccctgccctcttcccatccaccctccccagtttggccagctcctaaggccttcctcacaatcacagccacccactcacacccaaacactagccccacccttgccccaggctgccaagagttacttttgaaggtcagagaagccaaaatagtctgtgctctcagcatcccccatccccccttaattgcagccagaggagaggaggagctgagtcactagtactcttgggggttgaggggacaaaaggggagcaatccttgcttagatccggggatgcaaatctgcgacaatggcaacaaccccgtttgggtagaagcggccatctgcagagatacacagggaaaaccaggctgagttctgagcatcacaaaagggaaatacccctcttctgcaacttcatcgttcttatttcctcccacctcaagccttctatctcctccctgctttctagggctttctggagtgtgttaggagggaaacttaagtagacatttagtttacgaacaaaataacatttcccagaccaatacagagcccacccatattctcagctgccacccccaagggccacaccctgggcatggtgccaactcacagtggagttttccttcagccttcaccctctgaacagctacccaccacaaccaactctccacctgctgtattcctaggctctgctgcaatgaaatggtgagatgccaaagaagaaagagaggcttgagctgagctacaaagtaagatatgaaaccctggatttgagacttgatccaccattttactaatcatgctgctaaacaagagacttaacctctctcagagcctacttcataaactatgaaatgagtataatattagtaccatcctccgataatgctgtgaggtttgaattgtataaaagatgaaaaaaaagcttcttcattcctagacttccaaatctgcaatgtacaaatgccactggaagtctttctcccttttgtggaagatttctgagaggtcatctaggtgatcaaggaaatcataaatcaggatctcagaccagatcaactctggagtactcttagctcccaggtaaacccagaactaaagatgcctgcagtatgagatttgaagtcctattcatgtccttgctttcccatttcagacagcaatgcagaccccggttccaggggttaatgagctgctgtattaattcagggtaactgttgtattggtagaagtaatagagctatcacttcctaagtccgtcagtggaaatggagagtcagaccgaaggcctccagactggtccctcagcctgtatttttatttatttatttattgagatggagtctagctctgtcgcccaggctggactgcaatgtcatgatctcagctcactgcaacctctgtctcctgggttcaagcaattctcctgcctcccgagtagctgggattacaggtgtgcaccaccaccctcggctaatttttgtatttttagtagaagagggtttcaacatgttgtccaggctggtctcaaactcctaacctcaagtgatccacccacctcggcctcccaaagtgctgggattacaggcataagccaccatgcccggccctgtgttttttagagtcttagaatattagttatgaattataagcccccttctatttcctataggtatccaatagtaaaagaatcagagagttattgaaactcagttttccactgtcctaattgtttctgaatttgtattagaaygctcggaagatccagattttttgtaggggttagaaagtcaccactggagagactacctggtgcaaaaatcacctttgaaagcttttaccagacttgaccactagaaggagctgggccactgactctttatcagagggtcccttcttttctgtgtgtgggtatgtcaatgtggagggggcagtgcctaggaataagtgcactctccttgtcactgtaggatacatttttgtctgctttctcagcattttggcccagggcttgaggataggtgataggaatggtggcccagcctgtggggtagtcaagccataaggcactagcatatccccttgagctcatcccagctgcctggtcccctttgcgtcctcactaacagaaggctggagggaggggcagtgtctgcagctgctctgggctgactgttgtttgtggggacagctgaaagaggagccagcaggggtggggctgtggctgtcttgagctgtgtgggtttttccaggaaattctctactattctcctgtgacatagacagaccatgataaaaatgtccaaacctaaaaatatgcagtatgccaaagtaagctctgatctagggtacatggccctaagctccttgaggacaccacagacaaactctttgatggaaagggcctagtaggtgtttatatatcaatgctcatttctaagaagtgcctgagaataactatgttctctctgtaagtgtcttcccaagtatcgctgcatcttaatctgaagaatggctaagtactttggtttaacttcttttcatttcttacattattccagaaagcagcctactctcaagtctctgtagccaaaaggacaaggttagagcattcagtgtgaattattaacatcagcagataatccccaaacttctgttcagtcattaatttcatcctctgtcatccctgtatctggcctttcaccaaagctcctaggagtactaagtggtaaaactgccgattttcatcattrgggataaatggaggaagccatgacatgagtaattctaaacagaaacattctcaaaagagtgagtagcctgctttacaggaagccagtcacatcaggaagatgtcagcctcacatatattaatataaaattgctgtatatattcctaggctaatggagctttagtcatattagccttattttctccaacttcctagcagcatctataagtatcagtgatcaggaagtgatcaaagatttggcagttaggagcagtggaaaaggaggagagataattaaggaaaggtgactactatactgagtaattgagaattatctgtataagacatgaattcaatcattcagttgcagtggctgttgacctggatggattttatattccactaagctgatggattggtgtgtcaacattttccagtaacatgactagatgcctagctcctttttctttttttttttttcctgagatggagtttcacttttgttgcccaggctggagtgcaatggcacgatcttggctcactgcaacctctgcctcccgggttcaagcgattctcctgcctcagcctcctgagtagctgggattacaggcatgcaccaccacgcccagctagttttgtattttttagtagaggcggggtttctccgttggtcaggctggcctcgaactcccgacctcaggtgatctccccgcctcagcctcccaaagtgttgggattacaggtgtgagcactgtgcccggccttagttcttttataatagcatgtagagctttccgtagtcacctcacagacatctgtcatggaatggtagtgcctaacatcttattttctcaaatctctaacccacccattcctcccacccagcagaatgggaaactgcattatgtgagctttgatctgggccaaatctcagagtacaacttgatcttgtagcagtaaattcaggagcccctccttccactctggatttgatggtgcccatcatcatgtaagtaccaagattctgctctgccctggagatctgttggctaagccgaagcaggaaccagaaaccctgaaacctgtgcagcctaaataaaaatgctaaacaagggtcaaggaagatgaatgggggattctggggtgtctgtaaagggaagcagggagacccggggtatgcagaaaggggaacacaaatgaagasagtgaatttttgcgtgagagatgattgatcactaagaggagtccctcatttctttagtgcatgtcaacagctatccacaaacaaccctcttctcaaggagaagttatgttctccagtctccctccagtatcaaaccatgtctgcaaagtatatttggtatgtggggacagctatggaattccatgattttcctcctctataaagttcctcccttctcctccactcaaacctcccgcaaggccacttctcccagggagactggacctctgtgaccagctcttacccaaaggactgaaataaaacattagtcctaacctttgacctctgaggagaagtgagctaggtgccgggtaatgaagagtctcaactgttggttcaagtcaaaggatgacaggtcaatgttccaggagagaatccctgtgggagaaaaacaaagaaggttctggataaggttgcakgttgtagggtggtgagactgcaggaacactttcaagttcacagaacaggtaaggagagggagggtatatggatagttgccatgatcagcctcagtgatgtctcaaagaaaggtggctagtaatggtgtctttctcccagtttacagcttttctaggctttgcctgagccagagggagaaggacagagtttagactaaactcggtcattaatgagtctataggtaggaattttcttgtaaggttccccagttgtggtggaagtgacacctaagggcctattcccagatactgagggctaccttccccacatttacagctaagtaggattctaggttcgccttctgtgttcccttccttgtccccagccctccacagcttgcttccacccgcaggtggctccgcagcactgcaccacagccacaggcacagcactggggaaggaggtgaggacttaggagctggtagccacgaaggtcacttagtggttggctactggcattcagagatttgagatttrtacggggcgttcagaaagctccccgtgctggttcagggaccataaagaagatacagcaagatagggacgtggattctccagggatggtgaggactttcaggacacctggtccaaaacactgcggtggagggtgtgaccagaggggccccaggggctgcatagagctccgctgcctcagggagactgcggaacgccatggagtgtgcagkaaggatgggcaagcgagatgttagtagagcgagaggatacggacacatggcatggaagatgcaggtgacaagggcgcagatctcaggaagtgcacactagggatggagatgcagacgtatgcattggtagttgaatgcagaaggcggagaagcacagggtagagatgcctgaagcacagccagaacagtggctcaccttgttcaaggtgggcccgcacggccctcagctgactctctgtaccgatatcgccgatcacaattagcaaagagtgcttctgcaggtcccagcgtgcagccgccaccgcggctccggcctcgcacagcagctccgcggggttctgagccagcggtgcgccgggacttcggagccccagccccggagttgtctccatggcaacgccgtgaggccgcgcaggctcggcctcggtctccatggaaacacccgcggagtgttagtccggcagcttccgctgcaggcagagtgcgcgcggctcttaaaggccggcggcaggtgcagttcattggctgctgcctgtcagggggcgtggcacaggcgccgcaggggcgggccggagctggaagctcgtgctctgcggtctcgccaggctagagggtggtggccgcccccttcctcccaccacgccctccccagtaccagcgggagcttccacttagacttgagcgggggtggggtctctgggggacccattggtggggcgaggcggttgcctcggcgccggaagaagcttctagttaagatgtatccctgataagtactgtctggcaattccgcagcctcgcccgaactgaggggagccatcttgtccctctctgcctccgagtttgtatcgttgcctccatctgtgtctgtgtgtctgtattatcgttgtttggcgtgtttttttttttttttgttttttgtcactgcctgcctgggtcctgcccgaggtctccatcctcggtttccctgtccttgccccgggccctgggagtgctctggaaggctgcgcagtattggaggggacagaatgaccttccggccttgagtccctggtgagttgttattctgaagatagcagttggctggctagtttccatctctgctgagtgcaggactcgagtgcaatgagctcagactgcagcaagggggatttgagtaaaacctaggaaagaccttcccatcttcaagtgatgtgacagtgagatgggtctccctcaggagactgttgtattacttccccccctcccaccccccgggagttcttaaaacagaaggagcagtgtttgcaccaaagaaggggttgacagttctaagatcaaaaccagaggttgggaaaggactgaggaggccttgcactgttttatgactgactggaacatctttgtaaaaaagtgctgttagtctagcctcccccattcctcagtgtgtctccacctactccacactccagagtagtcttttacccaggataccgaatcattctgtacatgtatgtatgggagcgcctatctttcaccctagggctccagcagcacttgtttttttgtttttttgttttgttttgttttttgggtttttgggtttttttttgtcccrtttgcctttgctttggagatagtacaggaaagaaaggaacacagtatcagattcagcaaggctgcctgtgagccacgttctgattgggcagtgtctgcatgttaaatacttcacagcggccgggcacagtggcccacgcctgtaatcccagcagtttgggaggccaaagtgggtggttcacttgaggtcaggagttcaagaccagcctggccaacatggagaaaccctgcctctattaaaaatacaaaaattagctgggcgtggtgttgggcgcctataatcccagctactcgggaggctgaggcaggagaaccacttgaacccgggaggcgaaggttgcagtaagccaggattgcaccactgcactccagcctgagtgacagagtgagactctgtttcaaaacaaaacaaaaaactttacagcaatcctggtccctaccatggagcatgtgttacaggaaaacagccagtccactctgcaaccaatttggacatggccctgaaaatcctttttgcacagaaaggggaaaataagagtactggcagaatgtcagatgctggggatgcctcaccctctagtytcatgactatgacacatgagacggtgttccgctgtacctctgccccccccccccccgtttgtggatctgaatctggaaaagagcttggagagatttacaggcctcctcttctgcaatcagtaagagtaccatgtggaggcagagagccagaataggttgtggggagaaagggacagtttccatagcaactgcagagatgaggccgctaactagcacagggtctcagtataaaggtcagcagtagttaaccaaagattctgctttcatcaagtctcacaaagagactagacaatagatctgaatggtatagggaaggatcacacactgattagatggtaggggcagaaactcagccttgtgatctcaggccctgctaaaattgggttttattaattacagtgcaaatgtagattatgatagtactaaaattgcttatgtgtgctggatgagtattttgcaggctcactgccaaagkctgacaatgtcacagaaagattggctataggtgtctgttaattatcctcctctttccttggttaacagtattccagccattccactgggtgatgattccagtatgattatattgtcaaaatatacgtatatatatttagagacagagtcttgctgtgtcagcaaggctggtatatagtggcatgattgtagctcactgtaacctcaaactctgggctcaagtgatccttgcacctcagcctctggagtagctaggattatttgagacagggtctcacagagacagggtctttgtgtgttgcacaggttggtcccaaactcctggcctcaagcagtcctcttgccttggcctcccaaaggactgggattacaagcgtgagccactgttcccagcccagaaattttttttttgagacggagtcttgctctcttgcccaggttggagtgcagtggcgtgatcttggttcactgcaacctctgcctcccgggttcaagcgattcttctgccttagcctcctgagtagctgggactacaggcgygcgccaccatgcccagctaatttttgtagttttagtagagacggggtttcaccatgttggccatactggtctcaaactcctgacctcatgatccacctacctcggcctcccaaagtgctgaaattacaggcatgggccaccgtgcccggcccagaaaatatgtttaagtgttaaattgcacatagcacttgtccaaagtgctctataaagaaaactggacaggagtggtggctcacatctgtaatcccagctgtttgggagactgaggcgggtggattgcttgagcccagaagttcaagaccagcctggggtacataatgraaccccatctttacaaaaaatacaaaaattagccgggtgtggtggtgtgtgcctgtagtcccagctactcaggaggctgagatggraggatcaattgagcccaggaggcagtgagccgagatctcgccactgcgctctagcttgggcaacagagcaagcctcttatctcaaacagaaaaaaaaaaaagaaaaaagaaaactgtggagcattagcatctgtgtcccagaattttataagcaaagacagaaaatgctctgatacatatgtataagacttagaaagctaaataaaaaattaaatacatatatgaattataaagtatttaaaaatctatattgaatttaggaagtgtgctatggcagaagcctggtagtaaaacgatgcaattcaaaggcccttccaagggtgttaccagtggagggtcttgactacgagttgtccaggttcttggcatattgaacaaagaattggactagctgggcgcagtggctcacgcctgtaatcccaacactttgggaggctgaggtgggtggatcacctgaggtcaggagttcgagaccagcctggccaacatggtgaaaccccatctctactaaaaatgcaaaaattagctgggcgtgttggtgggtgcctgtaatcccagctactcgggaggctgaggcaggagaattgcttgaacccaggaagtggaggttgcagtgagtggagattgtgccactgtactccaggctgggtgacagagtgagactccatctcaaaaaaaaaaaagagaattggacaaaatgcacaaacaaaccaatggaagatgaaagcatagatttattgaagtgaaagtacattccacagagtgggagtgggctcgagtaagtggctcaagggccccagttgcacaaatcttcttgggtttaagtaccctttagaggtttcctattaattacatcctatgtaaatgaagacttggcctgcgacctattggaggctgaagtggtggcttggcctgtgaccaattagaggctgaagtgaagttacaccctttgcaaatgaagacttggctcccaccaatcagaggctgaagtgaaggctccctgtctccagacactattctcctgcctcaaggggattattagggacctgtgatatgcatgattgtcagacacaggtagtagtgtttgatggctatggagcctcctgttttgtttcatttaactattgaccccctggaatgaccaagtatgatcttttgggagctctccaattctgtagcttcttccacagtcttgtcaagcaaaattggcagatatagtggcacaccaatgcttttgaactgtgatgaaggacccttgaattgtcgaaggtgtctaaggatccaccactgaaagaggaggttagaagaggtgcaagaggaaggcactattataggctstttccttggttatgcactggagtcagcacaaggcaaaagatagtataaatctcaaatggtttgaaaagtatcggctaagtttaaaccagttagggaattctcaacccccaggccttcataatgtatagtgataaattatccaataggtaaattaagcacactcttaacaaagtgggaagggcatctctaagtttttctggaaataatttcatatttggcatttaaagtattaaagttgtccccatgaaaaatcagagctttacttgcaattagttgcactcatcttgaattaggtgttcataggagagaagaacatcataattctttcaatgcttaaagtctccataagatttaaggcagctctggcaattcatamagaaaagatgctgggccttctcttctagcctgatgaatgtcattagtttttctgggggtctgagctcatttggcagaactccagccctgctctgctggattgcatggttttatccaccaaaatatccaagggagctgcatacagctcagattccttccctgcactcagttctgcctgtaaagcattcttacccagagagaggcgtgttggattacagaagtgctgtgtcagaggcttatccttggcttttgggggaaatactatgatcataatgcataccagcagccatagggtcacctcagcctgaacagctggtttgtctgcaaaggcatggagtaaaataacctttaaaaaggcactgagtaaaataatatctaaaaaggttgagatggggaagaagtctgcatttattactatgtctgggccacagaggaggcccacaataaatatttttctaattattatttgttcacattaagtaaatgggcagagcaatgggactgggtttaccttccccctgcagagcattgcaaaggacaatgaagaaatttcccctttttcttccctcacttcccacattcttttatttaagaaagtgattcccaaaagcgaaaaaaataatttatcaataccatcttcccttatccatttcattagcctgtgaaatggaaggtagtgtttggctgtgacctctgataccatcttttcttttaatctgagcaaagctacctcttactgcagggatctcttaaggattttctttgtggtggtagagatgatggtggtaaagaggattcaaacctaactatataacttagttttcaggccatacctgtgtgtgaattatattttgcatcttttttttccccaaagtattcatagaatggagttatttcctttcaaggaatgcttgggttgaagaaatattattccctttacaatatcacaaaatcacaaatactttgtctttcttctcatcagttccttctcaaagatccttcataatatgccctaacttccctttccaacattacstcctgcaaatatcctgtttttattttatttttaaaattttatttatttattttttgaaacggagtctcgctctgtcacccagactggagtgcagtggcacgatctcggctcactgcaacctccgcctgccaggttcaagcaattctcttgcctcaccttcccgagtagctgggattgcaggtgtgcaccaacacacctggctaattttttatatttttggtagagacagggtttcaccatttggccaggctggtcttgaactcctgacctcaggtgatctctccgcctcggcctcccaaagtactgggattacaggagtgagacaccgtgcctggccgcaaatatcctgtatcaacctttttatkcagtcagtctgaaccacttgcctttttctcattcttgtattttttgtttaggctgttcatttttccttgaatactctgttttccttaactcatctaaggatttatttatttacctttaccttatttgtggaataaagattcatctcattccacaaaggatttaagggatatgaccgaactcaaacccaactacttctgcagaactgactttcttacttaccaactatgtgaactttggcaacttgcttatcttctctgtgcttcagtttccttgtctgtaaaattaaaataatagcaccccaccttatagggattattttgagaattaagtggaacaaccttttaaatatgcttagcacaatgcctggaattcattcattcattcaatagtatttatggccaggcacggtgggtcacatttataatcccagcactttgggaggctaaagcaggaggatcacttgaggcaaaagtatcacttgaggttgcagtgagctgtgatcgtgccagtgcgctccagcttgggcaacagagcaagactctgtctcaaaaaatttttgttttaatttattgattgatttgtagagatgaggaggggggtcttgctattttgcacaggctggtctcgaactcctagcctcaagcaatcctcccatcttggtctcccaaagctatgggattacaggctttagccaccattcctggccctcccgtatgcattaaattgtctcttgattacctgtaataactaatacagtgtaaatgctatgtatataggtgtattgtttggcaaataattacaagaaaaaaaagtctgtgaatgttcagtacggaaccaaccaccctttttttctgaatattttcaattcatggttggttgaatccacagatgcagaatccacatatagggaaggctgactatattttaaaacactgcaaagaagaatcaggagaaggcagggtgagacttcagactaagatgtaagcctgacatctgtggaaggagagagggaaggaaggaggattggaaaggaagaatctttttttttttgagatggagtcttgctctgttgcccaggctggagtgtagtggcgtcatctctgcttactgcaacctccgcctcccgggttcaaacaattctcctgcctcagcctcccgagtagctggaattacaggcgctggccaccatgcccggctaattttttgtatttttagtagaaacagagttttgccacgttggccaggctggtcttgaaatcctgacatcaggtaatccacctgcctcaggctcctgaagtgttgggattacaggtgtgagccactctgcccagcccagtggtacattttcatggttgtcacagtacatactgcatgaataagtttatctgaaattctagaatgggcaaaactaatctacagtgacagaaagcaactaaatgattgcccagggctgggaattgattgcaaagggcacagggaactttttgggtgattgatatgttctatatttgattggagtcatagctacacacacccgcgcatgcgcgcacacacacacgcacccatttattgaactcatcaaactctacacttaaaatgggcccaattttaattgtacataaatgatatataaagttgactaaaaaacacaagataggccgggcaaggtggctcacgcatgtaatcccagcagttttggaggccaaggcgggttgatcgcttgagtccaggagttgaagaccagcctggccaacacggcaaaaccccgtctctactaaaaatacaaaaattagctgggggtggtggtgtgcgcctgtaatcccagctacttgggaggttgtacaagaatcgcttgaacccgggagacagaggttgcagtgagctgagatcatgccatcacactccagctggagtgacaaagtgagactctgcctcaagaaaaaaacaaatggcagggcacggtggctcacgcgtgtaatcccaacactttaggaggccaaggtgggcagatcatgaggacaggagattgagaccattttggctaacatagtgaaaccccgtctctactaaaaaatacaaaaaaaaaaaaaataggtcgtggtggcgggcgcctgtagtcccagctgctcaggaggctgaggcaggagaatggtgtgaacccgggaggcggagcttgcagtgagccaagatcgcgctactgcactccagcctgggtgacagagtgagactcaaaaaaaaatgagaaaaaaaacaaacatgagatatcacttcacactgacaaaccaaatgttagtgagaatgtggagcacctgaaactaatatgttgttagtggaagtataaaattatacaatcattttatttatttatttttaatttgtttttaagagacatagtcttgctgtgttgcccaggctggagtgcaagtggtgcgatcatagctcactgcaaccttgaactcctgggctcaattgatcttcccacctcagcctccctagtagctggtactacaggctggtgccaccatgcttgactaatttttaaaacatttttttgtagagataaggcctccctgtattgcccaggctggtcttgaacttctggctcaagcgaacctctcaactcagcctcccaaaatgttgggattacaggcacgagccactgcaggtggcctacagtcattttcaaaaactgtttttggcagtttcttataaagtgaaaggagcacacatcctatgacccagcagttccacttctagttatctacccaagataaatgaaaacaaatgttcacaaaacgaattgtttataaatgttcatagcaactttatttataatagtctaaacccaaatatgcagtaataggagaattaataaaacaagttgtgttgcatacaattgaatgttgctgagcaatgaaaaagaatgaagtactgatgcatgcagcaacatgcaaaatgttgagcaaaagaagctggacacaaaagaccacgtactgtgtgattccatttatataaaatagtattacaggtaaaattaatctatggtcatagaagttacaatatgactgccttgtggaatggggattgactggaagggaccatgaataactctctggagtgatgacaatgttctatatattgattgatatgtaggtttcatggctgtatatgtttgtcaaagctcatcaaattactggccaagcacggtggcccatgcctgtgttcccagcattttgggaggtcgaggtgggagaattgcttgagcccaggagttcaagacccacctgagcaacatagtgtaaccccatctctacaaaagaaagaaaaattagccaggtgtggtggtgcatacctgtagtcccagccccgaggagactgagctgggaggattgcttgagcccaggagctgagcccaggagttcaaggctgtggtgagctatgatcaagccattgcactctagcctcggccacagagcaagaccctgtctcttaaaaaaaaaaaaaattacacaattaagagctatagatttcactgtatgtaaattttacctcaataaaaatatcagtcactaaaaataaaaaacaaaatgaaagaaacaagcctaactattgaattggtagtattgttttaagtgattttaaaatacagtaatttaactttatatatatgtgttttttagacagactgtcactgtcacccaggctggtgtgcagtggcatgatcactgctcactgcagacttgacctcctgagctcaagtgatcctcctgcrttggcctcccaaagttctgggatgtaagccaccatgcctggcctgttcattttctttgggtgtgttgacggtgttcttatgtttaaaatattctctttattttattttatttctttgagacagagtctcactctgtcgcccaggctggagtgcagcagcgtgatttcggctcagtgcaacctccgcctcccaggttcaagtgattctcctgcctcagcctcccaagtagttgggactacaggtgctcgccaccatgcccagctaatttttgtattttttaatagggatggggtttcaccatgttggccaggctggtcttaaacttytgacctcaggtggtccacccacctcagcctcccaaagtgctgggattttaagtgtgagccaccaagcctggcctaaaatattctctatattttagacacagaagtattttggttaaaattatatgatgtctgggatttgtttagaaatcagtttgggggaagtgggtggatatagatgaaataagattgagcatttgtttgaaaaaaaaaaatttcaacaaaagaagattgagcatttgttgctaattgttgaargtgtattatataagtacatagcttttaaaattttttctgttaataaaaagacagtatcttcaagctttttgttataagcaaccagaagggtgaagttgccatcaactgagatggggaaggctgcaggtggagtagacttggtagaagagatgagttcaattttaagcatgttgaatttgagatgtcaattggacatcaaaatgaagatattgaataggcagttagatacataaattggtaatttgggagagaggtgtgggtcaaagacgtagttaggagtcattggcatatagattgtatttatagcaatgtgactggatgaaatcaagaaaggagtgagagtaaatagaacttagaacatagtaagtgctcaagaagtattcattataaccacatgactaaaattatttcgatttgtctcacaattcctacagaacttttattgtatcttgtactrtcattatttctatgtcttatctccttcctagattgtaaattctttgaagctagaaactagatattactcatccttatacactgctctctctccaccaccaccatggagccaaaatggtaccttgcatttaagtgaattgaaattaataaatgaacctgagtttgtgaagaaatttttggtcagttttatgggttttctgacttgctctgactttcagttcttgagactctgtgtgatgtgcttatatgtgagtagagccaagatgcattactgctattcttgccacttgttagttagcacactagctctgtacaagtccagatcagcctttgagacctagctgtactgaagacactgcagaagggatatgctcagagtagaatgggaaagkgtaataatgacacaggaagtaggatccaagagtaggcactgtgttcatgctatgttacttttactttattatttattattattttttaaattttatttgaggttcaggggtacatgtgcaggtttgttaaataggtaagttgcattatcacggggtttggtgtacagattattttgccacacaggtaacaagcatagtaactgatagtttttgattctcatcctcctccccctctccacccttaagtaggccccagagtctgttgttcccttctttgtacgtagacgttactttatgtacacacactacctcagaatatgagtaactatttcacagctcagccactaggacacagtggtgtccttgtccactgaagtcttctcttatattctttttagatttctcagccccaggacataaaaactcccttctttccattgaaacataagagtttaggagtaactggtttgttttgttttttttttkttgttgttgttgtttttaatttgcaaaatgaacttttctcaccttctaccatcctgggtctgatttctggcagtttccatagtctctaagtatattccttctcttgtcctcatgctgttcctatgtcaggtgcaggttaacttttctttagttttgcttagtaccaaactgcccagctccaatcttggataatttggtaccattctctttctttattttttatttaataaccagagtataattatcaagatcaggaaaataacattgattcgttactaatctacagaccttattcagatatcaacagtgctcccattagaattatttatagaagaagggaaaccaagttcttgtccaggattcagttctggatcatctgttacatttaatggttttgtctttgtagtcttctcaaatctagaacatttcttgagactttgattgtcattcttgaccttggcagcacttctttctctctctctctctttctctttggagaatatgggctgtttatctgtaaagcacccattaatgtggatttatctgattttttctcatgatcagattcaggttatagatttttggcaagaatacaattaaagtgtgatatatcctcagtgcattatatcaagtgacacagatggctttttgttcccttactggtatattaactgagatcacttggttgagttggtgaataccaggtttcttcactgcaaatttaccacttttctctttgtaataattcagtacattttagggagataytttgagatcatgtatataccctctttcaccatattatgagttttagcattaatgatatttattttgaatcatctttattgtgaaacatagcacacataaagtgaataaaataaaatataaatgtacaaatttatgaattataaatagtatacctgtgtaatgcctctggtaataaaaaatagaacatttccaagcacctcacatgcctcttaatgaattacaaccccactgttacctatacaattaaccatacattcttttattgcaatcctgttattaaaattttttatgatctaagtacacatctttaaatattaaagtttagtctcattgaaaaacttttgttactgtagtaaaatacacataacataaatgtaccattataaccatttttaagtgtatggttcagtggcattaagtacatttacattgttgtgcaaccatcaccaccatccatctccagaactttttcatcttcccaaactgaagctatgtaaatcattaaacaataaattccctttcctccctcctcctagctcctggcagccaccattctactttctctctttctgaatttgcctactctaggtacctcgtataagtggaatcacacaatatttgttcttttgtgtctggcttatttcacttagcataatgttttcaaggttcatctgtgttgagcatgttcatatcactctcgatttttattctatagtactggcttccaggaagttaggaattggaaagaaagctgagatggtagagaagagccaggatttatcgagtcacaggatgagaattttgaggagggaatggcaacagcatcagacactacagacgtcaaagataatgaggtaatttgttgttgttttttgaggcagagtctcactctgtagcccaggctggggtgcagtggtgcgatctcggctcactgcaacctctgcctcccaggttcaagtgattcttccacctcagcctcctgagtagctgggaatacaggtgcacaccaccattgtatttttaatagagacggggtttcaccatgctggccaggctagtcttgaactcctgagctcaagcaatcagcctgccttggcctcccaaagtactgggattacttgagctaccgcacctggctgataatgaggtaatttgacaagaaaattttagaatcagtcattaacatgtttagagtaactactttgtgtctggcattgtgctaggcattagatttatggaggttgaagccagactgcaaacgtagagaagtagagtggacaggagatgatacttggatgtgaagatttgattacttctatacaaagaggggagaggctgggcactatggctcatgcctgtaatcccagcactttgggaggctgaggtgggcggatcacctgaggccggagttcgagacctgcttgaccaacatggagaaactctgtctctactaaaaatacaaaattagccaggtgtgttgcacatgcctgtaatcctagctactcaggaggctgaggcaggagaatcagttgaacccaggaggcaggggttgccgtaagcggagatcacaccattgcactccagcctgggcaaaaagagtgaaactccatctcaaaaaaaaaaaaaaaaaaggaatatatgattgttttcctatcattaaatttggcacttgtcaattctcctcagtagagtactctgccactgagctccaaaactatgagttttcataagatcgtgaagcaactttaaaggttggtggaatacctgtgagggaagaataagctgggctagggttcttttgcttaagaagtctttgaggaggcttcagaaaaatactcacaaactaagtcatatagyatttagatttgttgtttgatggtttgaaatttattatataattataggaccaaatgagatgatcccaacttaatgacatctatctaggttttaaagatagcagttaaagacaatatgagaggaaatggctttaaattctataataaaggatttaggttagaagattagaagattaatattagaagaaaaatttctgacaatgaggtttgttaaactttaaagcaagttaacctaagatctgatgagccttctctgggagggctttagaggtaagttagatttctctgtctaaggtggtttaggaaaagatgttacctgtagacaggtagatgtgctgttggtcctttgcagtctaggagtcaataaaggcctttggctcatctagctgcaaccattctgcctgtagtttatttttctggataatttaatgattaatttaattgccacactgcctaacaaggaattaatagtttttcttaacagttttttttaagattcttgtttagtaatgcaaatggctcactcatttatttatctatttttagtcaggctgaggtttttaggctttttttttttttttgagacggggtctcactctgtcacccaggctggagtgcagtggcgcgatctctgctgactgcaagctccgcctcccgggttcacgccattctcctgcctcagcctcccaagtagctgggactacaggcgcctgcccgcgcacccggctaattttttgtatttttagtagagaccgtgtttcaccgtgttagccaggatggtctcgatctcctgacctcgtgatctgcccgacttggcctcccagagtgctgggattacaggcgtgagctaccgcacctggcttttgtgtgtgtgtgtgtgtgtgtgtgtgtgtgtgtgtgayggagtctcactctgctgcccacgctggagtgcagtggcacgatctcggctcactgtaacctacgcctccagggttcaagcaattctcctgcctcagcctcctgagtagctgggactacaggcgcccaccaccatgcccagctgattttttgtatttttagtagaggcggggtttcactatcttagccaggatggtctcgatctcctgacctcatgatccgcccgcctcgtcctcccaaagtgctgggattacaggtgtgagccactgcgcctggcggtttttaggtttttattgttgttgtttcagacagggtctcactctcttgcccaggctggagcacagtgttgcaatcttggctcattgcaacctstgcctcctagttcaggagatgctctcacctcagcctcctgagtagctgggactacaggcacatgccaccacacccagctaatttttttcgtatattttttagagatgggcttttgccatgttgcccaggctggtctcaaattcctgggctcaagtaatccacctgcctctgcctcccaaagtgctgggattacaggtgtaagccactgcgcccagccattttatgtttcgacaaacacacttgtcaagtaatcaaacagatctgtttatttgtgcctcacttggggaggaagcagaagcaggctggagaagaaaagcaaaaaaatggtaacttttgggggatttttatgggactcaaggtcatgatttactcataacaggacctggttggttgtgccctctcaaatagagcagatgaactcactttgtccagctagtgtagttagtattgctctaacctggtctttaagtattagatttgtttagtcactggtgttctgcagctttaggagtggagtatgaaaagagtcaattataaatgattttaagattaagaagtgagatgcatctctgtgtggtccatttcattttagctccactaataaaacatactggcgaccataattatattccagttatagcagtaatagattctagatttttcaggacagtttcaaggagtcagtccttttgttcccataagtaacgtgtattcagacaacatgctwtgaatttggtttggaaaataggatcactgtaatttatagcagcagtgagaagactggtaggaagctccacttcagctttgcctatatcacgtgctgaattgggcatttacagaaatggagaatcatggttgggctgtgccgaaataaatctgagcctggggtagaaagagaaaactgcctcatattgaatgcctactatgtatatgtttggcactgtgctaggtgctttccctattgacagctgctctggctagaattcwatcctggatccaactgccacttaaataatatacccccacccctcaacaacaacaacaacaaaacaaacacatatgccacatggggcttagttcattaagactcgtcacagctgccacaccctctttaagaccctggcaccataattaggataatagaatctctgggtttggaagtatctttgaggtcatctagttagaaggggtggcagctgttctctttaccatggagtttgagaatgacagtgctcaattctctcaatgggaggtgcaaaatatgtctggggctgtagtctctgcaggcaatcccataaaagataaggcaacgataaacaagtgtgaagcttgaaatacgtcctaggcggaaaagggcaatgggaagaaatatggcttactggagcccttatacaatgtaaaaacaaacaaatactaaaaacgccctggcagagatgtaatgtcaggcccttggattcagggtagaggcccacaaaagggatcctgattgacacaggttaaccctgtgtcaaagaagaaagagtctcttctgttgggttcaccagctctgaagtacctagccatcctcaagccgcttcttctttgccctgttatgagaaagctgggaaactctctccttttccaggaaagagggtgagggacggggattaaggggcgtgaacgagaaaaagcaggtagaggtactgaaatgtctgagtagtggtaaatgcaatcgtcctggaagcaggggaaggtatttcacgccctctcaaggtcccttcggttcaaggataccgtcattctccggctctactaaaggggagggcctgcaacgtccatgctgccatggaaacgcgscgccgtgttcctttttcttacgtggggcagggcactctgccgcagctacctatcatccacgggatttcttgagtggcgggcggcggcagcgaatggacgatccgatattgtgtgacgtgacgggaaagggggagttcgcggccggtggcggcggtggcgacagcggcgacctagggatcgatctggagggacttggggagcgtgcagagacctctagctcgagcgcgagggacctcccgccgggatgcctggtactgtttggagagaaatgggagtgcagtgggctctgaaggcctggatttcgggtctgaagggatggctgaccggagggggcggggtggcaagcatggcggcggtgacggggaaggggttggagggccctaaggagggggtggggaaacgttagctaagaaggcttggtggtcgtgaggaaasctgaaaggctgtggggcctctggcgaacagattttagaaaacattcttttggggggaggtagaggcgccagaaggacgtggcgggggggatggaaaaaggggcggggagagaagaggttaggaaggaggggaargggtgtctacgagaaggtgatgaaaaatagggagggatagtcaggcttattgtaaataacgasgaatggtgacttggtaggcatgataggaragtgcttgcagcaattataaatataatattctaattggaggagtcctgaagtggtcccgtttcccagctcttgtacttccgccccattatttaggtttagactgcgtgagcaaggctagtaggttacacggaactgatcttttgttattccattccaggggagcagatggaccctactggaagtcagttggattcagatttctctcagcaagatactccttgcctgataattgaagattctcagcctgaaagccaggttctagaggatgattctggttctcacttcagtatgctatctcgacaccttcctaatctccagacgcacaaagaaaatcctgtgttggtgagtrataccttgtttgaagaagattgagcagatttttttttttaaaccgaaaaccagcaaacataagtatttagaagatcattaccttctcaataaagttgattggaaaaattgttcacaaatagtaggtttcattttgaactatttcatatataatggggatattttgtatgtgtattttctaggatgttgtgtccaatcctgaacaaacagctggagaagaacgaggagacggtaatagtgggttcaatgaacatttgaaagaaaacaaggttgcaggtgaggtgtttaaagctatctgtcccctttgcattttttgggtgctcttgttggtgctgggtggatttaaactttatgtggttgtgtcgaatgtatgtaaggaagcctactgtggtatctgcgtagtagtcactcaaaagttgatgtgctagtgtcactgattagattggtattgtctgtattcctgattttgtattaargtttgttggtaaatgtctttcatgctaatatccagttatttttttcagaccctgtggattcttctaacttggacacatgtggttccatcagtcaggtcattgagcagttacctcagccaaacaggacaagcaggtatacagtgtttgaaggggtttatttaaatgtattatcagatttgttcttttatctgtacctgttgcctcatcccaaggataaaaggattaatctctttcttgtggattaggaaatgggacttgagggttgtattagatagtattgtaatagtactgatagctggaaactgttttgtgaaggtaataatttttatacctacattattcaaatcatgatctgtcttgtgcatgtgaaacaaaataagcattcctcctagtagaaaaaaattattaaaaagtatttaggggccaggcatggtggctcatgcctgtaatcccagcgctttgagaggctgaggcggatggatcacttgaggtcaggagtttgagaccagcctggccaacatggtgaaaccccatctctactaaaaacagaaaaattakctgggcctggtggtgcgtgcctgtaatcccagctattcaggaggctgaggcaggagagttgcttgaacctgggaggcggaggttgcagtgagctgagattgtaccagtgtactttatctagcctgagtgacagagtgagactccgtctcagcaaaaaaaaaaaaaaaatttaggagtattatcagaactattaggcatgttttccatctatcaactgaagtaccccaccagttttagatctagaatgtttaattcttaccctaaacaagattcaattkttaccatgtsttttgcatatctttataatacccattttttgagttcatgctctgtgttaggtcctgtattggacgtttggcatatagtataatgttatttaatcctattcttaaagcagctgtacgatgaagacattacattacttccattgtatagacgggaaaattgatggacaaagaaattagataacttgctttagagtacattgctagtaagtggcagagctggctttgaacctggtcctaatgactctaatgcctcctctttcattctaactaatcagtgcttctcagtcttccgccccaatatttctaaggtccaaggagaatgtagagaacttcaggagttttggggtggtagaaaggggaggtggttagrgaggagaatgttagcttgagatggttaaagactattgttttttcttaaaaagaaatggtttttggctgggcgcagtggctcacacctgtaatcccagcactttaggaggctcagacaagaggatcacttgagcccaggagtttgagatcagcctgggcaacctagtgagaccctgtctctacaaaagaaaaaaaaaaaggactgggtgtggtagctcacacctgtaatcccagcacttcgggaggctgaggtgggcggatcacctgaggtcaggagtttgataccagtctggacaacgtggtgaaacccggtctcttaaaaatacaaaaattaacgaggtgtggtagcgggtacctgtaataccagccactcaggaggctgcatcaggagaatcacttgaacctgggaagcagaggttgcagtgagccgaaattgtgccactgcactctagcctgggtgacagagcgagactctgtctcaaaataaaataaaataataaaaaaaaaaatagcagggcatggtggtccgtgcctgtagccccagctattcaggagactgagatagaaggatcacttgagcctggaagattgaggctgcagtcagccgtgattgtgccgctgcactccagcctggttgatagagtgagaccctgtctcaaaaagaaaagcttttttggaggtgtgttttattttacactctgtgtctgtacgtaattttttttttctcacaaatcatcaagtaaaataaatgctttagaacaacctgcaaaccgatgggctcattgtggcctgcagaagtgttttatttggcctacataggtggtaaaatgttaatatatttgaattaattgacagaattttagaatggggaaatttctcataaaacttagacttccagcttctggcatttcttgtttctgttggcaacagttggctggagttatgagtagcagtcagcctctgcttagatggagcattagtgctatgatttgccatagtcactacaattcattattgtacttggacactgaggccaggtgttcttttgtcatttatcatagtgcttgtgcttttgttcttacacccagctgcttcactcatctatgttatcttgctttgatttctgtgggcatttaagtttatggtacctctttaagaacatgtgccaggcttatctatgtttttgtggctcagcatcctggtttgagccagtggggacaggaagtatgcacgtccctcattgtgaatgaagcaatgctatttgagaagtttcatgctacttcttttcatgttaaataaatgtgcaggcactgtggcatgtgctttaaaggggcttttgccattgtggagcttataatttaataggagagacagatgttaaatgagtcattacatcagtagctattccattacaactgtgatcattgcaaagaggagaaaaaatatatataacgtaatcagaaggataaggggacacctctttgtggaatacaatctaaacaataaatatgaatttgttaggcatagttgaagggcttggagggcatagttgaagagctgcacatttctatgtgcagtatgaaaggaggagctgtccaaacagaatgaactgtgtgtgcataggccatgaagctggaaagaatttggagttgattccaaaagaatgaaatctcttcaaaacacttttttttttgagacggagtcccactcttgttccccaggctggagtgcaatggtgtgatcttggctcactgcaacctctgcctcccaggttcaagcgattctcttgcctcagcctcctgagtagctgggattacaggtgtccaccaccactgctggctaatgtttgtatttttagtagagatggggtttccccatgttggccaggctggtcttaaactcttgacctcaagtgatccacttgcctcagtctcccaaagtgctgggattacaggtgtgaaccaccttgcctggccaaatccaccaaatttattcacatttcctgttttacttctttttatgtgtgtgtgtatgcgtgtgtgtattaagttttacatagttttatcacctgcgtaggtttgtgtcttcaccacaacagtcaagatacagttctaacactgcaaggatgtttattgttgcccttttatagccacacctacctccgtcttttgcacccaaacccctggcagccattaatccattcttcatgtgtaaaatgtcatttcaaaatactatataaaatgggatcatacagtctgtaacctttagtgattggcttttttttttttttgagacagggcctcactctgttgctcaggctggagtgcagtggcaaggtcatggttagtgcagcctccacctcctgggctcaagcaatcctcccatctcagcctcgcaagtagctgagacgacaggcacatgccaccacacccaactaattttttaactttttgtagagatggggttttgctgtattggccagggtggtctccaatgcctgggctcaagcaatcctcctgtctcatcctcctagaatgcagggttacaggcatgagccaccatgcccatccttgggattggctttttcaatcagcataacttctggggctccatccatgtttttgcatgtatcaatagttcatttttattgctgagtagtcttccatgccgtggatgtaccacagtttgtttaaccattcatctgttgaaggacatctgcatttttttttcttgtttttgactactattgagaagctgttataagcatttatgaacaggtttttcttttctttttttttttttttgagatggagtcttgctctgtcgcccaggctggaatgcaatctcagctcactgcaacctccactccagggtttaagtgattcttcagcctcagcatcctgagtagctgggactacagccgtgcaccatcacgcctggctaatttttgtatttttagtagaggcgggatttcaccatgttgatcagactggttttgaactcctgacctcaggtgatctgcctgcctcagcctcccaaagtgctgagattataggtgtgagtcactgtgcccggccatatgtacaggtttttctgtgarcataagtcttcatttctctaggataaatgcccagatttgcaattgctgggtcatggtagttgcatgtttgtttttttaagaaactgccaaacttttctagagtggccgtactgttttatagtcccaccagcaatgtatgagtgatctaattttttttcatccttactggcatttggtgttttcagtattttttattttagccattacaagtctgtagtgatacctcattgttgtttcagtttgcatttccctaatggctaatgatggtgaggattttttcatgtgcttacttgctgcctgtcattttcttcagggaaatgtcttttcatatcttttgtccattttctaattggattgtctttttactattgtgttttgagagttctttatatattctagatactagtcttttgtagaatatgtattttgcaaatattttctcccactctatcctttctttctcttcatagggtttttcacggagcaatttttaattttggtgagagctgttaaatatttttaacagaataatataagtcatttactttaaaaagggcttataggccgggtgcagtggctcaggcctataatttcagcactttgggaggccaaggcgggtggatcacttgagctcaggagtttgagaccagcctgggcagtatggtgaaatcccgtctttaccaaaaatacaaaaaaattagctgggcatggtggcacacatctgtggttccagctactcaggaggctgaggtgggaggatcgcttaagcctgggaagcagaggttgcagcgagccgtgattgcaccgctgcactctagcctgggtggcagagtgagaccctgcctcaaaaacaaataaataaataatagtaaaaagggcttataatgaaaagcagagagtccttcctcacccttgctcccttttcacaaaggcaactctctttaactgtttatggttttacttctttgggaggttatcttcctacctctaatactattgtaaaactataaatgtgttttatatgtaaagtaatacaattgagttctgataatgaaagatggggtaactcagcaacaccctcccaatttttgtttatttgtttgttttattttgagaccgagtttcgctcttgttgcccaggcagagtgcaatggcatgatcttggctcacggcaacctccgcctcctgggttcaagcgattctcctgcctcagcctcccaagtagctgggattacaggcatgtgccaccatgcccggctaattttgtatttttagtggagatagggtttctccatgttcgtcaggctggtcttgaactcccgacctcaggtgatccacccccctcagcctcccaaactgctgggattacgggcgtgaggcacctccgcggccctcccaattttttttttgtttgttttcaccctctcaatttttgatggtaattattttaattcttctggctccgtttacacttctaaataatatatttaaacctttgttttctctttccatcaactttagacagtggagaaaagtttaactaaagtactgttttttgtctgtaatctgaattatttcatgctttttctgatttgtctaatcattctacaaatttttttgagtattttcttttttcttttttgaaacggagtcttgctttgttgcccaggctggagcgcagtggcaccaccatcttggctyactgcaacttccacctcctgagttcaagcgatccttgtccctcagcctcctgagtagctgggattacaggcaagtgccaccatgcctggctaatttttgtatttttagtagagacagggtttcaccttgttggccaggctggtcttgaactcctgacctcaagtgatctgcccatctcggcctcccaaagtactttcttttttttttttttttttttttgagacggcgtctcgctctgttgcccaggctggagtgcagtggcacgatctcggctcactgcaagctccgcctcctgggttcacgtcattctcctgcctcagcctcccaagtagctgggactacaggcacctgctaccacgccyggctaattttttgtatttttagtggagatggggtttcaccatgttagccaggatggtcttgatctcctgacctcgtgatccgcccgcctcagcctcccaaagtgctgggattacaggcatgcgccaccgtgcccggccaaagtaccttctattgagtattttctgtgtgccaggtgttcttggattttggggatacaaagtgatcagaagaaataaaaatcctagaccttaatgtagcttacattcttgtgtagggtatagcaatatatgataaataagtaaaatatgtagtatgttagatgctgataagggctgaagagataaatatagcagggaaggggagaggaagcaacaaagtggttgcaagtttacatagggtgtctagggagtgcttcattgataggacatttgattaaaaatctaagtgaggccgaggcaggaggatctcttgagcccaggagtttgagagcagcctggacaacatagtgagaccctgtctctacaaaaaatacacagtaagccaggcatggtagtgtgcgcctgtgatcccagctacatgggaggctgaggtgggaggatcgcttgagcctgggaggttgagactgcagtgagccatgattgcttcactgcactctagcttgtgtaacagagtgagaccatatcttaaaaaaaaaaaacaaaaaacaagtaagtgtgtatttgctgttatctgggataagtgtaatccatgcatggagaatggcaagttcaaagaccctgaggcatgagcgtccctggaatatttgagaaatagcagggaggttagtgtggctgtagtggagtgactaagagaagtgagagaagaggtcagagaagtcagaagggaaccagattatgtaaggcattgtgaggaatttggctcttatttttagtgagataggaagacatttaagggttttgagcaggggaaggacatgatctgatttagatttttaacagagtcactctggctgcttgattaagaatagactgaaagcaggacaaggctagaggcaggaagaccaacaaggaaactattgacataatttagcaaaaggtgatagtggctggaccaggattgaagcagatgaagaatggtgagattctgagtatttgaaaaggggattcaaagacagatcagatgtggagtgtgagagacaagaaggaagtaataattattccaggtttgttttgcttcaagtagctgggactacagatgtatgccaccgtgcctggcagattccaagtttttgatttgagcaactagagtaatggaatgacagttaagatagagaagactgcaggaggggaagttcagttttaaacatatgaaacattgtgctatcttttcaacaaccagctggatgtgttgaggaggtaattggacaaggaggcctggagctcagagggaaaagtctaggccagagatttaaattgcagactcataagcagataggtagtattctaaaccatgagtctggatgaggtcattaagtgggtgaatgtagctagaaaagaggtccaaggactcacggagcctaccagcatttagagatcagggacatgaggtaaaaacaccaaaagaaactaagaagagctcaaagtgtgttgttttgtgctgtcgtccttcattgcttcttttctaccatttgcaatatttgctcttgaactttctttccctctgtttcccaaagtcatttatctggtccttccagttayatagataatgttctattttgcttttgtaaaaatctttacttagtcttctttcacttgcttgggtcacggttcccaactttgcaaatttatattttcacctcttttgtgtttattacrgttacgcttaatgctctttttatgaaatattagttgtgtagaaagwtgcaaggaagcaaagatgtcatctgtaatcctgccacccagaggctaattgctgtaaacattttggcatcttttctctctttttttgttcatttgatttatatggttgacatcatgtggaaagtaaaagtgtatgtttgctgatgttttgcttaaaaacatgaaaatttttctcatgacaattaaaacttaacatattccccaagttttttattttaaaagtttaagcccacagaagaaatgaaagagtatacatttgttctgtgtgtgtgtgtgtgtgtgtgtgtgtgtgtgtgtgtgtgtgtgtgtgtgtgttctgtacttttttggggaggattaattgtttaagttgcagacatcagatttttccttaatataatgtccccttaaatacttcagcattcatcccctaagaataagtacattattctatataatcatagtaccgttatcacacttaaagtaataattccataatatttaagtatacagttcagattttcccagttgtctcaaagatgtcttttgtcttgttttattgattggttggttgatagcatctaagatccaattcaggttcacattttgtatttgattgtttcacacttttctttttttggagacagactctttttctgttgcccaggctggagtgcagtggggcagtctcggcttactgcaacctccacctcctgggttcaagcgattctcctgcttcagcctcccaagtagctgggactacaggcacatgacaccacactggttaaatttttttttttttgagacggagtctcgccatgtctcccaggctggagtgcagtagcgtgatcttggctcactgcaacctccgattcccaggttcaagcaattctcctgcctcagcctccccagtagctgggactacaggtgcgtgccaccacgcccggctaattttttgtatttttagtagagacagggtttcaccttgttcgccgggatggtctcgatctcctgaccttgtgatccgcctgtttcggcctcccaaagtgctgggattacaggcatgagccaccgcgcccagcctaatttttgtatttttagtagagacggggttgcaccatgttggccgtgctggttttgaactaaccttaaatgatccgcccacttcggcctcccgaagtgctgggattacagggataagcccctgcgcctggccttgtttcaaacatttttaacggtgatatatgttattaatagattgtgaaattatgtaatcatttccttaatgctgaatttataggttgtttcttgttgttgttgttgttgttgttgttgttttttgaggtggagtctcgctctgtcgcccaggctggagtgcagtggcgcgatctcggctcactgcaagctctgcctcccgggttcacgccattctactgcctcagcctcctgmgtagctgggactacaggcacctgccaccacgcccagctaatttttttgtattttttagtagagatggggtttcaccatgttagccaggatggtctcgatctcctgatctcgtgatscgccctccttggcctcccaaagtgctgggattacaggcgtgagccaccgtgcctggtcggtgttaacttattttaaaaatatatggagtttgcttgtgcccagtagttcaaggctgcagtaagctgtgatcgtgctactgcactttagcctgggagacagactctstctctctcttttttttttttttttgagacagagtctcgctctgtcaccaggctgcagtgcagtggcgcgatctcggctcactgcaacctccgcctcctgggttcgagcaattttcctgcctcagcctcctgagtagatgggactacaggcgcatgccaccacacccagctaatttttatatttttagtagagacggggtttcaccatgttagccaggatggtctcgatctcttgacctcgtgacctgcctgcctctgcctcccaaagtgctgggattacaggtgtgagccactgtgcccggcccagactctgtctcttaaaaaaaaaataagtaaaaaataaaaagtgtgtgtgtgtgtgtgtgtgtgtgtgtgtgtgtatttatatacatatataagctccttacctgaattttgtttggactctgtggttctatatatgtattttaagattttttactaaaatacttctgtgaacttttaaaaagttttttgagccctttctgtgctcatccaatgcatatcttctcttgtcacttgtcagtaattctcctgaatgcaagatttttctrcctcttctcaaaaatataaaattcgagtatgttggtgccttattttttctttacttaattctgtgtaggatgttgaattgttaatcttttaggtgctttttgtagaaagaagcactataaaggtgaggtattttactttttcaagtttggctaagagatggttggtatgtgttgggggtcagagtgctctgattaaagtgtcccaaactatctgggaacacatgattatatccttctgctgtgtagtgttctgggaatgtcagtggaatctgctcctgctgtggaggaagagaagggagaagagttggaacagaaggagaaagagaaggaagaagatacttcaggcaatactacacattcccttggtgctgaaggtagccttgtgcttttttcagaataatagactgttctaacttccctttaacatgatkgtgcagatgtctaaatttctcctctttattaggttgcagatttctcataattaaattgagagtcattaagaaatttgctagtaatttaaaatrttccacctgatttggtattcaggaatttgtagttcattggttagcccctttctgcatattgagttttcttcctcttgtattcatttgtttttcaaatatttttgtaatgtgtactttgtggggtgtaagtacagtctgaattgctgtgactgtgggtgtagtttatgatgtacctttagaaagcagacgtagtctccttataagattttatagtatgaagtatttttactttattacacattttcccccttcatctttaatgcacttattttttttaaatttattttttatttttttgcgacggagtcttgctctgttgcccaggttagagtgcagtggcgcaatcttggctcactgcaagctccgcctcctgggttcaagccattcttgtgcttcagcctcccgagtagccaggattacatgtgtgcgccaccacacctggctaatttttgtatttttagtagagatggggtttcaccatgttggccaggctggtcttgaccgcctgacctcaagtgattcacctaccttggcctcccaaatgccgggattataggtgtgagccaccrtgctcggccacatttattttttatttttgaaaaatttggggggtgcacagggctttgatgtgaaggacttaacgggaccctcctttgctgaggacagcagcttgtacattgcataatgttgtgggatgatacctaatttcttggcattttgttcctagatactgcctcatcacagttgggttttggggttctggaactctcccagagccaggatgttgaggaaaatactgtgccatatgaagtggacaaagagcagctacaatcagtaaccaccaactctggttataccaggctgtctgatgtggatgctaatactggtatgaaacatgttttctggcatttggagttgttgtgttttctcccatattagaggtagttattttttctttgataagttttgcagctatccaaattaatataatctaagtaatttagtaaggttgaagagttttctggtaaatacttgtcaattgttggtttgtgggctgaggttttaagttattggttactttcctttatagactgatgcctgtatatattttaaattggacttctgttaaaatctttgctttttaaaaaacatctgggactgtatctagtattttgaaaacttaattatctccttcctgtcattttataaaactctcagcaattaagcatgaagaacagtccaacgaagatatccccatagcagaacagtccagcaaggacatccctgtgacagcacagcccagtaaggatgtacatgttgtaaaagagcaaaatccaccacctgcaaggtaagccgaactttctaaaaaggatttacgagttttgctgtagggttatactaatgtcattttaccagatgaaaacatttttagaaattgttgatttttaaattattttccccttgtactgggcatacttgtggtccattggaaacgttgattatttatgaagtctcaagaattgttttttgtctgtctgtctgtctgtctgtttgaaacaaagtctcactatgttgccctgggctcatgtgattctctgccccagcctcccaagtactggggccacacttgactactaatcttatctttaggcattctacaaagacctttttttgttgattaaaaaaatttttttgttgtagaaatggagtctcgctatgttgctcaagctggtctcgaactcctgggctcaagtaatcctcctgcctcagcttcccaaagtgctgggattataggcgtgagccactctgcctagcctgcaatgatgttttaaggctgctctaactataagcatgactccgtaatctttggttgccactcctcctttgtgatctttgtctacagagacactgcttgtctgtgggaggtcttcttagcctctctggtgttatgaagagtaacatgactattttatttgaaagcctactgtttctatacttgaggagcacccagattgctttgggttcttaggtatcctgcatctggtattttatggtatcgatagatgtagggattttctcaggttctttaggctcttaacttggtaggaattggggaatgtgcctctgcttcatctctcgtgatttttataaccaaagcttcattacctctggccagtaagtgaagtttgaatatggcagaagaaaactgggatgcttccagtttgggataggggataaataaacagtattgttttgttatttccttcaatggaaagagtggggagagagtgtcctaagcaaagttgaatatcaagagaaattgtctttctaatgtaaaacactcagcataacagtgactttttaggcttttcttttagatgctgccttccatctagttatgctattctgtttaccctggggagtggtagaacaggtgaacctcataagtctctggaaaggggccagggatgaatgtcttatacatgttagtattgatctgaaggagaattggtttggggtttgggtmcatcaaatggaaaaggtcagcagaagatgtgtgtggcactagtaaggaggataattgacatcaaatgctttccatggaatgtcatggtttggactgttctccttactggcatcattggggtctggatcagaattctttatacaggtctagataacattatatgtaacaaaaattccccaagttactcatcagaaatcttagaaagcatgaagcacagtattgagcagagttgaagacaggtattggctgtgagagagagtgagacaggttttaaaatgggctgaggacttttatcactataaagagtagtttatttcctttttaatatataattatgtaaattagagccactggaatttttgaaattattaaagaaaaacacacaaaacaggaaaagctttttatttaaaaacatttgaacttargaactttttctcctggtgatatgaatttcctaggtcagaggacatgccttttagccccaaagcatctgttgctgctatggaagcaaaagaacagttgtctgcacaagaacttatggaaagtggactgcagattcagaagtcaccagagcctgaggttttgtcaactcaggaagacttgtttgaccagagcaataaaacaggtaccaagagtgatttgtcgttacagctcttctccaaagatctaaacttttactttagttctgaggctactggttaagttacaaagcattttataggtttgcagacttgtttgtgatatggaaggaaaacgtgtttctagtaattagtgagaagggctttttgggaataatttccatttaatattttgacataattttctctcttttggaaatgagatggtgaagaatagctaatacagtaaatttagtattatggatactagccattttctttttttcttttttttttttttgagatggagtctcactctgtcacccaggctggagtgcagtggcgcaatctcggctcactgcaagctccgcctcccgggatcatgccattctcctgcctcagcctccctagtagctgggactacaggcacccgccaccatgcttggctaattttttgtatttttagtagagatggggtttcactgtgttagccatgatggtcttgatctcctgaccttgtgatccgcctgccttggcctcccacagtgctgggcttacaggcatgagtcaccacacctggctgccattttctgttacatggctactatgtcttcaaatcttcaatatgatattaagcctaggtttttcatattcatctgggtaacagtttactaacttaatctgtttattagttaatctgacacagataggaatttaaaatctagcggaaaggacataaaacttaaaaggatataatttgtttcacacctctttaacctccaccaatctttcattccacagcctcagagagctagaaagcttgagttaattacyagcaaaacatattatgttggttgtaaggcgggaagggaagaaggctatcttcctttgctatgctgtgatacaggttgctgtgcaagacattcagagggtcaccgaggaacctttgttggtctcttactaaagttgtaaggttttatttaagaaattcttttacactgggattaatatagttgatactccatctattgctaaggggaagggaccaacaagagactcttcatagtataaaacagtaatggctgctcataaatccttttactcctttgagcaggcccaaatcttgaaaactgctgcatttataacatcaagtgtcatgtgcatttttttgacttctcccatctgtatcatggcatgagcttgacttcacctaaggtagacgttggaataaaaggctcatttgctgttttttaatagaagcatcacaagaaagaagagcagctaagcagaagtataaggattctggcttttattttatttatttatttatttttttgagacggagtctccctctgttgcccaggctggagtgcagtggtgcaatctcagctcactgcaacctctgcctagcaggttcaagtgatgctcctgccttagccttccaagtagctgggattacaggcgcataccaccacgcccagctaatttttgtatttttagtagagatgaggtttcaccatgttggtctggctagtcttgaactcctgacctcagatgatccacccgcctcagcctcccaaagtgctaggattacaggtgtgagccactgcgcccatccaggattctggcttttaatctccaagcttagatcatgacagaaaggactaaggaactcttcatcagttctttattcaagaagcccattgcgggggtggttaatgttcactcaagatttgtgctattgtagtagtccattcgttgtactataattagaaaacaatttctgcccttttggaaatatggaaatatgttggaaatatggatattactctttgcagtactgaatggtttttggcagctcagtagtgtcaatctgagaagtgcaactggaatttctttttttcagtatcttctgatggttgctctactccttcaagggaggaaggtgggtgttctttggcttccactcctgccaccactctgcatctcctgcagctctctggtcagaggtcccttgttcaggasagtctttccacgtaagtaagcctaaaatagcttatgccaaggcagtatgtgcctgagagtcttaggctaaggctgaaagaggctaaacttatctgctagtctagaattctttttgaaaccaaatggtagaacctatgcattagagctttggggatgaagaactgttgaaggcagataaatctgttgtcccatttgaaaattttataatagtagcccaaacgtttcactaagaaagaaaaggcgcagttatttagaaaatgttacacatccaaaacaagcattctgctcctctgttttacttgcaattcttctcatttaatagcagagggtggagaataggttgttaagttgacagtagttggatttctttatgttagggcaaagaggttcgcttgttggttttttttgtttagttttagttttctgatgaaaatgttcatggtctgactattattaggcaaaaaaatggaataattttttttatgtctcaaatctgcaaatgaatttatttcctagcactgctcattttgcttttaaatcatgatgtccttgtgtctgatcattsactttgcccttactctctttttgaaaaagttcttattttacaacagaaatgtctggtgtgggaaatagttattgaagtatttttggttcttccaccagcctcaggttgctgttggggaaaagtgctgataagtatttatctgaatgccttagatattttttcctgttaaaaagtaaaagcaaatacagaaatgcaaaactgtggctatggtaaaataacctgtgattctctctttatataaaggaattcttcagatcttgttgctccttctcctgatgctttccgatctactccttttatcgttcctagcagtcccacagagcaagaagggagacaaggtgagctctcttgatctgtctgttgatctcagattagaagaggagcaacactttttctgccttgcaaaatgtactacttctttgtactttagaatgcttgtgacctacacaattcggtaggactcatgtttgtctaacctttagggatgtgacctactgtaaagtgctgtcctcagttctttgcttttccttccttcctttttttttttttttttttgkctaaccccattgagaggtgacagcgtgctggcagtcctcacagccctcgctcgctctcggcgcctcctctgcctgggctcccactttggcggcacttgaggagcccttcagcccaccgctgcactgtgggatcccctttctgggctggccarggctggagcccgctccctcagcttgcagggaggcgtgcagggagaggtgcgagcagcaaccggggctgtgcgcggcgcttgcgggccagctggagttcctggtgggtgtgggcttggcgggtcctgcactcggagcagccggccggccctgccggcccyccgggcaatgaggggcttagcacccgggccagcggctrtggagggtgtactgggtcccccagcagtrctagcccacyggcgctgcgcttgatttctcgccgggccttacttagctgccttccagtggggcaggactcgggacctgcagcccgccatgcctgagccttccacccsctccgtgggctcctgtgtggctgagcctccctgatgagcactgccccctgctccacggcacctagtcccatcgaccacccaaagggctgaggagtgcrggagcacggcacaggactggtaggcagctccacctgcagccccsgtgcgagatccactgggtgaagccagctgggctgctgagtctggtgrggacgtggagaacctttatgtctagctcagggattgtaaatacaccaatcggcactctgtatctagctcagggtttgtaaacacaccagtsagcaccctgtgtctagctctgagtttgtgaatgcaccaatccacactctgtatctggctgctctggtgggacgtggagaacctttatgtctagctcagggattgtaaatacaccaatcggcactctgtttctagctcaaggtttgtaaacacaccaatcagcaccctgtgtctagctcagggtttgtgaatgtaccaatggacactctgtatctagctactctggtggggccttggagaacctttgtgtggacactctgtatctagctaatctggtggggacgtggagaacctttgtgtctagctcagggattgtaaatgcaccaatcagccccctgtcagcacagaccactgsctctaccaatcagcaggatgtgggtggggctagataagagaataaaagcaggctgcccgagccagcagtggcaacccgctcgggtccccttccacagtgtggaagctttgttctttcactctttgcaataaatcttgctactgctcactctttgggtccacgctgcttttatgagctgtaacactcactgcgaggtctgtagcttcactcctaaagccagcgagaccacgagcccactgggaggaacgaacaactctagacgcgctgccttaagagctgtaatactcaccgcgaaggtctgcagcttcactcctgaaccagcgagaccacgaacccaccagaaggaagaaactccgaacacatctgaacatcagaagggacagactcgagacgcgccaccttaagagctgtaactctcaccgtgagggtccgcggcttcattcttgacgtcagtgagaccaagaacccaccaattctggacacaccatcccccattctttgcttttctagcactaattctattgagatttctgtattggctcaatttttaaaaaggctctgaaggaaaaatttttgtttttaaagttgaactgaaatgaattagtatggggaagaactggacttattaataatggcctacttgtttctagcaacacgtgaacacatttctggtgagaaggaaccagcaattgtttcttgtggtccttataggttatttttgctattaaaatagttttagcataagaatggttaagagtaggtggtaaaaattttaacttcattcatttactcctttgacgacttagagattttatattactttattcacaagaaagctttccttttcacttacctaatttatctcattatttaagcttcttttgctctgacctagtctcctatccagtcattcaagatgtttctaagttcttamgatttctacaaagctttttctaataaattctatgattttcatcttttcactctttcatatacaagtaayggtataatagttttatttattgagcacttagtataggcaaggcattgttctaagggcatttctgtggtttttctcattgaatcctcacaaacatcctaagaaggaggtgttatttttatccccattttacagatgaggaaatggaggcatagagagattttkcaactaatgagatgtagaagcagaatttgaactcaggcagctgcctccagagcctgtgccttcatctgtcatgtatatgcctcctattatatcctttctctgctcttgagtaacataaaacatagacatttaacagtttttcaaatgtaatttatcagtgatagaatttgatcttaggctttcttctgctacaaagtttgtctctggctgtttctcttaaaatcagttgtaggtatccaaattgactaatatcaatctaagcataacatgattagtgactgatatcaatctaagtataacatgattaggtgaattaattctacaaaaacccaggtaatacaagtgaagtttggttaattcttaaaacartttcttttatcttttatctgtagtgtgaacattgaaaaaatataaaaataattatattaaatatactttctcaggctgggcacggtgtctcacacctgtaatcccaatactttgggaggccaaggtgggcagatcacctgaggtcaggagtttgagaccagcctggccaccatggtgaaaccccatctctactaaaaatataaaaaattaactgggtgtggtggcgggtgcctgtaatcccagctactcaggaggctgaggcaggagaatcacttgaacctgggaggcggaggttgcagtgagccaaggtggcaccactgcgtcgcagcctggacaacagagcgagaccctgtctcaaaaaaaaaaaagctttctccctgattgtaaacagtcaatatttattgtagaaagtttgttaagtatataggaaattaatgaaaataaaaatcacctgtgatactacactccagatatagctacaactagtatatttggatatatttcagttttcaatgcataaagtagttttacataattggcatgttgtgtatatgactcagttttttttttttatgtaacagtgtattttcccttgtcagttakattttagatttaatgcatttgcttaatatgtatgtacatcagtgtttgtgaaactatatgtgctttttgtatttatttgtttttttgcttttctcttaacctaaagccttttttgtatgtagtgcctataacagcaggtttttaatgtgctttgtcatggcaagaaagttcaaaaggtgcaacaaaaatacttagcacagctatggtagtatattaaaggcctgtagcactggatcccaaattaggtgtagactggtaaggttgagactaagctaagcagcaaagctgggtattgaggttgcagtttgggtagctggtagcatgaatgtgaattatggggaaaaggtaaatgttgttagtagtttgtgagtggtctagaggaagcctggttggggtcaagttgtaagataggggatacaaatgatgaatcaaatacttagctagctgggctgactccaagcaagttcctgatagcctacaggtgggtagtatactatgggaaagcagtgttttgtgttttgtgtgtgtgtgttccctcctaatgtgtgtcaggattagtgtcttctctttcttagttctttgataaatcagtgctgattggcattgatagattttttttcttcatctgtatttgtacaggcatccatctctctgcagttagcaattgttaatgcaaatataatcagttcgtaaatatgaattatagatactgtatttacctaaagtggtgacaaattcactgtctttcaaggcctgtggtagaatatatgatggttaaattaggtaccagtagtttgggcttttctacaggaaatgtgaaaaactgagctataaaatcaggaaaggagccaagttaatttaacattttttatgaatgggtgggtagccccagatgcatccagttttgatctatacctaaaaataggagcttggactgctccgccamccaaaggaagtattggtagattgctaggacccagtctactattattctgtcagcttttctgaaaaattacgtcactatttttttagagtgaaaatgtctgtagtgtaattgttcttagtggttttggaacatgagtaatattgatgagtgatatttctcaatttgtttctcctgttttaaaccagataagccaatggacacgtcagtgttatctgaagaaggaggagagccttttcagaagaaacttcaaagtrgtgaaccagtggarttagaaaacccccctctcctgcctgagtccactgtatcaccacaagcctcaacaccaatatctcagagcacaccagtcttccctcctgggtcacttcctatcccatcccagcctcagttttctcatgtgagtattgtaaaaagagttgtttctcctaacatatttttttaaagcagcattattggggtataatttacataccataaaattcacacgttttaaatgtataattttgtgatattttagtaaatttacagagtkgtgaagctgtcgtcacaaarcagttttagaacagttccaaagtcacctaacatcttgatttttttttatgtttaaactttttacaatgtctttaaactttttgaaaatgttactgcaaaattgcgaagtgacataaatcattattctactttaacacaactgttactgtaatttttgtctttctacatgcttatggtttttttwaataaatttttttgcctatgacacagcctcaggaggtcctgacgatatgtgcccccacatgcttatgttttttaaaaaaggtgtttatatagcacaactttaattttctttttccagttaatgttgtgtcgtaataattctcagtgttatattgtcttcacttatcctttcaaaagtcatgtattatttctctaagtagatgtgatctcagtacaggatcatcctatacttagggtatcaagatggtttttagttttccaatgtgtattttcttctaaaagcgagggaaaactattaatttgtataattttaaatttaaatatttaaagaaatgaaattcaggtttcatactgagttgaaaatcyttaaatctaaatgactattatatattcaatctaaatacctattcttataagaccttaagtgggggaattattgtagttttattgggasaacttattttacccctttcagtttgcaggtgttataacaagagtttgtatttaaaagtraaatttgaaaatgaatagtaatgaactgtaaatttagtgaggaggggacagtaggaagaaattgatttgttttctggagttttaaaacttgttttgttaaaggatttcattttatgcagttcattagaatttggtagcgttattaaaaatgaggactctagagtcagaacttcctggactcgctcctggctctgtcattactacctttgtgaccaattgaaattgaatcttagtttgctcatcagtcaaatgatggggatattgatactgtctacctcgtaggatgtttatgaaaggttgagttaatatatataaaatgcttagactagtgccttgcacttggtwctgcatataagggtagctgttgttggcagtgaaagggttaaaaacaaggttacctagaggtgaaatggatgttcgaaccatacatcattttctttagctttttttttttttttttgagacaggatcttggtctgttgcccaggctggagtgcagtggtgcgaccatggstcactgcagccttgacttcccagtctcaagtgatcctcccacctcagcatcccaagtagctggaactacaggcacatggcaccatgcccarctaatttcttaatttttcttatagagacggggtatcactatgttgccagggctgttcttaaactcttgggctcaagcaatcctcctctctcmgcctcccagtgtgttgagattacaggtgtgggccaccgtacctggccttctttagcttttatttttctaagttatatgtgaacatagctgggcatggtggggcatgcctgtaatctcagctgctcaggagattgaggtgggaggagcatttgaacctaggagttmgagaacagcttgggcaaaatagcaagaccctgtctcaaaaaaaaaaaaagttataaatctgaccaggtgtggtggctcatgcctgtaatcccagcmctttgggaggccgaggcaggcggatcacttgagaccaggagttcaagaccagcatggccagcacagtgaaacccagtctctaccaaaaaatacaaaaattagccaggcatgctggcacgcacctgtagtcccagctatttggaaggctgaggcaggagaatcgcttgaacctaggaggcagaggttacagtgagctgagatcgcgccactgcactgcagcctgggcaacagtgaggccctgtcttaaaaaaaaaaaaaaagagtttaagaatgagctataaacactgacacagagcactgagaagattcttccaacactgatttaaagaaaatggttacagatgtttatcagtgaccaaacgagacttttatggtctttggaaaggtattcctgctggytgggggggtggagatratgcctggccacaaagggagaatggacgttttgaaaaacaaggcactgttgaaggaaytgctctattttcaacatttaccaaagaccttcagaattagctaaaaaatcagcaatgaaaatttgagacaaatgagtgattctgaacatagttcagagattcttggaacctaagatgactctaatcaggtttctttgaactcatattttataagatgccttagccagtgcagtccatgcctcctgaaaagtctctcaagaatacctttagtaggccgggygcagtagcccacacctataattgcagcactttgggaggccgaggtgggaggatcacgtgagcccaggagtttgagaacagcctgggcaacatagcgagaccccatttctacaaatggtcaaaaatagccaggagtggtggtgtgtgcctgtagtcccagctgctcaggaggctgaggcaggagaattgcctggagaattgcttgawtctgggaagttgaggctgcagtgagccatgatcatgccacagcactcagcttgagcracagagtgagaccttgtctcaaaaaaaaaaaagaatacctttacaacatagcttttaagttaaagatttgattttacttaataagcatgtgtaaaaccccaaaaataagtcagatagttaaaacaaggcctcttcctcttcctacccaaagataaccacttttcgttctttatgctttttcttttggtatttacctccataattctacatagcatgattatattttctttttcttaggcacagggtcttgacctgttgctcaggctggaatgcagtggagcaatcatagctcactgtaacctcgaacttctgtactcaggccatcctcccacctcggcctcctgagtagctaggactastggcacacactatcacacctggctaattaaaaatttttttgtagagatgggacctcactatgttgcccaggctggtcttgaactactgggctcaagcagacctcctgccttggcctcccaaaatgctgggattacatacagatgtgagctaccgtgcccagcctattttcataaaaaaattttagccattttccaagtatagttacatcgtaattttgtttagattattactgagtttacattataactatgtaaacaattcacagcagagcctatgacatattattaatagtttttcatgtttcttttctctgaaattgtaattgtctttttttatttgtttagttttctttgactctcattaaatcaaccctagattctccaccaattgtcagaaactcctttcaggatgttgaggagccttagactttctgtttcatctttttggagaaacctcttttggaccctcctgatttctaatctgtactgttgccctctatgcctggtgcataactgttaacctcygttcactgtcatccgtggagattctccttacctgtctgtgttggatacctcttgggtttcatatcttcttgcttggtttactccctcattttggtgggggacattgtttagtagcctttattctgctatcacacttgatttgtagtttgcaggagtatagaattctagattggaaataattttcctttaaagattttgaaggcattgctcttttgtcttccaacttccagtgctgctgttaagtgtgagggtcaggtcagccatggtggctcatgcctgtaatcttagcactttgggaggctaaggtgggaggatcacttgaagccaggagtttgagaccagcctgggcaacatggccagaccctgtctgtaccaaaacaaaacaaaacaacaacaacaacaacaacaaaaaacaaaacagtgtgaaggcagtctgatcttgacttttaataggtgatctggtttttctttactggaatcctgtaggattttctcttcgttcccagtgttctgaaatttccagacctttgggatacgtctattttcattcattgtattgggtacttgscaggccctctcaatttagaaactcaggtccttcagttcaaagaaatttatttctttaatttcttcccctttgttttctctgttcttcttctttttttaatggactatctgttgtttggatgttgaaactcctagaatagtcttctaattttattttgcctcctacttttgatcatctctgtctcttttagttcaacttgctgggtgatttcttcaatcattaaaaaaacagtggctatattgagatgtaattcacataccattcagtttacccatttaaagtgcacaatccagtggtttttagtatattcatagagttgtgcaaccatcaccatgatctaatttcagaatagtttcatcacctcctcaaaacccatgccctttagcactcactcaacatttcttctaccctcggcccttmgagggtagtctactttctgtctctatagatttgtagacaccagtctacaaatggaaagtagacaccagtctactttctgtctctatagatttgcctattctggacatttcatataaatggaattataaaatatatagcctttgtgaatggcttctttcatttagcataatgttttcaggattcacctgtgttgtagcatgtatcagattttcattcctttttttgtattgatctatccttgtctataaaaaatataaaggaaaaaagaatttcattccttttttatttatttatttatttatttttctttttgagatggagtttcgtacttgttgcccatgctggagtgcaatggcatgwtcttggctcactgcaaccttcgcctcccaggttcaagcgattctcctgccttagcctcctgagtagctgggattacaggcatgcaccaccatgcctggcaaattttgtattttttttttagtagagacggggtttctccatgttggtcaggctggtcttgaactcccgacctcaggtgatccgcctgtctcggcctcccaaagtgctgggattacaggcatgagccaccacgcctggccttcattcctttttattgctgaataatacaattgtgtggatataccacagttactcatggattcgtcagttgatggacgtttgggttgtttccccttttggctattgtgaataatgctgctatgtacatttatggacaagtttgtgtgtgaacatggttttatttctcttatgtatacctacaggtgccattgcccagttcaaccatcttttaattcttctcttagttattaatttctactcttgggtttttaatttctaaattcttttttcagaatatatttttaaataccatttctcttgttttattgatatactatcttatctctgtaacagtattaataacagttttcttctgtctggaatagtcctatttcttccaggtggactttagttttgtttgttttgatctctttcaaattagaggctttcctcagatgtctggtaatctttgattatttgctgatgttcaagagtgaaatatcagacagatgattagtagttctgagtgggtggttgggtcttattgtttttgggatttgctgtaatgtgatccgctgagacattttattgggagtcccataatgtcagtatcttgattcatcttggccyggtcagatcccttaggaaaatgtctgatctcctatttgcagggtattggcctggctgtactagaggtctattaatggaagcgggctttgggtgggaaggggggttgggaggcaggtgcaggtttcattcaatatgtagattttcatttaatctccgtattttcagtattgtacttcctgataactgtgcctcttgtstgccagtcctgggacactctgttttactctctccagggcagaggaggggcagggtgagattatgggtgttggaactgtggtgtaactctggtggtttgttggctttctccactgctggcttaggaattcagctttcactcttctgctaaatagattaccttttccagattttttttgcagttctcttttcttctgttctctttttcttgaagttttgtgcttaagaaaaatccctttaccattacttamtgggattkcagaaaactctgaatatgtgtatatttagttctccatttctattaagttccctacttttttcattatatgtcaaacttattcttgttattcttaatgggtaacccttgttcatctgttatttcttttgtaccttggttactggagtccaagtcaacctaattttgatgttgtaagatttaaatatgtgtaaagagattagtactattcaagagaaaattgggataaaggtaattttgtctatttttttctttctttcctaataaacttgtcaattgcatagcctctttgaccctttaccaagatatgagggatggggagaggattagtagaacacagtttgatagttaacattttctcattcttgatatatgtattaattttggtgaggacaaattagacaattaaatgktttcaaactagaatagtggtggtggtggcataacattgtaaatgcaccaaatgccattgaattattttatttttgtttttgtgttttttttgagatggagtctcactctgtcgcccaggctggagtgcagtggcatgatctcagctcactgcaacctcctcctcctgagttcaagtgattctcctgcctcagcaccccaagtaactgggacaaaaagtgcacaccaccatgcccagctaatgtttgtatttttagtagagatggggtttcaccatgttggccaggctgttctcaaacttctgaccttaagtgatctgcctgccttggcctcccaaagtgctggaattacaggcatgagccaccacgcctggcctgaattgtttagtttaaaatgggttaattttatattgtgagtttcatttaaaaaaaggtatttatagctttacgttagtgatgttttatctrtgagactttgtaaaatgacttattttttgcaacaagggaaaaaatacatatgtcttgcagaagatgtggtcatgcttggtggcttacacctgtaataccagtgctttgggaggccaaggtgggaggatagcttgagctaggagtgtgacagcagcctgggcaacatagtgaggcccccgtctctacccaccaaaagaaaaaaaaaattagccggatgtggtgacgtgtgcctgtagtcccagctcctggtgctggggagcagtatgagcggggaagattgcttgagttcaggtgtttgaagctgcagtgaactatgattgtgccactgccctctggcctgggtgacaaagcaagaccccatcttgaagaaaagaaaaaagaraagataagatcattagttattctacctcagaaataacaactcttagctttttttttttttttttttttttttttttttttttttgagatgaagtctcgctctccacgtgtctggcaaatttttgtgtttttagtagagatggggtttcaccttgttggtcaggctggtctcgaactcctgacctcaggtgatccacctgcctcagcctcccaatgtgctgggattacaggtgtaagccatcacacctggccctcttagctttttttgatatatgtttattaactaaaattacatgaagattatatattataaaatgtgtaaaaagagtagaatggccaggttctgtggctcacgcttgtaatcccagctttgggaggccgaggcagaccaatcacttgaggtcaggagtttgagaccggcctggccaacacggtgaaaccccatctctactaaaaagtacaaaaattagccgggtgtggtggcgggcacctgtaatcccagttactctggaggctgagscaggaaaatcacttgaacctgggaggtggaggttgcagtgagcggagatggtgccactgcacttcagcctgggtgacagaacaagactgtgtctcaaaaaaaaaaaaatataatgtatatccacataattttttactaaaatagaaacttctttctatagcccaaatgttttttgatcttttagtattcttctactgtatacttttatgtagaccacaaaacattctatcatgtgatagatcacaatttaaaaattattatcttggccggacgaggtagctcatgcccgtaatcccagcactctgggagttcgaggtgggcagattgcttgaacctaggagttcaggatcagcctgggcaacatggcaaaatctcgtctctacaaaaaatactaaaaaattaggtgtggtggtgtgtgcctgtattcccagctactcgggaggctgaggtaagagaatcacttgagcctaggaggtcaagactgcagtgagccatgatcgcattactgcactccagcctgggcaacagagcaagacctgtctcaaaaaaaaaataaaataaaattcctatttgtaaccatttaaggtatttcatattgtttcctattctaaataataatatagcagtgaaccattttgtagctaagtattagtgtgctttcattgattaatttcccagaaatggaattattggattatggggtatagaatttcagggctgttgtgttttgctaaattgccatttagaaatgttgaaccttttttttttttttccttttgaggcagggtcttactctgttgtacaggctggagtgcagtggcacaatcacactgctcactgcagccttaaccatccaggctcccaagtagctgtgaccacagacgtgtgccaccacactcagctaatgttttttttttttttggtagagacagggtctcactttgttgcgcaggcttatctcaaactcctgggctcaagtaatccttctgcctcggccttccaaagtgttgggattataagttagagccactgcatctggcttgaaccagtttatactcagtcatgtctgagagtatatgaacagattcaaacttaggatcattgttacaatctgataggataaacaataataccagacattgaaatatcagaagttatggaatatacagaatgctttactacccatttgattcctcattcccttaaaaatcataggaaaaaaagcctgrgcgtggtggctcatgcctgtaatcctagcagtttgggaggctaagctgggcagattgctcaagcccaggattttgaaacaagcctgggcaacaaaatgagaccctctctacaaaaaatacaaaaattacctggctctggtggtgcgcacctgtagttccagctactcgggagactgaggtgggaggatcagttgagtccaagacattaaggctgcmatgagccgtgattaagccactgcactccagcctggctggcagagcgagaccttgtctcaaaacaaaacaaaacaaaacaaaacataggaaatgaatgcctaaccatctatgttgggagttttacatcatttacattaggcaaaataacacactaaatgtaaaatctcttataaaaacagctaagttttgtattaatttctctttttaaaaatattgaagtattggttacataaaataaaattattttacgtgtatgttttgatgaattttggcaaatgtatacagctgtgtaamcatcaccaccatcaaagtagagagcagttccctcaccctaaaaagtttccttataaccttttgtggttgatctccctgctgcccagtatactcccttctcccgccctaggcaatcacacatcagctttctgtcagtatagttttggtatttcagtagtttcaagtctgggcaatatagcaggatcccatttctaaaagacattttaaaaattacctgggtgttgtggcgcccacctgtattcccagctacttgggaggctgaggtgagagattgcttgagcccaggaaattgaggctgcagtgagctgtgatctcaccactgcactccagarcctaggcaacagagtgaagccttgtctttaaaaaaaaaaaagaaaaaaaagaatttcatgcaattggaatcaggaagtgtgtgtggtcttttatttttgagctcttttacttagcatatttttgagatttgcttgtattatacatattcatattttattccatttatattgttggatagtgttccataatatgtgtatccacaatttgtttattcattcaccaattgataggacatttggttctagtttttggttattttgaataatctattcaattataattaatatatgaccattatatgagtgaatatatgaataatttcccatgaatttatgaataataatcctatgatcatttgcacatcttttttttggagacagactctcgctctgtcgctgaggctggagtgcagtggcgtgattttgcctcactgcaacctctgcctcctgggttcaagcaattctcgtgcctcagcctctgggtagctgggatcacaggtgtgcaccaccatgcccagctaatttttgtatttttagtaggggcgggatttcaccatgttggccaggctgacctcgaactcctggcctcaagagatctgcctgtcttggcctcccaaagtgctgagaatacaaatgtgagccactgtgcctggccagcatgcacatcttacgaataataattctgtgatcatttggatgcacatctttctgtgggcacatatttttatttttcttgggtaaatgcctacaagcagaatgcctaggttatatagtaatgaatgttcaactttataagatactgccatactgtttttccaaagtgggtgtaacaytttgcattcccagcagcaatgtacgagagttgcagttgttcaacatcgttgctaatcctgggttttgtgaacckttttttttttgtctttttttgggacagagtctttctctgtcacccaggctagtgtacagtgagtggtacaataatagctcactgcagccttgaactcctgtggctcaaggatcctgctgcctcagcctccygagtagctgggactgtagggacacaataccatgcctggctaatttttaaagtttctgtagacatggggtgtagccatgttgtccaggctggtcttgaactcctgggctyaagcagttttcccacctcagcctccccaaagtgctgggattacaggtgtgagccaccatccctggctgagccacgatgcctgactgttttgtgaactattttaacattagtttgctttttttttttgagatatagtctcacttgttgcccaggctggagtacaatgtcacgatctcagctcactgcaacctctgccttctgcctcctgggttcaagtgattctcctgcctcagccttgtgagtagctgggactacaggtgcacgccaccatgcccggctaatttttgtatttttagtagagatggggtttcaccatgttggccaggttggtctcgaacttctgacgtcaggtgatccgcctgccttggcctactaaagtgctgggattacaggtgtgagccaccgtgcctggcctwtgttagttgcttttgttgcgtgtagtggtatttcattgtgattttaatttgtatttctctgttgactattgatattttgtaagctttggattttatttattattatyaktattattattactattttttgagatggagtcttgctctgtaatccagactggagtgcaatgacacgatcttggctcactgcaacctctgcctccgcggttcaagccattcttctgcctcagtttcttgagtagctgggattacagccatgcaccaccccacccggctaattcttgtatttttggtagagacagggtttcgccatgttggccaggctggtcttgaactcctgacctcaggtgatatacctgcctcagcctcccaaaatgctgggataataggcatgagctaccacacctggccactggattttaatacctgytttatgaatgctagctttttttttttttttttttttttttttttttgagatggagtctcactcygtcacccaggctggagtgcagtggtgcaatctcggcttactgcaacctccgcctccaaggttcaagtgattctcctgcctcagcctcccaagtagctgggattacaggtgcccaccascacgcctggctgatttttttgtatttttagtagagacagggtttcaccgtgttgaatgctagcacattttgaaatcgtgaagtaaaatgagtacgtatccccactttgtgagaactgaaatgggctggagcatgtgccactgctcctggctatactagagttctttaattcttaaatttgatttagaaattttatatgaatttaaaaatttgatttagaaatttgattttagaaattttatatgaatccaaggattcgatataaaagatatatgatcatgtacaaattacaatttgtctctttctgttcttccttaggacatttttattccttccccaagtctggaagaacaatcaaatgatgggaagaaagatggagatatgcatagttcatctttgacagttgagtgttctaaaacttcagagattgaaccaaagaattcccctgaggatcttgggctatctttgacaggggattcttgcaagttgatgctttctacaagtgaatatagtcagtccccaaagatggagagcttgagttctcacagaattgatgaagatggagaaaacacacagattgaggatacggaacccatgtctccagttctcaattctaaatttgttcctgctgaaaatgatagtatcctgatgaatccagcacaggatggtgaagtacaactgagtcagaatgatgacaaaacaaagggagatgatacagacaccagggatgacattagtattttagccactggttgcaagggcagagaagaaacggtagcagaagatgtttgtattgatctcacttgtgattcggggagtcaggcagttccgtcaccagctactcgatctgaggcactttctagtgtgttagatcaggaggaagctatggaaattaaagaacaccatccagaggaggggtcttcagggtctgaggtggaagaaatccctgagacaccttgtgaaagtcaaggagaggaactcaaagaagaaaatatggagagtgttccgttgcacctttctctkactgaaactcagtcccragggttgtgtcttcaaaaggaaatgccaaaaaaagaatgctcagaagctatggaagttgaaaccagtgtgattagtattgattcccctcaaaagttggcaatacttgaccaagaattggaacataaggaacaggaagcttgggaagaagctacttcagaggactccagtgttgtcattgtagatgtgaaagagccatctcccagagttgatgtttcttgtgaacctttggagggagtggagaagtgctcagattcccagtcatgggaggatattgctccagaaatagaaccatgtgctgagaatagattagacaccaaggaagaaaagagtgtagaatatgaaggagatctgaaatcagggactgcagaaacagaacctgtagagcaagaytcttcacagccttccttacctttagtgagagcagatgatcctttaagacttgaccaggagttgcagcagccccaaactcaggagaaaacaagtaattcattaacagaagactcaaaaatggctaatgcaaagcagctaagctcagatgcagaggcccagaagctggggaagccctctgcccatgcctcacaaagcttctgtgaaagttctagtggtgagtgtgattgtagattattcttgtctccacctaaattataatctggaatggaaagttggcgagaactgcatgcttatgtcaggagtgaacactatctttggtttatgtttatgaacaaccaataataattgggaaattaaattttttggattgcctttttttttttttgagacagagtcccgctctgttgcccaggctggagtacagtggtgcagtctcagctccctgcaacctccacctcccgggttcaagtgatttctcgtgcctcagcctcccaagtagctgggactataggctcatgccactatctggctaatttttgtgtatttttagtagagatggggtttcaccatgttagccaggctagtctcgaactcctgactcaagtgatctacctgccttggccttccaaagtgctgggattacagggatgagtcaccacgcccaacctggattgtatttttttaatagctataattatttgtgcaattaaagatatttgaggtttatcagctttgtaactcgggactagttggtaaaaaatatttagaaattgtaccaatctgttttttttttacttagattgtatccttgctctctgtgtatagattttgacagttgccttgaagtagaaggatcttttttgattaactctgtgtggtaaaatcacattcagaactgttgatgagtatcctattaattagttatttcctttttatgggcattaggtaaagtttctaaacttagttcaaaaaatacatatctcttaaacctgaaactggaaaatgtattagttcttgktctttattttawgaaattcagcatgaaaacgtwrattactttctaaagtatttgtacaggctgggtgcagtggctcacgcctgtaatcctmacwctttggrrggccaaggtgggcggattgcctgagctcaggagtttgagaccagcctggctaacatggtgaaacccatctccactaaaatacaaaaaattwgccaggtgtgtcgtgtgtaccagtagttccagctactcgggaggctgaggcatgagaatcgcttgaacctgagaggcagaggttgcagtgagccaagatcacgccactgcattgcagcctgggcaacagagtgagactctgtttcccaaaaataaaataaaataatttgtagagtatgacattagctgaaaataattcaatctttctgaatccttagagttagtataatgtaggtcaggcgtggtggctcacgcctgtaatcccagcactttgggaggctgaggccagcagatcgcctgargtcggaagtttgagactagcctgaccaacatggagaaaccctgtctttaccaaaaacacaaaattagccaggagtgctggcaggcgcctataatcccagctactcgggaggctgagacaggagaatcacttgaacccgggagatggaggttgcgatgagctgagattgcgccattgcactacagcctgggcaacaagagtgaaactctgtctcaaaaaaaaaaagagttattataatgtaaaatcaagctccaaaaacaaaataacaagacacaaacttaagaaaacaagtttttaggatgaaatgaaaaaacagtatttggcaggtttacatatgatagtatgagtgaccatattttttggtttgcgtagaacagtcccttttttttgagatgtggagtcttgctctgttgctgggctggagtgcagtggcgcaatctcagctcactgcaacctctgcctcccgggttcaagcaattctcctgcctcagcctctcgagtagctgggactacaggtgcatgccaccatgcccagctaatttttgtatttttagtagagacggggtttcaccatgctggccaggatggtttcaatctcctgacctcgtcatctgccttcctcrrcctccaaagtgctgggattacaggcgtgagccgctgcacccagcctagaacagtcccattttatacccattgtctaagtgtgattattaatagtactttttttttagtttttaaattgtccctattggccgggtgcggtggctcacgcctgtaatcccagcactttgagaagccaaggcgggcgggtcacctgagatcaggagttcgagaccagccttgccaacatgatgaaacctcatctctactaaaaatacaaaaattagcctggaatgatgacgggtgcctgtagtcccagctactctggaggctgaggcacgagaagccgagattgtatcactgcactccagcttaggtgacagaatgagactccgcctcaaaaaaaaaaaaagtccctatttattagcttttatatttagcactttttttttatcttaagaataagaaatgttagagctaaaaaggaagtgaggggttattggatttagtctcttcttaacgtcttttggctagttaatgatagaggtgagactagaacctaggtctcctgatcccagctgtgctttttcttcctgtaaaactgcttaatacagattatttgattctgaagagctgtagtgaagaacaatgtgaataacctaaaattctgtagtagagtatttttctaattgtattatgtttaaatactgctaatgacctgtgccaacaaaatatcaggtctctttgattgttttaatatagttattttggagtactttttttttttttttttttttttttgagacggagtctcactttttcgcccaagctggactgcagtggcgctatcccggctcactgcaagctccgcctcttgggttcatgccattctcctgcgtcagcctcccgagtagctgggattacaggcgcccaccaccacgtccggctaattttttgtatttttagtagagacggggtttcaccgtgttagccaggatggtctcgatctcctgacctcgtgatccgcccgcctcggcctcccaaagtgctgggattacaggcgtgagccaccgcgcccggcctggagtacttttaaattaaatgcaaaagaagcttctaaaacagtgagatattctattattttaatagtattcttcatgaattcttgtttacattgttaattggcagagtcagctttttttgccgtagtaaaacttattattttattaacattaatatccagattattgaaaatgctagtgatttcgtgtttatttcatgattttagttcttgggcaaacaacaaaaagtaatgaagacagtggttggaaaatagtatttatgaggagaagttaaataaaaataattttaactacaaattagaacatgaagggagaataatagctttttrtctttttttttgtttgtttttgagccagggtctcactctgtcgcccaggctggagtgcagtggcaccatcaatgttcactgcagccttgacctcccgggctcaggtgatcctcccacttcagccccccgccccgagaagccgggactacaggcgtgtaccagcatgcttggctgattttttgtagagacagggttttgccatgttgcccaggctgatctcgaactcttggattcaggcaatccacccaccttggcctcccagagtgccaggattacaggtatgagccaccgtgctcagccgagaacaatagtttttaacttagaraattgtataaaataaatcattcagaagagcgttgcaaaaagaacagaaaaatattattttgtacttaaaaatatagttgtttagttgctaaatgttgagagactaattttatttttatttttttggaacagagtcttgctctgtcgcccaggctggagtgcagtgacatgatctcggctcactgcaacctccgcctcccaggttcaagtgattcttgtgcctcagcctcctgagtagctggaattataggcacatgtcaccatgcctggctaatttttgtatttttagtagagacagggttttgccatgttggccaggctggtctcgaagtcctggcctcaagtaatccacctgccttggcctctcaaagtgccgggattacaggtatgagccactgggcctggccaaatttaaatgatagtaatctaaaaagtaatggttcttcacttttacactgttggtgggactgtaaactagttcaaccattgtggaagtcactgtggcgattcctcagggatctagaactagaaataccatttgacccagccatcccattactgggtatatacccaaaggactataaatcatgctgctataaaaacacatgcagacgtatgtttattgcggcactattcacaatagcaaagacttggaaccatcccaaatgtccaacaatgatagactggattaagaaaatgtggcacatatacaccatggaatactatgcagccataaaaaatgatgagttcgtgtcctttgtagggacatggatgaaattggaaatcatcattctcagtaaactatcgcaaggacaaaaaaccaaacacygcatgttctcactcatagatgggaatagaacaatgagaacacatggacacaggaaggggaacatcacactctggggactgttgtggggtggggggacgggggagggataacattgagagatatacctaatgctaaatgacgagttgatgggtgcagcacaccagcatggcacatgtatacgtgtgtgactaacctgcacattgtgcacatgtaccctaaaacttaaagtataataattaaaaaaaaaaagaaaaaaagtaatggttcttcagtctgaaaagacagaatgaaaggtgtgaattgggtgagttttgcatttgttcatctactattagaagagcacttttttgttgttaatagatttattgattttaaaaaaagatacatgcttggccaggcatggtggcgtgcacgcgtaattccagttacttaggaggctgaggcttgagaatcacttgaactcgggaggcggaggttgtagtaagctgagattgcaccactgcactttagcctgcgcaacagggcgagaccctgtctcmaataaataagtaaataaataatgcatgcttaattttgaaaaacattcaaacaatacaaagtagagattctgagtggggagggtgtggggagagagggagttggaaggaaaagagagagtgagtacagagagggagagagagaattactttaaatgtctccatttatagataacttgtcactgttaacagtttggagacctcttcaagtatctgtctatggagagctcctgttaaacctgtaaaaaagcaagatggtacttggaagcccaatcttgttcaacacagaacaaatatttggtgggttgatgatgtgaaaaactgtaaggagttcagtaagtctttaaatccataagtaatagtctgtaatagttaataatgatcaggggatctagatgtgttttaggctctagctataacctttatttgcttacttgatagaatgccatcttaattggctattaatrtcagaggcagacttttggggtagacttcatgcatgatatcgccggatatataaattcttacatttttaactagatggcttttaataaattcttaggggtaaccagttcttttaagaacaaagaagaaaaatgggtttaaaactataacagaaagttaggagagaccttcttaacatttagagttttaaatattgctttggagttattctctaaagtccttaaaggacacatactcccactcaggtggtttcaaaattagtattgagtttccttttgtttcctcattcatatccttcattattgtttggtatgctgacctacaacatgatagcccatgattatctggaaaaacaagaagggatttgataatttaaagaatgtaggattgctaaatgttagagaaataatggaatatgtggaaaattccgtaagtttaaaaggataaaatataccagcaaatgtatttttaaggatttggcaatagtttgagtagatgtgtggtgttttccagatgagggaacaaaagcatagaaatgggaaacctttggaggacattgaatagaagctttatgaacgtgaataattaaagaaaaactggagatataggctgctactagttagttgaatgctgactatagagttgggaatttgtcttctagtgaaaaccttgaagttttttgaccaggagctaacaaagccatgttttctaggaaggctgcagaaagtgtgcagaaagaatgggggttagggagagtgggagactttaggcagaggaagtgattgataggctatggtaataatccaggaatgaggcattggagacctgaggagagtagtggcagtgctgtccctagggcctgtaaaagtctsaattttccattaggttatagtaatgcagttagataaatggtgctaaaattactttccataagttttatgtaatactgtgcaaaggaaaccttgttacagggatatattttcagcgattaatgcttgcatattgcatttgcgtaatatagtatgtcacatagaaaggtctgcttaaagatttcatgcacattttcagaagtctggaatatatgaggctttgcaaggtgttttttaagtttctgtatctcttctaagttctttattagaacaacttgctttataaggggctaccacagaatgaatgcttatctacctgacccatttctcttttctgtaactatggtggatgtctgtcagttagatgtaatgttgagattcttcatccatactgtttacaggtttgtttttgttttgttttgttttgtttttttgaggcacggtctcgctctgtcatccaggctgtagtgcggtggcaccatcttggcttactgcaacctctgcctcccaggttcaagcagttctcctgcctcagyctcctgagtagctgggattacaggcacctgccactacacccagctaatttttgtatttttagtggagacrgggtttcattattttggccaggctggtctcgaacttctgacctcaagtgatccatccgccttcgtctcccaaagtgttgggattacaggcatgagccatggtacctggcccctctttacagtttctttagctgagyatatgtactttaatcctttatttctaaagaccatttctttttctctytttatctcctcagattactaattcattttctcttgaaaccccatctctactaaaaatacaaaaaattagctgggcgtgatggagggcgcctgtagtcccagctacttgggaggctgaggcaggagaatggcatgaacccgggaggcggagctggcagtgagccgagatcgagctactgcactccagcctgggcgacagagccagactccgtctcaaaaaaaaaaaaaaatttttttgttttgttttgttttaaaggaaaaaattatcacggtgcttgctattaaagataggagtggaaaaagatgaaagaagcaaactactttcataagtagtagtgtccaagtatgccagattatagttattttgagccatcccaggaaagtaagaagaaattttcatatattagttttaagagggcagtctggcgcaattcttattttctcccaaatgtatcattttataaaaagagataaattaggaaattagaaaatgtgattttttgacggttttctagttctgattagcaaaaatttggaactgagacctaggtagaaagtagctttatgtcttgacaaatattttctatttataataatttaataactaaaatgtgtacactggtgatgcttatatatgagggatttactgttgtgcagagatttaggtatgaacattacacttaggcctagagtgaatgctggtccgtactgctgaaccatgaaacccttggatttctatgctagaaccagtcagtatcttgaagtcctttaaccygtgagatcctctgtcatctctttgattagattgtacattataagtattaacttcaaactttgctttggagaatcctacagactattaaggcttataaacaaactccttaggttagcattgcacaaaattatgttgttctgatttgaaactgtccaaatttgtattgctaaatatcccctgatgtactgtcttggagatcaaatgtttgtgttccatttgactccaggttcctcaggtcttgcagacttcgggctttctcwatttgcctgtcctctggttgtctactttgtgtcagtactatagttgttggctgtgaagagagcagagacgatagaagggagttagtcaggaggcctggtgagggtggtggcaatgwgacagaatttgggagcaaaggaaaagagtgattgaaatatttcttgcagttcttattatttttgcttattttatacttctgttttttttaaatcattttttctttctttcttttttcttttttttttttttttcagaaaccccatttcatttcactttgcytaaagaaggtgatatcatcccaccattgactggtgcaaccccacctcttattgggcacctaaaattggagcccaagagacacagtactcctattggtgagtgaataaaaagtaatgatatttaaggcagaatttctgagatatcattctctacacaagtgatattttagatctgaggagttgggtctggctggtaaggttgatttttgttttagggaaaatagggttatgaagtctggttctgtgattttactactaggagatgaggggtaaagagaggaaggaaagaaagggtggagggaagtaagaaagaaagagaatacttaaaagaattttatcttattacttgcaaggcagtagaatctgagtgctaagtagtgatgtagagatgttttataaggatggaacaggaagtaaggtagaagtactatttattcagtaccttggctaattagtcagtctgctgcttgacagggcaagaaaacttagatcctccttccctgaagcagccagtagtcttctacattaacctatttgttttctctagtcagtgctgggaggtaacaatcatgccgtctggagtctcctgctacctatgcctgatgctggcagatgtgggttggctgagggctcatgcagcatcctttgtccagatgcagaagtggaactgaatcctgttgctcctcttaagaccaggtgtcaatactagttcgtagttgttgatacttatgacagggatctatcctaggaacctccttcaatcctgcagagctgtggagccaaacaggcaaattgatgaccttgaattgctgttttttgtgtttgtattttagtgttctttttttcttcctccctgcctcacttctttcaggtattagcaactatccagaaagcaccatagcaaccagtgatgtcatgtctgaaagcatggtggagacccatgatcccatacttgggagtggaaaaggggattctggggctgccccagacgtggatgataaattatgtctaagaatgaaactggttagtcctgagactgaggcgagtgaagagtctttgcagttcaacctggaaagtaagttttatgttaatcttgggtaattagtagctgcagattatctggggagtattgattataatctagttataataattgatacttctatatttataaatgtatttgtaaagtcttacactcatagatttaattctttgcttttggccagcctgtcatgttactaaagatactctgttttataatctccatattatagcttgtttctgttaagtctgttcctatgtaattggtttccctattcagaaagacttcagaatagggtagaaaactttaggactgtggattcacattgcagattaatgttgattctttcccacatgaattagaagttgtttggtagggctagaataaagagaagatacaagggagggatgcaaagtagggaccagatgctgaaaggctttttacatcatgctgagaagccgaagaattttaggcaagggagtaatatgatcagatttgcctttaaaaaaaagcatcagctgagtctttcaaaaccttgtgcttttgtgcatgatgattcctttccttgcatttcccatattctgttctcctgcctggtaaattctacccagtctttaaccagaaagtgaggtcattggtagtggggctggagatgagggatgaatttgaggagcgagtaggcagaacgatggtgccaggtgaatatggaagtaagggggaggaaaaaaagagagaatkactcttcacatatactgtatgatctcatttccataatagtactcccaagtaggtatctgcattttcattttattgatgagaaaacagagtaagagaggtttttaagttacatgtctaaggtcacaataattggtgctaggtggagttggaatttgagtcagacctaactctgaagcttataattttttcatttcaggtaatttgtaaaagctgtttaagggggattagaagaggaagaaatctcataaaggagattataaaggaacgttcagagagaaggagaactaggagggtatatgaagccatggaagcctatggggaggggagttacaagaagatcatgtcaggcacaggagcaagtttagtaagatgtgtctggaaatatactttgacttyggcgaggcaattaggatccatttggtgactctagcaagagccatttcagtgcagcagttggggtgggagctatactgaaagtaattgaggaaggatgaggaagaggagatgaggctgcaaatgtactctctacttttgagaagtttatgtgagagaagaagagaaaatatggtgagttagagggaaatgcagggttgagagaggatttgttattttaggctgggagaggcctgagcaagtttacagattttaacccatttatgcctagtgttccactattggaacactaagcttgygggagttatttatatcctgctgctcaaggtcatcaccaaggtctgatttttcacaaaaaaaaatttgcaacctccagcataaatgggttaaggaaggatccaaaagagggaggcatagattaaagacgagggaattgggggaaacagttgatgaattaaggccctgaagaagttgggaggggaagctattgaagactacacagaataggttggataagcaggacttcttcttccctgagaccagagaaaagtaattttagctaatacatttttagctcttactgtataccaggtacttcacatgtatagctcattaaatctcataagaagccgatgaactagatcctattattatcctccttttacagatgaggaaactgaggcacaggaaggttgagcgccttccctaaacatagctagtaaatggagtagccgggatacaaatccaggaagtctggttccaaatctttgatgctgtggtacttactgatttgaatcttagcaactcagtagactgagttaaagtattacatggttccatccttactatcatcttttccggaataaataagggcttattgccaggcatggtggttggtgcgcttctataatcccagcaatgccagaggctgaggtgggaggtgtgcttaaacccagaagtacaagaccagcctgggcaacatagtgacatctcatctcaaaaataaaaattttaaaaagggtttgtcaagagagagagtatgtgatagccttaaatcttactttacctttggatctgaaattacaactagcgaagtgttaaggatggttatatcagtaaattttactacctttcctaataccaggagcatagtatcaaggactgtwttcagtgttacttacatcatttcatccttacaacaaactttttaggkttgttgkgtttttatcttatagaggaggacactgagactcaaaatgacaaagtagtttactcctaggttggactattaagtgcaatagccagggtgtgagccaggtttctatttcagagccagggctccaactgaatttcagctgcctccctgatggactgtttagattatgttgggtcatgaatattttagaaataattaaaaaccatttaagggttgttttctctaaggctggtataaattgtaaatgaacaaattttaatcccttgaaattagtgacattgttgtgagaatatgggatttttttcagtacgacctttaatctgttgctgcatgttcttgaaaatgtcctttttgtttctttttgttgttattgttgttgagacagggcttctccctgtcacccaggctggagtgcaatggggtgatctcagctcactgcagcctccatctcccaggctcaagcgatcctcccatcttagccccctgagtaggtgggactacaggcacrcccaccacccatgcctggttaatttttgtatttattatagagatggggcttcgccatgttagccaggctggtgttgaactcctgggctcaagcgatcctcctgccttggcctctcaaagtattgggattacatgagtgagccaccgtgcctggccaccctttgtttttgaagtgtctgtcctaaagcactttgggaagaacttgggtaccttctatttgtgggtgctctaaaaactatttaaaattagttcatcaacctaaaatattttctacttattttattaagttcttttatttttaatttgtttttaatatgatataaattttaaaaagtttttggtttttaattttgtattattacatacttttttaacttcttatatgggcagagatgaatttggattcagaagtttaattttcatttaagaatgttactgctggcygggtgtggtggctcatgcctgtaatcccagcactttgggaggctgaggtgggtggatcacctgaggtcaggagttcgagaccagcctggccaagatggtgaaaccccatctctactaaaaatataaaaattagccggacatggtggcaggtacctgtaatcccagctactcgggaggctaaggcagcagaatctcttgaacccgagaggcggaggttgcagtgagctgagatcatgccactgcactccagcctgagcaacagagtgagattctgtctccaaaaaaaaaaaaaaaaaaaaaaaaaaagaatattactgctaagggctaggtgtcgtagctcgtatgtgtaatcccagcacactttgggaacctgaggcgggtgaatcacctgaggtcggaagtttgagaccagcctggtcaacatggtgaaaccccatctctactaaaaatacaaaaattagctgggtgtggtggtgcacacctgtaatcccagctactcaggagggtgaggcatgagaatcgcttgaacccaggagacacaggttgcagcaagtcgagattacgccgctgyactctagcctgggcaacggagtaagactctgtctccaaaaaaaaaaaaagttactcattgtattgtatttcttgccaatcttattagtcttttataggaagtttgaaagaaaattgattggtggaagtgagaaaaacttgtaccattaaattacaagaaatagccagccgggcacagtggctcttgcctgtaatcccagcactttgggagaccgaggcgggcggatcacgaggtcaggagattgagaccatcctggctaacacggtgaaaccccgtctcgactaaaaatacaaaaaaattagccgggcgtggtggcgggcacctgtagtttcagctgctggggaggctgaggcaggagaatggcgtgaacccgggaggcagagcttgcagtgagccgagattgcgccactgcactccagcctgggcgacagagtgagactctgtctcaaaaaaaaaaaaaaaaaaaaattaaaacaaatctggcctgcactgcagcctgggtgacagagygagactgttgtctcaaaacaaacaaacmaaaaacaagaaatctggcagatcacttgatttcaggagtttgagaccagcttgggaaacttggcaaaaccctgtctttcctaaaaaatacaaaaaattagctggacgtggtggcgcatgcctgtagtcccagctactcgggaggttgaggcaggagatcgcttgaacccaggaggcggaggttgcagtgagctgagawymcgctactgccctccagyttgggtgatagagtgagactgtctcaaaataaagaaataaataaataaaattacaagaaatgtttgtatgtttatacttactagttttacttatttttatttctttttgttattttttgcaaatactagtagagcagagtgaaggtttaggtgtgatactaactaaattctgtttctctttcctttctctccttggttttgtttttattcagagcctgcaactggtgaaagaaaaaatggatctactgctgttgctgagtctgttgccaggtaaccaaagctggatgctatttagagtttaatacacagctactggtgatgagggtagatggtttatcaacaaaggaaaaaagttaaaatgagaaagttaaaatgagactctttcataaaggatttagcaatgttttgaatggatcatagactttttagttratacttttttaagttcagtgaagcttttttctacacctagaactaagataattgaaatgtctttacttttgttcatgtgagagttcctttccccccttttttctgttgctgatacaagagtctccayaatctcaggattgttgatccaattgatgagaaaaagaaggattaacaagagatagctacagaccttgttccttctgcaatcgcatactcagctgcagcctcaggtcattttctcttctgcctgccaaattaactactatgttgagctgttatttttgctttgtcatggatgttgtaatgctttgaggacgagtatgaccccatactgaggttttggttggtaagctttgccatctggtggctgtgagaatacaattgtttcaggcatgagtcatccagcctgaaaacgctaatagcagttggtgaaacataggcaagaattcttcttttattttcttttttattttttgagacagaatcttgctctgttgcccaggctggagtgcggtggtgagatcatggctcactgtgacctcaacatcctgacctccagctatcctcctgcctcagccacctgagtagctggggctacaggcatgtaccacctcatctggctaatttttgtattttttgtagagatgaggattttactatgttgcccaggctggccttgaactcctgggctcaagtgatccacctgccttgacttcccaaagtgctaggattacagatgtgagctaccatgccccaccaagaattcttaaattagaggctaggcgggtactgttaataactaaagtggctaggtacaagacagagtgttttttttttgtttttttttttgagacggagtctcactctgtcatccaggctggagtgcagtggcacgatctccgctcactgcaagctccgcctcccgggtccacaccattctcctgcctcagcctcccaagtagctgggactacaggtgccagccaccacgcctggctaattttttttttgtatttttagtggagacggggtttcaccgtgttagccaggatggtctcgatctcctgacctcgtgatccgcccgcaagacagagtgttgaggacaatggcaaactgaatgtatggtccatgtgaaagggtgtgccccactcaactccagccagtagttgtcatgtgaaactgcaaacttcttgttgccacatctttgtttttagaaagaaatctggatttttaaaaataaaatatcaaataaaagaggcctgtggactaaatgtgacctcacttgtgagtttctgacctttttcaaagtcttttgatctgttcttagctatgtcttagagagattagttcctcattgggctattagtatatttaatctgaaacataagtaccgtagagtcctttttcatttgaagatcccttaatgatatatagtcttagaagctgaagaaagtggagtgtgtatctggtccatttggctttaacagaatttttggccaggaataagttgttattagtctgtacttgtgcatattcagagggaacagagtatgttgctgaagcttctagaactcttagggtagaaagtagagaggagaaaataaggaaaaactttgagcagagggttggaatggtggatcctagaatgagatgaaatttttgatattgttgtgaataaatttttctatataagaatctaaatttaaaaaaattcgacttgtttgctattgtgttcactctaacaaatcatctaaagtaagctctgtcacaatattggaagtggtccttggttcatctgcatttaggtggagattttttgtttgtttgtttgagacagggtctcactttgtcaaccaggctgcagtgcagtggtgcaatcacagttcactgcagccttgacctcccaggctcaagcgatcctcctgcctcaaccccacagggtgctgggactacaggcacctgccaccaggggctaatttttgtgtttttagtagagatggggtttcgtcatgttgcccaggctagtctctaactcctgaagctcaagtgatccacctggcttggcctcccaaagtggtaggattacaggtataagccaccgtgcccagcstacatgaaacttttaagtgttgtttgtaactgtactctgttcaaattacttgctgtcaccttatttctcaatcattttactacagaaggtttcaagcatatacgaaagtagagagagtagtataatggactgccatgtattcatcacccagttccaaaaatttcttatggccagtcttgattcatttatatttccagcacccccctccctactgaattattttgaagataatttcagcattatataattttatctgaaatacttcagtgctgtctccaaaagataaggattcttattttraacttaaccgtattactattatcatactttaaaaaattgacartggttccttaatatcatgaaatattcaatgttcagatttctctgattgtctcataaatggtgttttacagtttgactcaagatctaaataaggtytgcatattgcatttgattatatctctttaagtcttttaaaatacagagtacccctccagtcytttttttttttttttttttttttttttgcctcttgcttgcaaattatttgttgaaggtacagattgttgtatggttttctacattctggattttgctgatcgcatctttatggtatttartacagtcctctgtccaccttatttccagtgaatcttccttgagaattttaaattatgctaattcaaaacaagtatggagaatttgcattttggtgtaaggtggtttggagtttgatatgcagagaaagcattttatttcctctgtgcataaaaggataatctccaaaagtacttttcttttcaaagttaacaatatattgctttaatatattgtcttagtccccagaagaccatgtctgtgttgagctgtatctgtgaagccaggcaagagaatgaggctcgaagtgaggatccccccaccacacccatcaggtaagcattatttttatagaatcttttgggctccattggttcacaaaatggttagtgcccaaatcctaatatgtactgtgctgtggtttgaatgtggcatgtgttggaaacttaacccccagtgcaacagtgttgagaggtaattagtggtattggtataaagctacagaagttgaccacacatacacaaaaaagaggtaattaggtcgtgggggcactgcccatatgtatgcattaaggctgttgcsgtgagcatgggttaattataaaaggctgaaggggcagtttggccccctttccaccttcttgaatgcaccctcaccatgtgatgtctttccaccgtgttacgatgcagctagaaggcccttaccagctggccgtctagatgctagtgccatgtccttggacatttcagcattcagaaccatgagccaaatcctgtaaatctttttctttatcaatttcccagtctggtgggaattctgttatagcagcagaaaacagactaagatgtactgctactrttttgtgagcttgagcttaccttatttttttataccttgagggactrtartgtattctggatagattgatgagctgtcatgagaaattttgttaaatattttatagatacacatttttgtctttatctgccagttgtatcaatttgaaatgactgacttcataaatgtatttattaatttattttgagatagggtctcactctgtcacccaggctggagtgaagtggcgtgaacatggctcactgaagcctttacctcttgggcttcagcctcccaagtagctaggaccacaagcatgcgccaccataccggctaatttttctattctttgtagagatggcttctcactgtgttgtccagtctggtttcaaactcttgggatcaagcagtcctcccaccttggcgtccagaagtgttaggaatacaagtgtgagccaccgtgccctacggtgaaaataatttatataattcctcatttcttagattagtttttcttattttgggaatcatgtttacttttaacagactttttatttctccttagtttcccacagagcaaaatatgagatgtttaacatcccaaatttaaagtttttcagacttaatggaattaatttttccataatttctttttctttttagagacagkgtctcactctgtcacccaggctgaggtgcagtggtgcagtaatagctcacggcagccccaaattcctaggctcaagcaatcctcctgcctgaaccccctgagtggctaggactacaggcatgtgctgccgtgtctggctaatttttttttttttcaacttttttttcaactgtgttgcccaggctggtctcagacgcctgggctcaagtgatcctcctgcctcatcttcccaacgtgctagaattacagatatgagcaactgtgcttagccccataatttctttactccataatctcttaraacagtcgtgaggcaggaaaaaagttttgagttacaggcctttatctctatttaaataattaaggaagcggctggccacggtggstcacgcctgtaatcccagcacttggaggccaaagcatgaggattacttgaggccaggagtttgagatgagcctgggtgacatagtgagaccctatttctaccaagaaaaaaaagaaaaaaaaaaaagccggatgtggtggcatgcgcttgtggtcccagctacttggaagactgaagtgggatgattggttgaacctgggtggtcgaggctgcagggagctgtggtctcgccactgcactttagcctggggaacagagtgagaccatgtcttaaaaaataataataaataaataaataaatagtatcttatatggaatatatgatacttatatttagtgtagagaaataagtaatggcagtggaaaaggacctgtattttcattatgaagtgagtatctttcacctctaaaattcagtgatttcgtaattagacaatgtgataatgttttgtcagtaggtatatcagtaacagtgatataagtagcatgatttagccaggcgcggtggcactttggtagaccgaggtgggtggatggcctgagctctggagttggagaccagcctgggcatcatggtgaaacttcgtctctacaaaaagtacaaaattagccaggtgtggtggtgcatccctgtagtcccagctacttgggatgctgaggtgggagaatggctcgagcccaggaggtggaggttatagtgagccgagattgtgccactgtactccagcctgggcgacaaagccagactctgtctaaagaaaaaaaaaaagactggatggggtggctcacacctgtaatcccagcactttgagaggctgaggaggggtgaccacttgaggccaggagttagtgaccagcctggccaacatggtaaaacgctgtctctactaaaaatacaaaaattagccaggcagggtcgtccacgcttgtagtctcagctactctggaggctaaggcatgagaatcacttgaaccctggaggaggaggttgcagtgagccaagatggtgccactgcactacagcctggcgagagagtgagagttatgtcttatccattaaaaaaaaaaaaattaataggtagcataatttctaaatttctatgctcattattgaaagaaatatttaaaataaatatgtcagtgcattaaatgggcattctgaataagtgtgagcttgttgatattcttgggaatcagatgatcctgaaatcatgtgattttaacagtggtgtagtaatgacccagctattactaaatttattgatgtcattgtattgccttgcttttttattaaagcgttttaaaatagaggtgccaagatgttggttatattgtttaaccttggtggagcaaagatctgggaatctagctggatttgattctagatgcctcataaacagagctacactcagaatagaatagttagacatttgttaaatatggagatgtattcttccctatttcaatttggatttttttttttttttttttttttttgagatggggtcttggtctgtgtgtcacccaggctggaagtgcagtagggcgatcttggctcactgcaacctccacctcccaggttcgagggattctcctgcctcagcctcccaagtagctgggactacaggtgtatgccaccacacatggctattttttttgtatttttagtagagacggggttttgccgtgttggccaggcaggtctcgaactcctcacctcaggtgatccacccgtcttggcttcccaaagtgctgggattactggtgtgagccactgtgcccagcctaaaatttactttyttagcatcagtttctaagtctggcatatagtgaccagagtagaattgcatagctggaactaatggagagggagagaggtatggcacttcttacaatttattggattgctgtagaagtaaaattcaattcaggtattctaacctgaataaacagcttctgaggtgtcttartctctttgggctgctgcaacaaactgccataggctagatagcttataaacaaaagaatttatttctctcatttctggaggctgagaagttytagatcaaagcactggcagatttggtgtctggtgagggcctgcttcctggtttgtagacagctgttctcacatggcagttgggggcaagagagctctctgaggtctcttttataagggcactaaccctattcatgagggctctgcctcttaataccatcaccttggtggttaggatttaatgtaagtcttggggtggaggggacatagacatttagtctgtagcatgagataaaatttataagcttgtttaggataggaaacaacaataattgaattcctaaaatcgagtcctggctcttctggcttttgaatcctttccttcttgctcagccattggtatgttagatgtcttaaagatttaaatatgaatatttagttgatattgaaggtgaactgagtctgtttaattgcattgtcttatgcatctaatattgattgagcatctgctatgctcaatattttacatatatgaacatttataaacctcataagaggtaagtgctactcatggtaggtgtctcctggtggtcttgttcttacttcttcttcattggaccatatattctcattcagttgaggttcctgagagataggacacacactataacaaccaaatttatactaagctcttcttggctagaactctatttgaaatccctctttgagctcctgttctggtaggctgagctaaacaatatagaaacctcagaaacttcttttttccttttccttcaagatctagagcagagcaatccctgaagagcacttcctgcttcctttaccctgtctacgtaggaaagctgagatcctaaggataagagcttctgtcaaataggagacagccctaactctttttctggccacatacttaaatcaacatatgacatagtttctaggccccttatcgtccttcatgttaccttctgagtttatctacagtttatgccttgtaaactgtcatgccgagaactgaaacagatattccagatgtggtcttagcatggtcagttcagaatggattccttttatttttattctggctattgtgcgtgtaatggagcctaaaactgcattatgttgatttaatctgagtagattttgcaattaattgattcagagaacattcagtcttctgttcaaagtacatgtattaagcatctattttatattaagctgtgagttaggtgttttaaatataaagatagataagacatgaatgtcaaatttctgttgacttggagttagcctggacgtttttattctggagaattgttagggatatttaagaaagctcctagtcacttcggaaatcgtggtatgtggtttgtaggagacattcagcaaatgcttgtggaataaaggaacgaatcactgatacccaaatgggatgacttatgaaaaaaaatgggctgtatcttaagaactgtctttgagaaaccaattcattctgaaatgtttagttgtagatatatcagtatagctgacaaaactagaatctacctacagctttatcctttgtaagtcagattttctttcctaaaaatattgctcaggtggggataaacagtatctagaatgctaggaatcagttaaggaatgttagaaccatcataaggccagataagacatcttgacttaattgatcttttttcaaaatagatccctaagttgcccttcattgtctatgacttcagtaatgggtttacatctttttgtttacttcattttcctgcatcaagtttcagagttcatagctagtgatgggaagaaattttatgactcttttatcatcatggtggaattgttctatctaccattattttttttacaggagtgaaattataatgagaggcctcccaaggtgataatgcttgactacctgactttctcccttccttacatttctcaaattgtcaaaatatggctccccccttgccactacacacacacatgcacacgcacacacacacgttcacacatacacttgcttaattgacatggcttctttatatgttgcattttcagggggaacttgctccactttccaagttctcaaggagaagaggagaaagaaaaattggagggtgaccatacaatcaggcagagtcaacagcctatgaagcccattagtcctgtcaaggaccctgtttctcctgcttcccagaagatggtcatacaagggccatccagtcctcaaggagaggcaatggtgacagatgtgctagaagaccagaaagaaggacggagtactaatmaggaaaatcctagtaaggccttgattgaaaggcccagccaaaataacataggaatccaaaccatggagtgttccttgagggtcccagaaactgtttcagcagcaacccagactrtaaagaatgtgtgtgagcaggggaccagtacagtggaccagaactttggaaagcaagatgccacagttcagactgagagggggagtggtgagaaaccagtcagtgctcctggggatgatacagagtcgctccatagccaggtgagagaacatactagggtgcatcagaggccttgtttttaactttcaggattctcagagaatttaagttgtggcatgtctgcctaatgacaattcttgacagttttgtacagaacagtggttaaaagacaaaaacaacttttctaagatacagatatggtagtgaaattgtgggtagctatagccattagatagtcttttagggaaaatgtagtattgctacagttttttaggtaggtctttactggagaagaaagccagagattctgcctgggtcctgtaatactcttctacattcactcttttccttctccatactttttatcttgccttctaaccatcagatctaattttctctcccttaagtctatttcatcatggttctcaggaattcagagagtagaaggtaagggggaaagaagcagcacgaagaatagtgtatttcagtatatgaaacagaaagaatggtaacaggaatagagagagagatggggaaaagtccccaggtgaccaagaactgcagaagagaggctagactagaagctaatgtgaagaaaaggattggggctgatgaaaacgaggctggaggagtatcaggttccagggaatagagtagggaagtgtcggtactagtaaaaattaagtaggtggctgtgcctggtggcacatgcctgaaatcccagcgcttttggaggctcaggtgggaggattacttgagcccaggagtttgagactaractgggcaacatagtgagaccttgtctcttaaaaaaaaaattgagtagatgaaaagaagtcgtagaaatgtatgtgttaacaaatacgtagaagttcacaacatttcattgagtggcagagtgggatctatggcagagaaratttggaagttactagtaaacagtagtctctgcttatcagtggtttctttttcttggtggttttagttgcccatggtcagctgcagtccagaaatactaaatggaaaattctagaaatactaaggtttaaatactgtgctgttctgagtaatgtgataaagtgctgtccctcttagtcctggctaggatatgaatcctccctttttctagcatatccatatgctatatatgctccctgcctgttaatgacttagtagctgtcttggttatcagatcaactctcatggtattgcattgcttgcattcaagtaacccttgttttactctcaccccaaagtttgagagtagtgatgccggcaatctgaatatgccagagaagtaagtcataaagtgcttcctctaagtgaaaaggtaaaaggtcttaataaggaaagaaaaaaaatcatatgctgaagttactaaaatctgtggtaagaacaaatctatccatgaaattgtgaacagtatattgttatagtttatcttattattagttattaatctttctgtgcctgatttataaacattataggtctgtatgtataggaagaaacatagtgtatagggtttgatattatctgcagtttcaggcatccactgggggtcttggcacatatctccctcagataaaggagatattgtagtggtcaaattgctttttcagttgctgtggtagattatcttcatttgggatctacttaggaaatcttcattattgatatacctctcattytgattgtccaagttgtttgttttgtaaaaataaaatacagttcttatttattgaacacctgtggcacatatgggatatgagcattgtgttcaagacaatgatatattttatgttatgcagattttaccatastaaaaatatatagatggtgtatagaataacagaaattgaaattggtgtgccatcttttgaagagaggttagcaaatgagaaaggctgtatgcaagttttccaggtgtcggtgctttttaaaaatccccttcagtgtagataggacataggctagtgctagtggaaaagcataggcagcctactttgacactcctgaaattttcatttatatgtcaaaaaggacgtggaaccaggtggaagggaaagtgtggttttattttcattttgtttccttcccttaatggtggtaagatcatcaatttatttattttacagacacctcttttcagaagagtatttgaagtgagtaaacatagttttctgtctgccctctttaccttttctccttattctctcagacacgcttaagtgtctgtcttgaagtgatcattcatatggctgttgtaactggaagaatacagggaagcttcttggctgcatttcaggaatatgtaaagcactgaaaccttttagactgactttctctttagtgsggaatagtctgattgtgtgtgcaggcaggaagtacaggctgtcatagttctcatgcatgggtaccctgatgattgaggtaggacagacctgtgctttaaccattcattagacagagttgtgtctgtgtagaagtatgtagaagtattttaaataattggatgagtagcgtttcatgcctttgatattatttataactagtcacataatttacatatctccattttagtaaatatttcacctctgccagtttccaagttggaattggagtggggattattcggagaaattactgaaagcttttggtaaattactaccacatgtcaggaaaaaaatgcagaattaccattattgcatttgtatatgtaattctttttaaagacttggctactttgatactgaatgctgaaagtaaaatcagcctaccataggggagataaggtgagagacaaaagtgtgcattttctcttcagaattacggagttagtggggtgtaggagrgaggataaagatgtgaaaaaatgtgatatagttgttattagaaaacatgtattttttcagaaatgcaggactgaaattctagcacttttttttagccacaggcaggtcctaggtaataaaggccgaaagtctcaaactaactaatgattcgaggtggtaaatagggctttaagacctaatttgctaagaagtwatcttttaaaaattattcagatctgactaaaatatgaactcgggctgtctgtaaatagaaaattatgaacaagaaataatgaagctggatgctatgttagttaactcagttattcttttgaatagcagtagttgttattagtttgttgtatttttgtaaataagaaatagtgcatttgaattttttcagtgttgaatgagttttacctgtcctgaattttccagcagttatttgtctagtatagtacctggcacccttaagttattcgataaatatttgcttaatgttttttgaatgaaagaagctcaatcctcctaagtaatattatttaatagttatcataaaaagtagggtcttatttagccctacattattcttgtagtagaactagatataaaatcttaatttgctaatttttccatttctggacactagctcaactctttagtcataatctgttctttggaatagatgaaatattttatatttaattctaggagagatcagtgtatattgttttaggtaataaactgtggttttcactttaatacaggaaaaacagataaactgagattaacagatacatcattctggttttatataaaggactaaagagtgccttccttttatctaaagagctattgcaaatgtaaactcgtttactaatttgcaagatagcatcagaattagaagaaatacggtttaaaaataatgaacttttaggggtcaaaggttcacctaaatgtccgtaaatacaagtactagatgtaatgattttgatttagacaagaataggtcattttattaggtcatgytcatataaacttctcttagcctctggctatataactsatccatccctggtcttacctataggtggataaaacaaaacagtaggaagattctgtcacactagattcatggagcctctaaacagttctcatcatgaagcataagatttgtgattttgacagcttgcagtgagacctgtgcttatgttctgtattttctgtcacagggagaagaagagtttgatatgcctcagcctccacatggccatgtcttacatcgtcacatgagaacaatccgggaagtacgcacrcttgtcactcgtgtcattacagatgtgtattatgtggatggaacagaagtagaaagaaaagtaactgaggtaatacatactctgartctgtgtggcaaatttctttctttcttttttttttttttttggagacagggtcttactttgttacctaggctggaatgcagttgcgtgattttgtttcactgcagcctctgcctcccaggctcaagtgatccttctgcctcagcctcccttgcagttggttctacaggcatgaaccaccaagcctggctaattttgtttattttttggatggacaaggtcccactgtgttgcccaggctgatcttgaactcctaggcttaagtgatccttctgctttggcctcccaaagtgctgggattacaggcatgagctattgtccctgaccccacatttctttctatagaaaaattctcttgactttctaccccatcccgctttcctgtgcaacactttgtttttcttcatctttttattaccagagatagaagaacagggttagaarttagacttcctgctttctaaagctttccccagccataggtttgctgtttgaccattggttagttatttaatgcatcccatcatgctttccttttctgtaaagaacagactgataaatctctctcatgtataaagattgtatgtattattttaaatccttagaaactcaaatggagtttagaacactcygtttcaaactacctgtgttttctcacatattttcatgtctactcattctgttctttatttgtcactatctgtgtgtggtcatagacctgttggtaagaaatgcacctttattttttagtgggattcattatagactcattacaaatgtcagctcagtattggcatttagtgactrtttgttatcttgaatggcatactatgctgactttgtttacatctaataatgagagagattagacagattttctagaattaaagatctgggacctttgttggtatatgttaagatctgggaaccattttattggttggtaagaggcacagctattttctttttttttttttttttttgaggcagagtcttgctctgttgcccaggctagagtgcagtggtgcaatytcagctcactgcaacctccgccttcctggttcaagtgattttcctggctcggcctcccaagtcgctgggattgcaggcacccgccaccgtgcctggctaatttttttttttttttgtatttctagtagagacggggtttcaccatcttggccaggctggtcttgaactcctgaccttgtgctcaggcctcggcctcccaaagtgctgggattggaggtgtgagccaccgcgcccggcaaggcacaactgttttcttcctttacccagatactttcctttaattctatctgctggccgtgtaggaggttgtactcagggagagttaaactctagtgtatagttttattaaatagaacatattattactatttttcagtgggctattgtggccctcatgtcagataacatttgatgttagtttgaggaattgttgtttgttttactatccacagattattcagatttcattggttttacagacactcattgagtaattgttttttattcctttttttttttttttttttttgacacagagtctcactctgttgcccaggttggagtgcagtggcctgatcttggccttctggagcctctgtctcctgggttcaagcgattctcctgcctcagcctcctgagtagctgggattataggtgtgtgccaccatgcccagctaatttttgtgtttgtagtagagatgggatttcaccatgttggccaggctggtctcraactcctgatctcaagtgatctgccttggcctcccaaagtgctgggattacaggcgtgagccactgcgcccggcctgttttttattctttgtgtataccaaataccagaaataattcttttaaaatactgctttatcttcattttaaaaatattttttgtttttttttttttgagacggagtctcgctctttggcccaggctggggtgcagtggcgctacctcggctcactgcaagctccrcctcctgggttcacgccattctcctgcctcagcctcccaagtagctgggactacaggtgcccgccaccgcgcccggctaattttttgtatttttagtagagacagggtttcaccgtgttagccaggatggtctcgatctcctgacctcgtgatccgcctgcctcagcctcccgattaaaaatgttttaaaaagatttttgttcgtggaacttttttcatgttattactattttggagaaattatgaaaagcagtttgccttcatgaaaatttttgtaactgttgtagtccacattaaactctgtgcctagtacactacattaagtgttaaacacattacttcatttcttaaaatatattttttatttttatgtttggagacagggtctcgctcttttgcccaggctggagtgcagtggtatgatcacagctcactgcagccttgacctcctggctcaagggagcctcccacctcagccttctgagtagctgggaccataggcacacgctaccacayctgctaatttttgtatcttttgtagagatggggtttcactgtgttgcccagactggtcttgaactctgttctcaagtgatcttcctgccttggcctcccaaggcaatgggattacaggcatgagctactgtgctgctaggcccatttagtattttatatggtgctttctaaagtatatttctggaaacagcaggcctcttagacagtttgatggagggaaaaggttccatggtcctgagaaacatgaaacgctctcttagtctgttttctgttgctatatttaaacacctgagactggataatttataaataaaagaaatttatttcttagtctaggaggctgggaagtccaaggtcaaggggctacatctggtgagggccttcttgctggaggggactctgaagagtcccgaggcaacacagggtatcacattgccaggggccttacaaaagagaaccaaattagtttttataacagacccactctggtgataactaacccactcctgtgataactcattaatctgttagctcgtaattccgttaatccatgaatgaactaatccattcatgagggcagagcccttatgactcaatcacctcttaaaggtcttacttcttggtactgttacattgggtattaaatttcaacatgtgttttggaggggcagacgttcaaaccatagcacgccattaatccctgtccccactaacatgaaaattcacatattaccatattaaaagttctaagaagtcctctagtaaggatacctattttattctgtttaacccagcacttcccaaacttacatgaccattagcattttttaaagtaatacctgttttttccctatggaagatagtttgggaagcactactaaacttaaataatgatagtgactagcgtttattgagcacatactatgtgccaggcattattctaagcactttagtgaattatttaattcttaacaactattctgtgatagatccagttattattctcattttgcagatgtgaaaacacaagtgtatcwagttaaaataggccactgagaatgatgacagaagtaggaatggggaaggtagagaggttatgaagctaaggtcttcatgcatgagagagggtgatttggagaatgttagtggataacaactagggaaggggtgaagatagttttaagaaagtggcaaatagtggttttgaaggagaggaggtggggaaatagaaatggtctgtaaatggcagtggggagcaaggaggtatctcatctcaaaattcttgaatggaggttcggctgaaagaaaccagtctctgctagaaagagctgtaggagatgtgagatgcactggggatatctaggatttattcattgaaggcagagaaatggagggaagatcacagattgttttggatctgttgaatttcaggtgtttgtggtaaatccaaggggaagactagtagaaatttgtataagctgagtcatcattgtattcttggtagcgaggtaaggatgagtgtggtgagactgaccagggaaagcatgtgagagtgagaaaaggaataaaaacagagtcctgggaaataccgattttaaaggaacacacagagaaagaggaacccaaagaagcataaatagaagtagccaaaaaggtagactgaaagaaagagaaaagtacttttatggattttaaaggaggagagattttcaagaagggagggatcagagataattatttcatcattttatagtattatctaaatgtatatgtatgtgtgtcattatatacagtctccccatggggatttttttttttttttgaggtggagtctcactctgttgtccaggctggagtgcagtggcacaatcttagctcactgcagctccatctcccaggttcacatgtgattcttctgcctcagcttttcgagtacctgggagtacaggagtgcaccaccatgcccggctattttttttgwgttagtagagacggggtttcaccatgatggccagactggtcttgaactcctgacctcaagtgatccacctgcctctgcctcccaaagtgctgggattacaggcgtgagccaccatgcctggcctcccaaaaggaattctaaactctttgagggaaggatctatcttatacatctccatatcctctctggcaattaacataatattgcgtgaacattctagactaggaaggcagatgtgtcatactcatgctataatttctctatgctgtgcccatagcgaacattgctgattggtcttagaatcttttcccactragtctgggatttagcctccagaaggcttcttaaaactgagcaccaggcagctactaccaatttatcaaagtaggcatccgagataaagccagtttgactttcttgtagtctatagatacttataacctttttgtccttcatttttccaaatggtaatactattttagccttttttgttgttgttgttgttgagacagggtctcatgctatyacctaggctggagtacagtggcatgatcccggctcactgcwgccttgacttccaagctcaagtgatcctcccacctcagcstcccaagtagctgggactacaggtgtgcactcccacgcctggctaatagttttattttcatatggagacctgttctcactatgttgcctaaggtggtctcaagctcctggactcaagcartccttctgccttggcctcccaaagtgctgggattacaggcgtgagccaccacacctgaccccttttagcctatttttgcatatacttttctattgccttgatcagttattgaaaggtaatgtaaaataaccaatgtcaaaacatgtaatgctgtccactgttaatgaagtacctagaagggctcctgaccactcattttctcctctcacctgcctacctccttccctgtcttctctcagataagaatttacttctgtcgtctaggttagaatctttgctggtagccagaggttgtgaacttatccaataaaaagataaactctttcttaccaatatagtaccatstttattttatattttattgagatacagtatagtcccattagaatgaacaattcttctcagaatcacctgggggagaaaaaaaaaagaacagatcctaaatgttcagttcagtggcttttgaaaattttatctaaccactactcaaaacagatacagaacattcccattattccagaaagtctcctgattctcacctttttgaattataattttgtgccatctgtaggattttccaaccatcatattagcattgtgttattatggcatcttttatcttctgtatctattttttccttgcaggagactgaagagccaattgtagagtgtcaggagtgtgaaactgaagtttccccttcacagactgggggctcctcaggtgacctgggggatatcagctccttctcctccaaggcatccagcttacaccgcacatcaagtgggacaagtctctcagctatgcacagcagtggaagctcagggaaaggagccggaccactcagagggaaaaccagcgggacagaacccgcagattttgccttacccagctcccgaggaggcccaggaaaactgaggtgcagacaggktctccagagagagagagccacagcaggggcagggttgctgacattttaatatcacaggaaaaggggagtaatgggaaatcccccatcctccattaaagataaatcaactacccctcttcactatttgctctcttcctgttttgggtttgtgtgggaagtagggtggagccctgtggcaggtagacttcattggcaaagcagcccctgagaaaatgtaggtaacaggggaggggactttcgggaatttatcatctggtgggcactgcttctaccacagcctttatatgatttagttgggagtacaggaagtttgggatagtagcccaaacttaatgcatctcctagctttttgttattctttgcaggtgtccagagcctaaagtagaggagaaggcatagcagaaatkgggtgtgctgtttttgcagcagcagtaggaagctttgtcagagggaatagacttacatgaaggagaatgtcctttacttgttatcccacgctccccactccctgcatgagattttggtggtgggtgtgtgaaccagcttcctgctgccccaaaggctcagcacatgtaggcctgtcatgtagtctgagggccaaggggagactttgtgaagaaaagattcagtagcaggtgctatcagactaacttgtcttcattctctagtcctagaaaaggggtcagtcagacagggacgccagtgtgtgaggaggatggtgatgcaggccttggcatcagacagggagggaaggctccagtcacgcctcgtgggcgtgggcgaaggggccgcccaccttctcggaccactggaaccaggtacctgggtagtgtaagatatacttagtctgttgttcagaaaacaagggaatggaggagaggggagtagagagtttgtggggtgtcaggagggagaagaggggccatactgactggggagtgggcagggatcagagtgaggccacagagagaccaggctcatgcctgtgatggggtttttaaagaatgggctgaggagacccatggacaaaggagtggaaaaattggtagatatatacttctgtgttcttgttctcaccggcttctcctatcccctatctctctttagagaaacagctgtgcctggccccttgggcatagaggacatttcacctaacttgtcaccagatgataaatccttcagccgtgtygtgccccragtgccagactccaccagacgaacagatgtgggtgctggtgctttgcgtcgtagtgactctccagaaattcctttccaggctgctgctggcccttctgatggcttagatgcctcctctccaggaaatagctttgtagggctccgtgttgtagccaagtggtcatccaatggctacttttactctgggaaaatcacacgagatgtyggagctgggaagtataaattgctctttgatgatgggtacgaatgtgatgtgttgggcaaagacattctgttatgtgaccccatcccgctggacactgaagtgacggccctctcggaggatgagtatttcagtgcaggtaatgaaagaagcagagtttgtagagatttttttgtgccttggggcaataatactctgttatgttagtagttaccaagacattacttggtacttttccagtgtctctaaagtcagaaatttcattcctacaaaattggttactcttgccactgacttttctgtttgttcatttgtttttgaataaacttattttggaatattttagatgatttacagaaaatttgcgaagtacaaagtactgctagtacagagagttcctgtatacccctcatccagctttccctattgttgacatctggtgttagtatgggacgtttgtcaaaactaaaaatccaaccttggtgtattactattcacaaaactttagactttatttggatttcactagcttttccatcatgtcctttttctcttccagcatccaacattgcatttagtcatcacataccctttggtctsctctgatttgtggcaatttctcagtcttttgtttttcatgaccttgacagttttggggagtcctggtcaggtattttgtggaatgtccctccatttggatttgtctaatattttctcattagactggagttatgggatattttaaaaataatgccacatagatggstgggtgtggtagctcatgcctgtaattccagcactttgggaggccaaagcagggggatcacttgaggtcaggagtttgagaccaggctgaaacatagtgagaccctgtctctcaaaaaaaaaaaaaaaaaaaaaaaaaaaaggaacataaattagctgggcatgggggcacatgcttgttgtcgtagctactcaggaggatgaggcaggcggattgcttaagctcaggagtttgagtccacagtgagctatgatcatgacactgcactccagcctgggaaacagtgagaccctgtctcttaaaaaaaaatatgccacagaggtgaaatgcccttctcatgttatcatataaggacctgggaaggtttgtgatgtatccacatgacatcactgatgcaggatgttaatcttcatcactggttaaggttgtatttgccagatttcttcacttttttttgaaacagtctcactcactctgtttcccaggctagagtgcagtggcgcaatctaggctcactgcaacctctagcttccgggtacaagtgagtctcctgcctcagtctcctgagtagctaggattacaggtgtgccccaccagacccggctaatttttgtatttttagtggggatggcatttcgccatattggccaggctggtctcaaactcctgagctcaggtgatctacctgccttggcctcccaaaatgctgggtttgcaggcgtgagccactgcaagagagggacaggtggccttctctaaagttagtgtttttccctttccatactctcttcttttttaaagcttagctacctgctttgattggaacccagtaggtgatattgagatatttttgcttagggagaagtttttagtgctgtgtctgtatgactgcacatctaccacttattctctggtttgaagaacagtgcctttttatttttgaagtaggtaatattggtgatagtgagaggtttatgcttgtggttatgcttgttgttattgtttcatgtgctagttctttgaatatattgtctcctttctatggaaataatttgaagatacctatttgtgttgagtttgtcatttaaaaacatctttctgaggactttttgaacatggattggcatataatgggggaaaatggctttctttctatctttttttttttttttgagacacagtttcactctgcctcctagrctggagtgcagtgagtggcgtgatcttggctcactgcaacctctgcctcctgggttcaagtgtttctcgtgcctcagcctcccgagtagctgggtttacaggcacgcaccaccacacctggctaatttttttttgtgtttttcgtagagayggggtttcgccacattggccaggctggtctcgaactcccaacctcaacttatctgcctgcctcagcctcccaaagtgctgggattacagacgtgagccaccatgcccagccaaaaaatggatttttttttttttttttttttttttaaaaacagagccttgctctgtcgcccaggctggagtgcaatggcacgatcttggctcactgcaacctccgcctctggtgttcaagtgattctcttgcctcagcctcccaagtagctgggattacaggtgcatgccacaacacctggttaatctttgtatttttagtagagacagggctttgccatcttggtcaggctggtcttgaattcctgacctcaagccatccacccgccccagcctcccaaagtgctgggattacagtagtgagccactgctcccggctggaaaaatggctttctgttggagtccatccaggcttctcttgtatttggaatcctctgagtaattgttgtttgccctttgttcattattaaatgggccacttcaccttctagttctggataacattgttagctatatatgggatcagttgggagtagcacatggattggggtcttttattgtgactcatagtttgtatgtatcaaatgcattcgttcttctttcaggtgtaaagctactcttaggggttcatatttggccttttaaagacggagttctgtaacaagagtgaactgtggcatcaaggtgtggggattctgtgtcccatttcttgaggctgtttgctcatgtcaacactagactacttctagttctagtagctcttcattagtgtgaagtatattgttggccttgggcttctttgtgtttttgagggagtctttgtgacttagtttggggatagagatttaagctaggagatgaacaagtaagggaaaagggagtgattccacaggatagatagagaaccaaggcttgctttctctgtgttattttccttgggtggggtaggctctgggtttcttttagctcttcattcaagcataggctaatgggtgagaagaaattggacccttctgtttataggaatgaaaaaatattcatagtaatgccttgtttttgtattgtatatgtgtgtgggggtgggggggtgtgtatctatagctatagtatgtgtgtgtgttgtaaattgtttattcattgataggaagaagtgttctttttcacaggcttagtaatgggtcctgcccaagatcacacagcttggtggcagcagaattaggcctaggctcagttctcctgaattatagcttagtttccttttacatcccacattttgttccttttaacataaaggccttatcaggttttgaatcagagcaggaaagtagataatagagaggaagattaggtaggagaggcaggatctgttttttcctttctttgctctctaattttgctacacacacagagagaaaacacacacatgctgtctctcttagaatgatgtcatttttcacctacagcttaactcaagacttactactcagcctcccagggaaccaagaaggaaatgtttagaagttataatggaattgttaggaaaccacatgccatttcacttcacggaaatcatttgaaccaccagcaatccacaatggctgtctttgggaagctttattttataactaaaggctaccttctgtcaagaaactttccttgtcctaatcccagtgtagtagctacatatatcctaagtgttactgtttgggattgacaactggaattttgttaagtcctmacttcagtccactgttggatctctaaattccctaactcaggcctgctttacagagcccttgtgagagggtgctaaggagcctaagacaacagcaagcttcttttatgctttccaccccccaggagtggtgaaaggacataggaaggagtctggggaactgtactacagcattgaaaaagaaggccaaagaaagtggtataagcgaatggctgtcatcctgtccttggagcaaggaaacagactgagagagcagtatgggcttggcccctatgaagcagtaacacctcttacaaaggcagcagatatcagcttaggtaagacttttgcttcctgaacagctgcttttgggctcctgttctgcttacagtgggaggagattctggacctgtcagtaatgtttccctaacttttattattcctatgtgtggcttctcagatggtggatgagctgtcattttctagagctgctgccttacctgtttccttcttagtaccaaacagaaagtccttagggtttttctggcctcctcagttctataggggactaaacacatttcagtcatggcaaagactagataaaaaatatggccttaaaaagaagcttcttggcctcatgggaagtgggggaaggaacactgtggtgtctgaatcagggtctgcccagtttcttggagttcagggcctcataccatagagtttgaccaacctgtttggcttatcctgccatagacaatttggtggaagggaagcggaaacggcgcagtaacgtcagctccccagccacccctactgcctccagtagcagcagcacaacccctacccgaaagatcacagaaagtcctcgtgcctccatgggagttctctcaggcaaaagaaaacttatcacttctgaagaggaacggtcccctgccaagcgaggtcgcaagtcwgccacagtaaaacctggtaagtgctcctttttgcctcattcttccttcagaccatggcagaatgcagggtcagctgctggaaaaatggagcttaatatgtggcagtggcccttctgtcctgctataaagtcggggtcctgcccaagcccacaggtgatattcagggacagctcactgtatccctcctcccccatcccctacagactctagtgcgggtagatagcaaggccagaattagctgagtgtggtggcgggcgcctgtaatmccagctactggggaggctgaggtgggagaatcgcttgaacccaggaaggcggaggttgcagtgagccgaaattgcaccaytgcactccagcctgggcaacaagagtgaaacttggtctccagaaaaaaaaaaaaaaaaaaagaaggccaggacttgatcacaccattctttgactactgtgtgggttctaggagggaaaggagaagtattgaaatgtaagcagattcaaaataggtgtaatttctctttgcctgcaccatcttcttcctggaaattctgctcccctctctcttgtgcttaggccctctagctttctcagacttcctattgaaacatggctgggcatggtggctcacacctgtagtcccagcactttgggaggccgaggttgggggatcacttgaggtcaggagttcaagaccagcctggccaacctggcaaaaccccatctctactaaaaatacaaaaaaagtagctatgagtggtggcacatgcctgtagtcccagcttctccggaggctgaggcagtagaatcayttgaacctgggaggcagaggttgcagtgagccgagatcacgccacggcactccatcctgggtgacagagtgagactccatcaaaaaaaaaaaaagtcatatttcagtatgctcttccctctccccattatccccgaaacaacccctttccagtccctagcattcaataattaagaaaggagttcattccatctgttgttcattgagtccctactgtgacccaggcccagctgctatgggttcaggagattacagaggtaaaatcagtctattcccttttggaactttctcaggctagcaaactgatgaaactccattgattgttacattgtcctggcaccagagcttcttttgtttcctatgtatttgaattgtgtcatctccttatctacccaactgctgctgtgtttcagggtatttaaaaacaatagttcattgaatatttactgtatgaggcatagcactcagtacttcacacataatacctcacatacaatccttatgaagtataggtgctagaaggagttttccagttgaagactttgaggcacagaaaagttggctaactttcccaagatgacaaagtaagccaggattcaaactttggtggtcttcacttctaattccagcctcgttcatataacgtcatattgcctctgagactgttttcttgctcctggttttattttagggaggcatgcatgacctgtctgtcatcttagcctcctaatgaacctacgattcagcttctccaggtcaggtatctgttttttttctcaaggacttattgggggcactcttggcatgggtgttctggctggctggttcacttacttacccaggtgttgaaaactaattcagttgaggcaggctattttgatgtggcaccatctatgtgtaaaaacactttattaccaagtattctctgcaccattctggtgacggtcagtgatggggtgggaggatctatctacaaggggcatttcttgataataaaaaagtgttgggtttttttttttttccaaaggctgcttcaaaatatctcataccctgggggaaatcagagcacgggacagagaaagtgggctgaagatttccaaacatttttcactctcacctactatttctttgtattagaaccacctctttcttcagatgacctcagaagtatttggtgtggctatatgaaaacaatacttggttaattttcatttatgaaaacactgtatacattatcatgactgtgtaaaatttaaatatgtaaatttctctttgttgtaaattttatcctaggctgtcggccatttagaatggttggccattggaatggtctttrgtttctggctcagataagttcatcaggacagtgcctgcccatcaggtcatgcttggtgctggggccttttggtgttaaggcttttgctgaggcaatggtgtgtatccctctagtaactgtgcccctgtccttcccaggtgcagtaggggcaggagagtttgtgagcccctgtgagagtggagacaacaccggtgaaccctctgccctggaagagcagagagggcctttgcctctcaacaagaccttgtttctgggctacgcatttctccttaccatggccacaaccagtgacaagttggccagccgctccaaactgccagatggtcctacaggaagcagtgaagaagaggagggtaaggccttaggaagccctgggagctctgacacataggcacttctttcttttccagtcacttatgagctggtggtccccctgttgtatgtagaggaggcaaggcaagtagcaactgggatcttggtcacagaaattactctgtatcctgctttttaacagtttctagactgttttcacaaaattcctctcagtgagtggttcctgaaaacaatcctgtgaggcagatgggagatagatcttatctattttatggatgaggaaacaagtttggagaggttaaaggttaaataattgtgttttttttgtccacaataatgacaaacctgtgactagagctctgtcattttagcctactgcaaccatccaagtcaatcaggtctgaatgccctgccatcttccccatttgcgttctatgggcatctgctagagcaaacccatgtggagggtaaggttcattctcctgaggtctaagactgggactgtggggtgcctggttcctcagggtgattgcaaagaaacagcttctaggccttttcaactcttatacctctctttaaccttaaattaaatctgtacattgcatttatttctgtgttgtctgttagtttttgaaggaaggctgcagtgggtagaggtctgaaaaatgagtgatctaggagagggaatgagcagatataaatgtatacactgtaaatgtgactgacagcagtatctgaatgtgtctgtaaaggctaaaggtccagatggaatgatgttrtacaagttagagttctgactaatgttgtcttgcaagagggaattgaattaggcaacatggttgtcataatttgcaccactggacatctgtgasggttggcatttcargtgtgtggatgactctttcctaattaaccaaaactatatctcaccgactgcagccatgtgtagatatgtacaaggacatggaagggatgatcaggggcaggctttggtttgggagagttgggctgtgggagtgagtagatgtggtgtggtgggatttcaaggtccagtgtttgcaacacctagcttgtcaaacaatcagataggcacagtgggaataaggtatttgaagagtttcctggacaggaaaattgggagtcttttgaggattctgcatagaggtgtgtcatggcattaaaacagtggtcatggtcatgggtttttttttcccccttttacaatattgctggacttgaaaccaggacttcacaaggcagctgtatagatgttttgtttgttgcttggttcagcatagtcaagaaagctgactggtatgagatgcaggctgtccagtttcattaaaatccgtgtgcctgcgtgagatgtaataaaactgtactcataaaaataaaatgaggcatttggacagtgtttttgaagggatcttcaggtttctgatagacagtgtggttatggtgaatgtgtctttatgttggtgccttcatccttgggcgcagcccaacagtaccagaatccttgatattttcagtgtatgagaatgcttgggggtttctcaatctcaagaaggcggaagacatctaatactaaaacaatcctctacagaattatagtttttaagaaactgtttggtagatgttacagataaataggaattcttagacaccagcttacaacaggagctcagtaaaatatttaaattcatcttatgagatatatttattaataagtttggtacctaatcttgttgggtggcacaccatcagagatccttcagacacagggattgaccctggagttgggtttatttagtaccttcatacttgatttagatggcacgattaacaacctattcattttagcatctggctgggcagggcacttatacctcaaaaatgaagaaattggaacccagactatttgagaaaaattagagaaacacactgcctagacagggtaatacttcattagacaaattaaggaaatataattagggattaaaatctaagtagaccagtcctggattaagcagacataaagtagaagtcttgagaaaaatacaggactgtaaggggtgttggcagtgactcagcagtagaatcttggtgctgaagattgtgacatgctatattgagatagcaaaagggtgctatgacaaagctgagaaatagccctgctgtattctgagtttcttataaccatttagagtttctgttttgggatttcaatttgagaagaatgtggagaatgctgaatcaagaaaagagcagtaaaagtgaataggttggctagtcagaactaagtggagatggagacccctgacctggggcctcggcggtgcctgagctcctccagcagacaacgagggcacygaagggggagccgtcataagggatctgctctaagttttactactgggtgtgaaggggaaggggagtggtaccggcattgaaccttatgcactggattgggttgggttttaaaatttgtgataaaaatttcagttaattagaacttaatttcccaaaactcctaattaactaaaatctctaatgtcttgcttttcttttctttttttttttaatgtgttatttatatatgagaggagcagatgacaagaaaacaagctcaaattagatatttggtcaaaagaagcaatttctaattgcctagggtcattacagcttcagcctcatctctcatatcttctacttcactctcaagactatagagcagtcattggtgttcagtgtcctgaggtacttcaagatcatcaaaggtagatagttttcaataaaaaggttgaaacaggattttctaaccttcacttaatcagttaaaattttaaaaccatatttcattgagcattctggtttattaaagttttagttgtacaagggggtaaaaaggctgatgcagtggtttataataaacccttcatatataacttataaagtgttcatcagctattcatctccacagaaggcagaactagaggaaatggggtttagttttcaacaggaaagatttaggatagacacaaagggaacttcctgatggtaagggttattcaagttggaatatgtcactgtgggaaatgattgtgttcccatccctatcaacggtccggtgcaggaacctttgatgtttttaggtctaggacctacctccagtcctcatcttcccattccctcctactcttgtcccttcttttggcagcattttaaaggcctcaagatctctttctgacccatggggaagcccttggcctgtctttggggacacactgttgtggatagctggggagtggaaaagggggcagtaagaaggaggcataaggtagcaaataagaaaaccactcagtaattattatcttggtttttttttttaatatagaatttttggaaattcctcctttcaacaagcagtatacagaatcccagcttcgagcaggagctggctatatccttgaagatttcaatgaagcccaggtgaggagtttctttgtgtaacctaatatagtggcaatgataagagccaacttgctgtgttgagaagaggcctgggaggggttggggaacctggataaagtagccagagatttcaggaactgagaaactgccaaaatgtttttgcatgaaatagaatttttgttgtgtatagggaagagaaggtaggaccttgggttagttaatggctatggttctgttgctgggacaaaagaagattgatgtttatgtttagtagtagaaacccctattagggttgctgatttttagcctgaaaggctgagttcataggttttggttgtccgttgaggatttaggtcctcagtatgctgcaggtgaggcagagagaacatctatggaaattacttgggccttccagtgagaagagtggccttgggcaggatagactaaatcacattttgggtagtagttgggagtcttcagatctgctcttcatggctcattatggctgctgcttaggagctttccacagaagtcaccaaacccattggctctgcttcttttcttgcagtgtaacacagcttaccagtgtcttctaattgcggatcagcattgtcgaacccggaagtacttcctgtgccttgccagtgggattccttgtgtgtctcatgtctgggtccatgatagttgccatgccaaccagctccagaactaccgtaattatctgttgccagctgggtacagccttgaggagcaaagaattctggactggtaagtatttgaagcccatccagaattgtataggcaggaggacagcaagctttggagggaagagaatctaggtgagagagtaaagctttctagaaattggaatgtctgtgggataaatttgagtgggtttgaaatgacttcaggagtttatctagtttatttccmtaggttacattggctaggaaccttttgcaaatgtgtgaagatttgtatataggttcaatattctcaacctgtaaagtcagagaactaagttttaagcaagcattaaaaatatataggctcaggagcatgatttggattattctcagccccagaacaaacatggaaattagaaagccaggaatgcaaggaatacagatcattcatagaaagaaggaagagaagggggaccctaatatagggcttagttttttaagatgaagtcttgctctgtcacctaggctggagtacagtggcgcagtgacgacttactgcagcctcaacctcccaggctgaagtgatccccctacctcagcctcccaagctgctgggactacaggcactcgccaccacacccagctaatttttttgttgtcttttgtagagatggggtctcaccacattgcccaggctggtctcgaactcccaggcccaagagatccaaccacgacagcctcccaaagtgytgggattacaggcttgagacactatgtctgatggggcatttatttttgaaagcattcagatgtacatgagtccctttgcagaaaggcagtttgttggatattacttgtcatgctaaggtcctttcctgtctccttcataggcaaccccgtgaaaatcctttccagaatctgaaggtactcttggtatcagaccaacagcagaacttcctggagctctggtctgagatcctcatgactggtggtgcagcctctgtgaagcagcaccattcaagtgcccataacaaaggtacctgaaagagtgtgtgtagtgtctttgttccagggatctccttaracctgtaggtgttaggccttgtggtccaaggctcaggcctaataggttgaccgtatccatgtttcttagagaagaaaagtaccaccttcaagaggtgagtcaacataagtgaagcactggacgtatatttgttaaatatttctacaaggtcagcacatagtgattataactctgcctttggtcatgatcagtagcagtgtgtttgacataatagggctttggtttgtgcagagtgggatgtattggttagaatcaaatctctctttctaatggagggctaagttgagtgtcctttccttcttcactttcccttgctccttgcagatattgctttaggggtatttgatgtggtggtgacggacccctcatgcccagcctcggtgctgaagtgtgctgaagcattgcagctgcctgtggtgtcacaagagtgggtgatccagtgcctcattgttggggagagaattggattcaagcagcatccaaaatataaacacgattatgtttctcactaaagatacttggtcttactggttttattccctgctatcgtggagattgtgttttaaccaggttttaaatgtgtcttgtgtgtaactggattccttgcatggatcttgtatatagttttatttgctkaacttttatgataaaataaatgttgaatctctttggttgtagtaactgggatttcttcatctgtttttttgagcttaatctcagaacaaatgacaagacatagtactttctctgagtctttcaacaggcttattcacttacggaggacagctsrccaaggaaattgaaaagttaagagtgaactttattctgtggcatcattcccaaaaggttattccagggtgtctaaaatgctatgcttgcagaaactcagtttaaggtaggtgaaggcccagattaacagttgtgccaaaagttgagtggaattgggcacagctctgtttcctgacagttaaaaaagacctcatgctctctctctgagctgagatcacagctcacctgtgggtactccccaactcttagagctaaagggagaacgaaaggaccaactgccatgaagggacagtgaccataagcttgatggaatgaccttccgtaagataaacatgggaagcacaagtgagaacacctggaaatgttacacgttctagtcaaagacccaatattattattattattattgtcacaatagctggaagcagttccttcccttcctctggcatcactgatccctgcatggcttctcattctctaaagcaggggtcaacaaggtttttttctgtaaagggtcaaagagtaaatatttcaggctttgtgggccatttgatccatcacaactactcgcctttgctgtgagggcatgaaagcaaccatagacaatgagtaaacaaatgggcayggctgtgtttcagtaaaactgtacaaaaacagacagcaggccatagtttgccagctcctgctccagagacagcagtrgaaagggtgatctttagttgataatagcagggaataagttgtcagagcttcccagtgtgtgtagaatatgtagtgatgaaaaccagatgcagtgactataacctgatgccagaacactgcattctttttcagtttggagggcgttgttcagtgaatatttctttttacttacactgatatgaatattgattaccagtgatggctgggccatattaagataacttcaacccctatggtttgtgtaagatgggtaattgggcctgcaatcttcagtatttaaaaatctaacaacttgatctcaattttttcttaaggacctttttcttggagaataatactttttttttttttttttttttttgagacggaatttcgctcttgttgcccrggctggaatgcaatggcacaatctcagctcactgcagcgtctgcttcccaggttcaagcaattctcctgtctcagcctcctgagtagctgggattacaggcacatgccaccacacctggctaatttttgtatttttagtagaatcgaggtttcatcatgttggtcaggctggtctcaaactcctgacttcaggtgatccgcccgcctcggcctcccaaagtgctgggattacaggtgtgagccaccatgcccggcctaagaaatacttttaagtatattttcattagctagaattgcccaatctgtgtaggtataaattacttggtatagggagagagaaagcctatcttacctgttgctttcttacttggtggtaacatccagcagttagtctatttataaacataattactttttcacatatgaaccataaaatatttaactttctgctctatattgtttgtttaccgctgtatctcccacagcttgaacagtaccaaggtacgtagtaggtgctcaataaatgactattgaataaatgaacatatccaacaaatgttctcaatgtaaaggatcagagatgccacatgttctccttgatgggagagacccttccacatgggaatgatgggaaggagttgtactcctggatgttcagtaactgcttctaggagaaaaggtagagtcctatcactaagccgcagatatttatttgtgtgtggctagaatgggatgttttgaatcttctgttayaaccttgggaacgtggctgttatttcaatttatgagccagaaattttcacatcccgaaactacaaaagagaaaaagagccttattaagtgtcatgctttcccaagactaccttcaaagaaatatgaatcaggataacctgtgatctaaataatgtcatcttaaaactgaagagtttcttttgactcttctgctacaatagcttagaaaaaaatctgcttgcagacattttagagagaaaggacaatgaagtgattttctgaatgggaatgacagacctctgggaagccagctaccactgaatctcggtatcagttttttttaaagtttagagttagaaggggtggtcgcctcctttcacagatgcrgaagctagggaccagcaaggcggggtgcccacggctgcacagctagttcatatcagaattgggagtggaaggcccactgcctcccagcatagcaatacataacctagcaaaggacttaacacctatctcactgtcaggttttttagtattttatgatgatgatgacttctactagaaaataacctccattaaaattattaaagatggtcacacctctatctctaagccttacttataaaatgagggtatttggactaaagtcttcttccagttctagaattctacaactcattaaaaagccaccttaaaaagtctactgagttacccaagggttgctcctacctgcccagagttccaccagcctgggtatagtatttgttataatctagtcgtaacagtagttgagccaaatctgagttgatctgatgattccgaacactggagagaatcttgaacaggagtgaagactggcggctaaagccctgcagagagaaggactcagctgtcattccacttcagctcaccaactctccatatggaggatgggggcggagggaggagtttcttggaaaagccttgttcaaaattctacagaaccacctggccttcccacattcctatttctattagttcctaaaatgacttgtaccaaatccatacatgcatgacttcctatgaaagtactctttcatcagtaggaatttagtagctggtttccagttaatgtattttgtcaagtactggggttggggagaacccgttttgattacaagcagataattatctcagtgagatgggggttagttcaaggaagtaaggaggggggaggatgtgaggaagttagaacaacccaatgcttatttgatgggctgaataaactattcaggactgaactatttttgagcactgtgaggtggcacagtaattacctgcttcaaaatcaactgataccaacatttttatctttgtatcttatctctgtacgtgtgtgtattgaggaaatgctttactgactcagaggaaagatcatgaattctccattggcaaaaccacctctgtcctttcggcaaggctgcatacttccaggcagacgcaccttcacgagaatgctcagctgggcggctccacgctcatccagtgggcctaggttctgactgaccagcgaacaaaaactgtgacagagatctaggatttcattcaggcagtgaaacacctacccgggaaacagagttggcattaggaaaggaagraaggtacatccatgaagttaaagtgttaggagaacagtctgattaatagctgatctaattaatagctgacctcccaaatctgacaggatagacactgccacgtgcaaggcctgccagcccctcagacrcacmaaatgcgtaaaacaaatgcatcctttcctggctaagcgagtattactctcttagccctgcaccaaacctccaatctagccacatttaactcttcatttcttagacccgcagagtgtcttcctgcctctgagctgtgagtgttgttccctttgcccgggatgctcttgtttttaataccagttcaagtcccactctctcagtgaagcactcccttccccactatagcctttagtgaaccctcgtttcttgcttctttattatctgtactgttgtccacttggcaattgttcaggcctctgtgttgttactgatttttgtatgtatatatawatatatgtcttgtttttccaactagattgtgagctccttaagggcagagccatgaattatacctctttgtatccccagtgccttgcatacagtaagcactcaataaatatttaatgatgatgacctgctctgttattctgcttttccctayggatacatctatgccacataaggacagcatctacccatcacagtagttcttggttgttttcagccagccctctggagtggcatctattaatatatatcttactcttcctggtacagcagaaatagccctaaacaccagaacatttttwaaaagtctgtaacagctgtgctgtagcacactgaggaataacaaccagctcatgtcagaggaggcataaccgttccattagaaactaccagagatcatttcagtcttcctgttctttatcctggaattggaactagcttgtgagctttaaaaaaaattagtacctgggtcccactattacagggattctaatttaagtgctctgtcacctagatttttttaaagagtcccgatgattccaatgtgcagccaaagttgaaaataactgccacgaaggagacatatatgtacttacagaaacacatacatagatcgagagagaaacactactctagttgtctatgaaaagaactttcaaatgactgatccatcctggtccaaaagatttctaagaaggtgaactctatatgcttttcattggtttttctgtattgtcagcaagaattttgagtttctttaactcctgagggtttaagcacataattctttcatctgtagctgctcaccacaccctgtatttcagaaattcaaagacatcttaggtcccgtttaacatgcctttttagttttgctttacacattctttttttttttatctgctcccccaagacagaatcttgctctgttgcccaggctggagtgcagtggaatgatcttggctcactgcaacctctgcctcctgggtccaagcaattctcctgcctcaggcctcccaagtagctgggattacaggcgcgagccaccacacctattattttttttttcttctgtatttttagtagagacgggttttcaccatgttggccaggctggtcttgaactcctgaccttgtgatccgcccacctcggcctcccaaagtgctgggattacaggcatgagccaccatgccccgccgctttacacattcttaaaaaatgttttaaaatggacttgaataattgcttaatgatggtttcgtatcctgtcaactcaaastgcctaagggaatggtcagtggtagaagcagtctgaggaaaccaatgagccttacttacaggtttcaataggataaaggattgagccagcaaattgctcaggaagtggtcatgagccaatcggatgctttcaaagtctcgggtagaattgatctgatgaagcagctgggagaactgagactccaacacatctacctgatagacattacaaaaaattttagcactttgcatattctaagcactcgaagacattaagatgcctgacagattgaaatgaaaatgctttgcctccactcatcttccttctaaccaagtcacattaaggctgaccaaagacacccttatattgcccagccttgtaggaagttatttgcataattctgaaccccctccctccaacgtcctggctgaccactctcccctgccccatccttttctctttttcctttttttttttttgagacggagtcttgctctgccacccaggctggagtgcagtggtgcgatcctggctcactgcaacttccacataccagggttcaagcaattctcctgcctcagcctcctgagtagctaagattacaggtgcccgctaccacgcatggctaatttttgtatttttagtagagaaggggtttcactatgttggccaggttggtctcgaactcctgacctcaggtgatctgtttggctcagcctccca

SEQ ID NO: 10034 - DNA, 34539 bp, Homo sapiens
cagccctcagcctttctctgcctttgttcctaataagctgctcttatatcctgtaactatatccagcacacaagtatagcctgttactaagctgcacactgaattcaccaaagtaaattaataaagtgggaaagactgtggctcacgctcatccagaatgtcagggtgtgaccactggatttgtcaagcccgttatcttctagggacccatataactatgtgaccattggtatatacagttagtgctcacaagactagcctaggtagagctgaaatctgtcctgacatccaagctaaggtctctgaagaccacagtctcatgggatcaccttgtggagccagttctggtctgggagttttgagcagtcatcctgagctgccttgtttctaccttctctataccaacatcctgtactcaagttcttgtccatcctcacatcatgtcttaagatcccatatcttttctctaagatcttttcactattgttcctcttacacccctctccacatggctttgactgccttcaaccttttgtagctgaattacatcatccacaaagtttgccaartagctaaaatgaggggttcagaatcaaagcttttccactcaccagctgaaaaaagtgcagttagactcaccagcagtgggaagaaaatataaaattatctaactttcagcttgtgtaatggatacagtatctctaagtcyggagttttagtgtactttttttttttaactgattgtttaaacracagtaaggtacaggatggttagtcaatattggtattttcacatactgattccattttccacacataccgttttaaaggagttctacacctggtttcctgccagtctcctgtgccaactgcctaataccattcctgtcttcagctatcttagagtgtggtccagaagkcctgccctaaaagagagcctttttagcttgactgtcttgatacacaataccatcactttttcatttttatccctactacataaatccattcacctgagaatgcaggccctaagtagggttcatccaatgatgagggatcctgaagctgcagtcaagactcccagctgcaaaactgccagctcacccctgttcacaatgatgtgactgatgtctacaagcactgackgaattatgctcaaggagcaaggggaaggcattgctgtatgatgagatctcacttatcccttctttcagactcattgtatgatgacaccactgttcttccctgcaagagatgcccagtggctctgaccatctctgcttctctcttagctcaccttggatctgagtgcccccacctcccagtaatgcttgtgctagtcagtgcccccctcattgtctctccctcttctctttctctatctttgtgcttcctgccgtggtcccctcaccccgtccagagctgctggatgaccagcaccctgtggtccggttgctgcgcagtttttcctctgactgtacagggggccggccagtctccttggatgccaygctggygcatcacctgcaccagtgctcctaccacctgcgcctcttccggaactggctgcgctcaggccaggatgaccccgartgcctctacggtaccccctgccaccaaactggctgctgccactaccctggctgggtctgactgctttgcttattgcacttctggcaggagagcccacctatttctttctcctatttgccctaagkttatgtaacttgcatttagtcacttggatgggattggggccagactgcctggtagctgtagcattggctgctcatccccttcctattctcctttctcaccaccccctaatgttactcattccccagttctgttcaatacaggagtaatctcttgccttggaatctgttcttatcactctaaccctctactaccaccatcttcaaatccaaatgtttttctagccactctgaggagctagagacagtaactttcctgccctcctgccactagatcatgggagaaattgaggcacagaagcctcaattgtatccttggggcaaagtccagagsttcgaagatggtcaggctataatccttttgagttacgggctttagtcactggtgaacaggaagctgtcttgcatagacttcgttgtcccgtgtatccttagtccctttaaggagatgttgaagaggcataggaaagactggggactgagatagtggtttggatgtgtttttcttcatcctccaatggggacattttttccatcaccagtccctagtattagggttacatatttatgtttatccttgaccctacccagactgatagacctacattggaattcttgggtttagagcagagaatcagtactttttcttttttctagggcatttgcctcatttttctgatgaagtagaaagaccctagcaagtctggggttttccagtagatcagaagagtgaagctttgatgtgatggaaattaccaagaaagaactcccatccccatcctgttcatgcatgtggttttcctgggctgagcttcatgtgtattgcatgccctccagtttgcatccaagtattctagcctttctgccgacatcctaaatttgcatgaaccccttctcagattccatgtccttctccttaatctggttctcttattcatgatacccaaaatctgctgtttcttcccagctccctgacctccctatctcatgttagatctgcagtttcaccccttacctctggatccttgttttattcccctagaaagtgtgagaacaacgttggtgcctaccctactgggattctgtttatttttccatgagacattgcaagctctccataggtagcatgaaaggtgatttgattcaccttgaggccttagcaggtagatgttttaggaaatctgaaggtgagaaaaacagactccctaggggctctaaagagttccctctcctaagagtcttggatacccaacactccaaaagccacggactctcctgatggctctcagggactctccatgcttccttggccagttggggtatatctggcaggagtaacattgactttgcccatctcttttcaaacagggtttgaagggtgttccatggtgcctaccatctaccctctggaaacactgcataatgccctttccctacgtcaagtgagtgaattcttgagtagagtctgccagcgccacactgatgcccaggcacaggcatctgcaggtagggatattcttatttttttacccttctctctgcccccatgcccatgcttcctagaatataagaaagtagtaaattagaaagctagttaggcaatccacaaagacacaaaagtacacttaaaaatgtataattgctggctgggcgcagtggttcatgtctgttatcccagcactttgggaggccgaggcaggtggatcacctgaggtcaggagtttgagacaagcctggccaagatggcgatacctgtctctactgaaaaaaaataaggccgggcgcagtggctcatgcctgtaatcccagcactttgggagggctaggcgggtggatcacgaggtcaagtgatggagaccatcctggccaatatggtgaaaccctgcctctactaaaaataccaaaattagctgggtgcggtggtgtgcgcctgcagtcccagctacccaggaggctgaggcaggagaatcgcttgaacctgggaggcagaggttgcagggagccgagatcacrccactacactccggcctggcaacagagtgagactccatctcaaaaaaaaaaaaaaatacaaacattagctgagcatgttggtgtgtgcctgtagtcccagctgcttgggaggctaggagaactgcttgagcccaggaggcggagattgctatgagccaagatcgcaccactgcactccagcctgggtgacagagcgagactccatctcaaaaaaaaaaaaaaggataattgcataggccaactaaacatcatagaaatatcactcctgaattctaaagttttcattgaaaaatacacaaccaagaacagtgaagaatgagtggggtgcagtggctcacatatgtaatcccagcaactctagaggctgaggcaggaggattgttgagtccaggagttcaagactagcctgtgcaacatagtgagacccccatctctccagaaaaaaaaaaaaaaaaaaaggctatgcatggtggtgtgtgcctgtagtctcatctacttgggatgttgaaacgggaggatcacttgaacccaggagttcaaggctgcagtgagctatgatcacgccactgcgctccagcctgggtggacagagcaagatgytaccacaaaagagagagagagagagagagaaagagaagagagagagaaaaaaccctgaaaagaagagcagtgagcaaatactagccctaccacattttaaatcattctataaaatctcattttagttttgatttttgcagtcgtagcttattgcagcccagaactcctgggctcaaacgatcctcctgccttggcctctcaaagcactggcattacaggtgtgacacaaagactttttttgagacagagtctcactctgtcacccaggctggagtgcagtggcaggatctcagctgactacaacctccatctcctgggttcaagcagttctccctgcctcagcctcctgagtagctgggattacagggacaagccaccatgcctggctaatttttgtatttttagtagagatggggttttgccatgttgcccaggctggtcttgaactcctgacctcaggtgatccacccccccttgggttcccacagtgctgggattacaggtgtgagccaccacacccagccagaaagacttttcagtaaatggacggggggtaaattgaataggcatttgacaaaaattgaaattgaacccacactgtataccaggataaactccatatggatcggaaatctaaacgtaaaaattaaatcatgtgttaagtaggtagctccaagggcttgttcatccacagaaacaccaaaaagtaagaaaaaactgctagaaccaacattgtgagaactctggagaatagtaaaagattttcagtaaccaggaaaatgctgaatccagaaagaggcaacctaaaaatggcagaaaagctttgcagcatttttactcactcttgccccaccctgcctccctggctttgttgtgctcttgaagatgacagcccacgttctcaatgtaggaccctggttcctggttccagagggagcggagaagaccttattctcaaagaattttctctgttctaatttgttggtgggctacttgaaggattgacacaaagtgcctacatttgttttgcctaactctaacttattcagggcagaaaagtggctgtgcagagagcattccttaaaaacattgtaaggcaaatgaacaacctgtgcctggcctcagaatgcattttttttttttttttgagatggagtttcattctgtcacccaggctggagtgccaccatgcccggctaatttttgaatttttagtagagacaggatttcgccatgttggccaggctggtcttggactcctgaccttgggtgatccacccacctcggccttccaaaggtgctagggttacaggtgtgagccacaacacctggccagaatgcactttttttttctttttttctgttttttgagatggagtctcactctgttgccaggctggagtgcagtggcacgattttggctaaccgcaacctctgccttccaggttcaagtgattcttctgcctcagcctcccgaatagctgggactacaggtgcgcaccaccacgcacagctaatttttgtatttttttagtagagacagggtttcaccacgttggccaggatggtcttaatctcttgacctcgtgatccgcctgacttgatctcccaaagtgctgggattacaggcatgagtcactgcgcccggcccagaatgcactttttaaagtgtccacaagagactctatttatttatttagtgttgaattggtttattttctaatttgctgttcttaaatatttttatagaaaatagaatattacttaaagtaaaaattttaaggccaggcatggtggctcacgcctgtaatcctaacactttgagaggccaaggagggtggattgcccaagcttagaagttcgagaccagcctgggtgatacggtgaaacctcgtctctactaaaatacaaaaaattagccgggcatggtggcatgcacctgtagtcccagctacttgggaggccgaggcaggagaattgctagaactggggaggcagaagttgcgtgagctgagatcgtgccactgtactccagcctgggcaacacagcgagactccatctctaaaaaatggtaataataaaaacaaacaaacaaaaattcagccaggcatggtggctcacacctgtaatcccagctctttgggaggctgaggctggcagatcacttgagttcaagagttcaagatcagcctgggcaacatggcaaaaccccacctctacaaaaaaataaaaataaaaataaaattagccaggtatggtggcatgtacctggggtcccagctatttgggaggctgaggtgggaggatcacctgagcctgggaggtgaaggttgcagtgagccgagattgtgccaccacactccagcctgggtgatagactgagaccgtgtctcaaaacataaataaataaataaaaatagaaaactccaacagttttctaattgaaagactattataataaggtgagcagaagaaaagcaatcaagatttaggaaaatataatagtgttttgtgtttttaatttattaatttatagtttatacttttaacgcctgggcatggtggctcacgcctgtaatcccagcactttgggaggccaaggagggtggaccacttgaggtcaggagttcaagaccagcctggccaacatggkgaaaccttgtctctactaaaaaatacacaaatcagcgaggcatggyggcaggcacctgtaatcccagctactcaggaggctgaggtaggagaatygcttgaacttgggaggtggagcttgtagtgagccaagatcgtgctactggcctccagcgtagatggcaagagagaaactccatctgaaaaaaaaaaattattatttactctaacaatgtcaatatttaattataattataatatcaattataattataaacaaatgaaaagtctaataagacagacttccaacttataccttgaactgtaattttagtaatattctctcatgttgttttgttttctaacagattccacctttccttgtgcgtgcctgcgtgtgtgtgtgtgtgtgtgtgtgtgtstgtgtgtgtgtgtatgccaggtgtcttatatttgagaagagtctcacattaggtccgaagacacaaataggttgaaagtaaaaggatagaaaaacatattctgtgcaaatagtaaccaaaagagagctgaagtagctataccagtattagacaaaatagtctttaagtaaaaaaattgttacaagaggagcggtgcagaggtgcatacctgcagtcttagttacttgggaggctgaagtgggaggattgcttgagcccagcagtactccaactggggaacatagcaagaccctgtctctttaaaaaaagttgttacaagtaagagaaagtcatatattgataatgaggtcaatttattggaagataaaacaattataaacacataccaaataacggagccccaaaatacatgacacaaacattgacagaattgaaggaagaattctacaatagtagttgcagacttcaaaacctacttttatttattttatttttagagacagagtcttgctctgttgcccaggctggagtggtgtgatcatagttcactgcagccttgacctcctagatttaagtgatcctcctgcctcggccaaaatgctgttgttgcaggcatgagccactgtgcccagccaatactcacttttaataatggacagaacaactcgtcrgaatattagtaaggaagtggcmaggcgaggtggctcacacctgtaatcccagcactttgggaggctgaggcgggtggatcacaaggtcaggagattgagaccatcctggctaacatggtgaaactccatctctactaaaaatacaaaaaaattagccgggcgtggtggcgggcacctgtagtcccacctactcgggaggctgaggcaggagaatggcatgaacccgggaggtggagcttgcaataagccgagatcgcgccactgcactcaagcctggacaacagaktgatactccgtctcawaaaaaaaaaaaaaacacacmgaaaattagtaaggaaatcccagcactttgggaggacaagaaaggataagcaggagtgtcgcttaagcccaggaatctgagaccagtctgggtaacatagtgagaccctgtctctacaaaaaattaaaaatttaattgggcatggtggcacatgcctgtagtcccagctatccgaggggctaaggtgagaggactccttgagcccaggaagttaaggctgttgtagtgtgttgtgattgtgccactgtactccagcctgggtgacagagtgagatcctgtctctattaaaaaaaaaaaaagaagaagaaaattagtaaggaaatagaacactacaaaccaactcgacctaacagacatatgtagaccattccatccaacaactgcagaatgcagatgcttctcacatgtacatgaaatatcctccaggatagaccatatgttaggccacaaaacaagtatctataaattttaaaaagttgaagtcatacaaaagaccttctccaaccacaatggaatgatgctagaattaataacagaagagaaaactggaaaattcacaagtatagaaattaaacaacatattctttttcttttttatttttttgaaacagattctcactctgtcgtccaggctggagtgcagtggcatgatctcagctcactgcaacctcctgcattcaagcgattccccacctcagcctcctgagtagctgggactacaggcacgtgccaccatccccaactaatttttgtatttttagtagcgacgaggtttcaccatgttggccaggctggtctcaaactcctgacctcaggtgatccacctgccttggcctcccaaagttctaggattataggtgtgagccaccacgcctggactccttttttatttttaatttttgtgggtgaaacaacatactttttttttttgttttttttgagacagggtctcactctgtcacccaggctggcgtgcagtggtacgatcatggctcagtgcaacctcgacctccagctactcaccccctgagtagctggactacaggcacacaccaccacacccagctaatttttgcttttttcttttttttttctttttttttttttttttatagagacagagtttcaccatgttgcccaggctgagctcaagagatctgctggcttcggtctcccaaaatgctaggattacaggcatgagccactgcgcccagccaacaacatactcttaaatgacaaatgagtcgaagaagaactcacaagggaaattagattatactttgagatgaatgaaaatgaaaacatgccagatggtatgggatgcagcaaaattagtgctcagagagaactttatagctataaatatttaaatttaaaaaaagaagggccaggtgtagtggctcacatttgtaatctcaacactttgggaggccaaagtgggaggattgcttgagcccaagagttcaagacctgtctgggcaatatagtgagacttcatctctacagaaaaactttaaaattagccaagtgcggtggtgcaaacctgtaatcccaggtgcttgggagtctgaggtgggaggagagcttatgcctggaagggagaggttgcagtgagctgagattgtaccattgcattccagcctgtctcaaaaaaaaaaaaaatctgaaatcaataatctaatttatactttatgacactagaaaaagaagagtaaactaaactcaaaaagcaaaaggagccgggcgtggtggctcacgcctgtaatcccagcactttgggaggtcgagatgggcggatcacgaggtcaggagatcgagactatcccggctaaaacggtgaaaccccgtctctactaaaaatacaaaaaaattagccaggcgtagtggcgggcgcctgtaktcccagctacttgggaggctgaggcaggagaatggcatgaacccgggaggcggagcttgcagtgagccgagatcccgccactgcactccagcctgggcgacagagcgagactccgtctcaaaaaaaaaaaaaactgaatcaagaagtagaaagtctaaacacacctgtaacaaggaaaaaattaaattattattattattattgtgggttttttttttttttgagacagagtcttgctctgttgcctaggctggagtgcagtggcatcatctcagctcactgcaatctctgcctcctacattcaaacgattctcctgcctcagcctcccaagtagctgggattacaggcactgcccaccacacccagctaatttttgtatttttagtagagacggggtttcgccrtgttggccaggctagtcttgaactcctggcctcaagtgattcacccgccttggcctcccaaagtgctgggattactggtgtaagccactgcgtccagccaaaaaagattagtaacaaaaacctccaaaaaacaaaaagtctaaaaccagatggcttcactggtgaactctaccacatatttaaagaagtaactcagtctactcacgctcttccaaaaaaattgaagagaaggaaacattttcttgaggtcagataacacatttcagatgacaccataggagaagaaaccaatatcccttaattatagaggcaaaagtcccgaacaaaatgctagcaaaccaaatccgacagcacaataaaagaattatacaccagggctgatgagatttatctcaggaatgcaagagtgattcaatacaagaaaactggtcattgtaatacactacattattagaaagagagaaaaaaacacagtcatctaagttgacacagaaaaacatttgacaaaatccaacaccctttcatgataaaaacactcagcaaactaggaatagaagggaacttaatgaacatgataaagggcatttatgaaagccaaagcacacatcatactcagtagtgtaacactgaaggctttccctctaagatttggaacaagacaagaatgccggcttcaaccactgctattcaacattcgtaccaggagttttaggcaaggaaaaaaaaatatccaaattggaaaagaaaaaataaaagtatttctgttcacagaggacatggtcccaaatataaaatcacaaagaagtctcaaaagaaaacaacaataaaaaagcggctattaaagctaacgaacaaatttagcagagttgcaggttacaggatgaactcagactgggcgcagtggctcacgcctgtgttcccagcattttgggaagctgaggtggcaggatcacttgagccctggagtttgagacaagcctggacaacatagggagacactctctctacaaaaaaaataaataaataaataaattagccaggcatgttggtgcgcacctgtagtcccagctaattgagaggctgagggaggaggatggcttgagcataggaggtcaaggtggcagtgactggtgatcgcatcactgtactttagcctgggtgatagagcaacaccctgtctcaaaaaaaaaagaaagaaaaaagaaagatcaactcacaaaaatcttgtgggccgggctcagtggcttgtacctgtaatcctggcactttgagaggctaaggcgggaggatcatttgaggccaggagttcaagaccagtgtggtcaacatagcaagaccttgtctctataaagtaattttttgctgagatagggtcttattctgtcacccaggcttgagtgtagttgtgccatcatggctcactgcagccttgacctcctgtgctggagcaatccttccacctcagcctcccaaatagctggggctataggcatataccaccacatccagctaatttttgtattttttgtagagatggggttttgccatgttgcccaggctggtctcgaattcctggaatcaagtgatcctcctacctcagcctcccaaagtgctggggttataggcatgagcccaggcttacaaaataaattttttaaaatttgtataaagattttttttttaagacaggttgttgctctgttgcccaggctggagtgcactggcatgatctcagctcactgaaacctctgcctcccaggctcaagtgatcctcccacctgaacctcccaagtaggtaggaccacaggcatgtgccaccacggctggctaattttttgtagagatgtggtattgccatattgcctaggctgttcttgaactggcttcaagtgatcctgccacctcggcctcccaaagtgctgggattacaggcatgagccacggtgtctggcccaattgtgtttatatacaccagcaatgaacaactgaaaaaggaaataataaaaacaattctattttccatagcattcaaaagaataaaatgcctgggaacaaatttaaccaagaagttgaaagatttgtacaccaaaaactacaaaacattgctgaaagaaattaaggaaggccaggtacagtggttcatgcctgtgattccagcactttgggaggctgaggcagaaggattgcttgagccaagaagttcaagaccagcctaggcaacatarggccctgtctctacaaattatatatatgtatatatatatatatatatatatattttttttttttttttttttttttttttttgagatggagtctcactctgtcacccaggcttgggtgcagtggcgcaatgtccactcactggaacctccgccttccaggttcaagcgattctcctgtctcagcctcccgagtagctgggattacaggtgcttgccatcatgcccagctaatttttttctaattttagtagagacagggtttcaccatgttggcaaggctgctctcgaactcctgacctcaggtgatccaccgccttggcatcccaaagtgttgggattacaggcgtgagccactgcacccggggtctacaaataatttttaagaaaacttaactgggtgtggtcgcatgtgcctcttattcctagctacttgggaggctgaggcaggaggatcacctgaacctggaaggtcaagactgcagtgagccatgattgcaccactgtactccagcctgggcaacagagtgaaaccctgtcttgcttaaaaaaaaaaaaaacaacgcagggtgcggtggctcacacctgtaatcccaacactttgggaggccaaggcaggcagattgcttaagctcacaagttcaagaccagcctgatcagcatggagaaaccctgtctctacaaaaaattaaaagaaaaaaaaaaagcctgggtgtggtggctcatgcctgtaatcccaacactttgggaggctgaagcaggaagatcataaggtcaggagttcaagaccagcctgtccaacatgatgaaaccctgtctctattaaaaaataataataataaaaaaaatagccaggcacagtggcgggtgcctgtagtcccagctactcaggaggctgaggcaggagaattgcttgaacccgggaggcggaggttgcagtgagccaagatcgcgccagtgcactccagcctgggtgacagagcaagactccatcttgaaaaaaaaaattagctgggtgtggtgatgcatgcctgtagcccagctaccagcactctagcctgggtgacaaagtgagaccctgtctcaataaagaaaaaattaaagaggacctatataaatggaaaggcatttcatgttcatgttgaagacatgatattgttaagatggcagtattccccaaagcgatctatggatttaatgcaatccctatcagaattttaatgtcttttcttcagaaatggaaaagctgactcctctaattcatagggaactgtaagagggcctgaacagccaaaagaatcttgaaaaagcaaaacaaaactggaggactcaaacttcctaatttccaaatgtattgcaaagctatagtaatcaaaacagtgtggtattgctgtaagtataaacatatagaccactagaatagaatcaagagtccagaattaaacatctatggccagttgattttcaacaaggatgtcaaaactattcaatggagaaagaatagtctcttcgataagtggtgctgaaaccactaggtattcacattgcaaaagaactcattcacccctacctcatatcatatgaaaatattaactcaaaatggatcaatgacctaagtataagagttaaaattataaatctcttagaagaagtcgtagagtaaatcttaatgaccttaaatttggcaatggatttgtagaacaaaagcataagcaacaaaagaaaaaataattagacttcaccaaaactaaaaatatttgtgcatcaaaggatattatcaaaaagtaaaataacaactacagaaagggagaaaatatttacaaatattatatctaatacgtacagatgataacaacaacaaaaagacaacacagtttaaaaaggagcaaaggacttgaattgacattctccaaagaagacatgtaaatagctaagaagcacatgaaaagatgctaactctcattagtttagggatatacaaatctaaaccacagtgacataccacttcatacccaccggatagccattaaaaataaagaaaagaaagtgttagttaggatgtggacaaactggaactctcatacagtgctaatggaagtataaaatagtacagctactgtggaaaacagtttgttcctcaaaaaattaaacataggctgggcacagtggctcatgcctgtaatcccagctctttgggaggccaaggtgggcggatcacttgagcacaggagttcaagaccagcctgggcaacatggtgaaaccttgtctccacaaaaaaatacagaaagttacctgggcatggtggtgcacacctgtagtcccagctactcaggagactgaggtggaagaatcacctgagccccagaggttgagactgtaataagccaagttcatgccactgcactccagcctgggtgtcagagtgagactcaaaaaaaaaaaaaaaaaaaaaaawaattgaaaacaggtactcaaacaaatacacacagatgttcatggcaacactattcacaataatcaaagctgaggatgatggctcacacctgtaatcccagctctttgttaggccaaggcaggaggattgcttaagaccaggcgttcaagaccagcctggacaacatatctctacaaaataggaaataaaaaaattagccagtcatggtggtgtgcacctgtagtcttagctactctggaggctgaggcgggaggatcacttgaacccaggaattcaaggttacagtgagctacgatcacaccactgcacttcagccttgatgaaagagcaagaccctttctcaaaaagtcaaaaggtaaaaacaactgaaatgtcaatgaatagataaaatgtagtatgtacatacaatggaatattactgagctataaaaaggaatgaagtaccgatacatattaaaatgtggatgaaccttaaaaacattatgccaaatgcaagaaaccaaacacaaaaagtcacatattgtatgattttatttatatgaaatatccagaataagtaaatccatagagacggaaagcagattggtggtttccagggtttgggagtaggatggaatggagattgacttcttttttttttttyccccataaagtgaaagcaagtttattaagaaagtaaaggaataaaagaatggctgctccataggcagagcagccgggattgacttcttaatggatatggggtttcttctggggtgacgaaaatgttttggaactagatagaggtggtggttgcacagcactgtgggtgtactaaatgccacagaattatacaatttaagatggctaacttttatgttatgtggatttcacctcaataaaaaaaattaaaccatgcaagtactaaaagtaagcagggtgttagtggtaaattcctttatcatctgaaagtaaggaaagcctaattctgactcaaagtcaaacttgtgaagcaaaaaaaagattgacaaattaggccaggtgcagtgactcatgcctgtaatagcagcactttgggaggccaaggcagaaggatcactggagcccaggagttcgaggatggagtgagctgtgattgtgctactacacaatcagctactactacctgaacaaccccatcactaaaaaaaaaaaaaaaaaaaagaagtgtacagagaaagaaatgcagatagccattgtacatatgaaattatgcttaaccttccataagaggtatgcaaattaaaactacactgagatattatttctcacctgttagattggaaaaaatccaaaagtttgacaatatactctcttggcaagtctggtgaaactagaaatcctgtacattgttggtgggggtacaaaatggtacaatctctatggaggtacattttgtagtatctcacagaattatagttaacctctgatccaataatccacttttttttttttttttatgagacggactcttgctctgtcgcccaggctagagtgcagtagtgccatctcggctcactgcaagctctgcctcctgggttcacgtcattctcttgcctcagcctcctgagtagctgggactacaggcgcccaccactacacccggctaattatttgtatttttagtagggacggggtttcactgtgttagccaggatggtctcgatctcctgacctcgtgatctgcccacctctgcctcccaaagtgctgtaattacaggcgtgagccaccacgcccggccccaataatccacttttaagaatmtattctgaagccatttctatgcaaagttgaaataacatttgcttatttatgtgtttttttagagacagggtcttgctctgtcacctaggctggagtactgtggtatgatcatgcctggagaayagtggcatgatcactgaaggctggaatcctgtgttcaagtgatcctcctgcctcagcctcccaaatagctgggactacaggcatgtgccaccatgcccagataatttttaaaattttttgtagagacaagagtctcactttattgcccaggctggtcttgaactcctggcctcaatgactctcctgcttaagcctcccaaagtgctgggattatggatgtaagccactgctcccagcctgaaataacatttatatacagttattcattgggacattatttaaagtggcaaaatattggaaatgactcagaagttctttagtgcaagagtagttgaaaaagctgtggtgtgtccactcaattgaatactatgcatctgttaaaactaatgaggaagctctatatgatctaatatgaaataatcaccaggatatattattaagtgaaaaaaacaagatgtagaatagtgttartagtatgttacctatattgtaagtagagaggggaaataaagaaaaaatacatatatatttacaaaaaatacttgctagaagtataaaccagaaacaaaatttattacctcagatttaacaatagggawwggggctgaagggcatgaaggaaatgcagtttctctgagtgtgcctttttgtatagctttgacttgtgagcctgtaaatgtttttcaaaatataaagttaagaaaagaaacaaaacctaaaattgcaaaaaaagaaagaaatgaccctaactgtatatcaaaatagtaacataaccacatgggtaaaataatttttcaataactttagaatactttatcagttctttggtgggacaaaaagaactataattgtaatccttattcagtagtttaattgttaatagtgatattgatactacagtgatattgatactatgtatatagtgtgtgaatatatattttatatatatatatatatgcattacagagtagcaaataaggaattatgttcctgttattaggaacgaggattttcaaagtaagataaattagatgaaagtataaattcaaaagacttttaaaatactgtaatgataaatatgaattggcaatatcaatatgaattctggtttttaagtgctttttctagtactatgcattggcaaatgtagcatgagctcctttagcaactagattttggtctctatgtaccattatccactaaaagtaaccaggattccatggggaaataacttgatttttggtctagagcagggtttttttaaagctttgtagaaattactctccatcccaggagttttttttttgttttgtttgtttgtttgtttgtttgtttattatactttaagttttagggtacatgtgtacaacgtgcaggtttgttacatatgtatacatgtgccacgctggtgtgctgcacccattaacttgtcatttagcattaggtatatctcctaatgctatccctgccccctccccccacccaaccagcagtttgtttagaattttttttcctaattacctcctaccacatgaaattttaacaccacagatatatcatatatctgtttatgtattgtgaccatttaccattggaatagctaagattttgttacccccaccaagaaccaattttgtttggaatgcatggctgagggcaaagaaagcccaggatgatcttgcagcatgttgtaaaggaaagcaaggaaacaatcaagcccaaagaggctcccagtgaccaaaattgggacaatttgggcattaaaaagaataattatgtagttgattgaagtacactgaatgtagctactcaggaggctgaagtgggagtatcgcttgagcctaggaatttagaccagcctgggcaacatagctagatcttatctctaagaaaattaaaaagttagccaggcatgatggcacacacctatagtcctagttactcagtgggctgatgttggaggattgcttgagcccaggagtttgaggctgcagtgaactgtgctagcatcactgcattccagccactgacagagtaagagcctgtctytaaaacacacacacacacacacacacacacacacamacacacacacacacacactgaatatatataataaaaatccacaagctcataatgaatgaaaacaagagctgggtgctaggtgaggtagctcatgcacctgtaatcccagcactttcgaaggccaaggcaggggaatcacttgagttcaggagttcgagaccagcctgggcaacatggtgaaaccccatctctacaaaaatacagaaatgagctaggcattgtgctatgcgcctgtagtctgagctactcaggaagctgaggttggaggatcgcttgaacctgggagtttgaggctgcagtgagctgtgatcgtaccacagcactctagcatgggtgacagagcaagactctgccccccccccccgccaaaattaagtaaataagacaaattaatactcatccagcactattggaaaatatttttcactaactctctactctgaaaaccaattaaagggaaataaacattctgccttttcagtgagaactgtagttcagtataatcaaatagtcccatttgcagaaggaaagctcttctttacagaraatatgccagttgatggtggagaactagacattcctcaaaggatcacccctaatcagaaggggaaagcttcacaatgagatcttgttggtgccaccttaacctagttagtaaacttagccttacttataatgggacaatgaggcaatatgcctccagtatgatgcaatatacagcacatgggatcacctcttaaagtattcttaacaaaattatttaacataaatcagttaagttagatcaatttccagttaataggaaatacaagggatagkgaaataagttaaatgattctatgtggaaacaattagacaagtccagaatgtgggacatgaccttctgcaaagacaactggcctgttcttttctcttttctctctttttttttttttcttttttgagatggagtcttgctttgttgcccaggctggagtgtagtggcatgatcttggcttactgcaacctctgcctcccgggttcaaggttcmagtgattctcctgcttcagcctcccaagtagctgagattacaggcgcccaccaccacgcctggcymgtttttgtattttttgtagaaatggaatttctccatattggccaggctggtcttgaattcctgacctcaggtgatctacccgcctcggcctcccaaagtgctgggattacaggcatgagccaccgtgcctgaccttcttttcaaaaagttactatgggctggggatggtggctcacgcctgtaatcctaacactttggaaggctgaggcgggcacattgcttgagcccaggagttcaagatcagcctaggcagcatggtaaaagcccatctctactaaaatacaaaaaattagccaggagtggtgatatgtgcctgtagtcccagctactcaaggtgctgaggtgtgatgatcgcttgagccaggaggtcaagacggcagtgagctgtgatcacaccactgcactccagcctgggtgacagcgagaccctgtctcaaaaaagttactatgaaaaaaggagaggctgcactattctagattaaaagacacttcaaagacataacgagatgcagtgcatggttcatgtttggatgcttttataaaagacatttgggggaataattgggaaaatttgaatatggactgggtattgaatgatactaggcaataatttttaattttgtttagcttgttaatggtgtttggctatgttggaaaaatttctttatatatatcttttctcttctcttttttttttttttttttttgagacagagtctctctctgtcgcccatggtagagtgcagtggcacaatctctgctcactgtgcaacctctgcctcctgggttcaagtgattctcatgcctcagcctcccaaatagctgggattacagtcatgtaccaccacacccagctaattttttttttttttgagacagagtcttgctctgtcgcccaggctggagtgcaatgatgcgatctcggctcactgcaacctctgtttcctgggttcaagcaattctcctgcctcagcctcctaaatagctgggattacaggcatgtgccactacacccggctaatttttgtatttttagtagagacggggtttcaccatgttggtcaggctggtcttgaactcctgacctcgtgatctgcctgccccggcctcctaaagtgctgggattacagacgtgagccactgtgcccggccttaatttttacatttttagtagacggggtttctccatgttgaccaggcttgtcttgagcttctggcctcaagtgatccacccaccttggcctcccaaagtgctggtttacaggcatgagccaccacacccagctggaaaaatatcttatattttattattattattgagacagagtttcactctgccaccaggctggagtgcagtggtgcgatctcagctcactgcaacctctgcctcccaagttcaagcgattctcaagcctcagccttccaaatagctgggattacaggcatgtgccaccatgccggctcatttttgtatttttagtagaaatggggttttgctgtgttggccaggctggtcttgaactcctggcctcaagtgatccacctgcctcgacctcctaaagtgttaggattacaggcatgagccactgcacccagccatttcttatattttagagatgcattttgaagtatttagaggtgacatgtttcataatgtctgtcatttattttaaaacactttagcatgcagaaatagatgaaacaagtatggcaaaaatgtcagtgtgttaaatctaggagacgggtatatgggcattgactgcagcagtctttcaactactttttaaaaatatatgtttgaaaatgttcataatataacgtttaaaaaattgaaaatggtttgrttgaagggtccccaggaaatgctacttctcagccaaggaagggtaagttggctttgacttatgttgagaacgtgtggctcctggattcttcctcatatgtctttttttcttccctctcccttcaccctacctcctttccagccctctttgattccatgcacagcagccaggcctcagataacccattttctccaccacgtactcttcattcacctcccctgcaactccagcagcgctctgagaagcccccttggtgtaagtaatccttttggaactgcctagacaaaagtcatgaagactggagtgattggtgaatgaggggcctgttgcatgaggtcaaagaaggtggggcttgaaagaccaggaatatccattctgggaagcagtctcatctgccatttctaagatgaaaggagaatctgtttattctctctctttacctctttacctctgttctccatgttccttctatttcattggagagaaggttttctgcagtattaggaataattgttttttttttttgagagacagagtttcgctcttattgcccaggcacgatcttggctcactgcaacgtctgcctccctggttcaagcgattctcctgcctcarcctcccaagtagctgggattacaggcatgcaccaccacgcccagctaaattttgtatttttagtagagacggggtttctccatgttggtcaggctggtctcaaactcccgacctcaggtgacccgcctgcctcagaggaataatttctaatttggagagaagttcttcctcaaagcgctctttggggaagaaagaatggagacttcattcycctttcatccctatttgatctctacagttttctccagtaaagatgactagcagacaacctagatatttagaaaagctgggagcaggaggccgggcatgatggctcacgcctgtaatcccagcactttgggaggccgaggcgggcagatcacgaggtcaggagattgagaccatcctggctaacacggtgaaacccctgtctctactaaaaatacaaaaaattagccgagcgtggtggtgggtgcctgtagtcccagctactcggaaggctgaggcaggagaatggcagagcttgcagtgagctgagatggcgccaatgcactccagcctgggcaacaaagtgagactccgtctcaaaaacaagcaaacaaaaaaggctgggagcaggagagactagaatctgctacttatttctacataacccttctctctgttgcctgttttcaatttttagtttaagttgagatgctgctttttcccatcttgtttattatctctaatctatcactagttatttttggtaacaatgtgaacagtggagccacacagagttgttagagtgactatagagaggaggagctactggtggtaattggaggtgggaatatgggccagaggcactggtgaagtrtcatcctgcctccggggaataactgaaatcaaatatgcctttcattattttatttggataggaccgaagtaaagattcttacttcattcagcattggacttaacagttgtagaatttttgccctttttctggcatcctgtttgaggaagaaactttcctctctgacaccaagaattcctcccctgaatttcagattatcctacactctttgtagggccattgccctttttacctgtttcctggagtgtttatgatttctgtgcccctggaaatcttacccttctccctcttctgtttctgtttgacctttttgatttgcctgaatcagaccactagcaggatattaaggctacttctttacttgggtaaagctcagcttacatcttttctttttctttttttccatctagtatcagatttttgactcagtatcaggtgtgtagcctcactggtaaacgtcttctttagggtctgtatgtctgcatcagaaataggctccacatctcttaaagccttgttggttcaaaaccatgatcttctctctctctctctctctctctctttttttttttttttttttgagayggagtcttgctccgtcacccaggctggagtacagtggcgcgatctcggctcactgcaacctccacatcccaggctcaagtgattctcctacctcagcctcctgagtaactgggattacaggcacgtgccaccatacctggctaatttttgtatttttagtagagacggggttttgccatgttggccaggctggtttcgaactcctgatctcaagtgatgcacccacctcagcctcccaaagtgttgggattacaggcatgagccacygcgtctggcttctttttctgcttgaagcatgcctcctttgattcttttttttttttttttttttttttttttgaggtggagtcttgctctgtcatccaggctggagtgcaatggtgcaatctcggctcactgcaacctccgcctcctgggttcaagtgattcttctgcctcagcctcctgagtagctgtagctgggattacaggcatgcgccaccatgcctggctaatttttttttgtatttttagtagaggaggagtttcactaygttggtcaggctggtctcgaactcctgaccttgtgatctgcccacctcggcctcccaaagtgctgggattacaagtatgagccaccgtgtccagcccctcctttgattgtttacagaagagagataactagcataccttcaactcaatgatggattgagcctttgtaggctcaggtttaccaacttttcaaggttttcttcaatggcaatatgttctgatgttcccttttcccagaatctgtcattattgataccatagtgctttaatatatcgttataatattatcaacaaaaatgatgtttaccaagggaaaagtaggttagtcaagtactagagggcratgaagcagtagaggatggagtaggaatcatcccacagtgtaattgaagactctgaggtctttattacactactgtcaggatgtaggaaatcagtttttaaatgttttccgtgtatataatatgcacaagcctgtaacattgtatgtcccaagacttacaagcgtcttaactctggatccatagatgtggtttcagggtagggtctgtgagcttcaggaatcacatgtaaagattagtgtgaatattcttatatagatttttcctggaagatatctgacttagtacctcaaaggggccactgacccctagaaaggttaagaactgccatgtagaaattccatggccrtcttccatttttgggtaaactattttctttttttttttttttctgagacagagtcttgctttgttgcccaggctggagtatagtggcacaatttcggctcactgcaacctccacctctggggttcaagtgattcacctgcctcagcctcctgagtagctgggattacagacagccgccactacgcctggctaatttttgtatttttagtagagacaaggttttgccatgttggccaggctggtttagagctcctgacctcaagtgatctgcctgcctcggcctcccaaagtgctgggattacaggcgtgagccaccrcacccagccaggtaaaccattttctttcctattgttctgatttacatggtttttctacattcttctgccaacttatcatttgggctataaataatgattacctctgccccagaaatacattgattgctttaaagaatgattcttaacagaaggtgtacatcagattcaaatgagagtgttccaacaaaattatattgccttcttcctcctccctcctccaaactacacctttacgctaaacctatagaattagaatctctggagttgaaaactggaaattagtattttaaaaaattttttcatgattttgtttatgaaccactgggctaaagtattcatatgcttccaaagtaggaatgagaggccttgggaacttggaattgggatgggagtgtatttgtgaaagaaccagatgaagtgggtcttagcactctctcctgaagtcttagatgtaccttattgttactctcaaagtatacattaggccagggtgacagttcctgaggtaagcaaacttaggagtctctgcttaacttaggaagaatttggacactcttccctcaagacataagtagcataggccaacaattctagcatttgaactatctgcacagggtagagcctactcttccagcttctctaacttgatctcttgactttgctttacagacagcagtggcccttctagcactgtgtccagtgctggtccttcttcccctactacagtagatggtaactcccaatttggcttcagtgatcaaccctccctaaattcacacgtggctgaagaacatcaaggccttgggctgctccaggagacccctgggagtggagcacaagagctctccatagaaggggagcaagagctttttgaaccaaatcagtccccacaggtgccacctatggaaaccagccagccatacgaggaggtcagccagccatgtcaggaggtccctgacatcagccagccatgccaggacatttctgaggcgctcagccagccatgtcagaaggtccctgacatcagccagcaatgccaggagaaccatgacaatggtaaccacacatgccaggaggtccctcacatcagccagccatgccagaagtccagccaactgtgccagaaagtctctgaggaagtttgccagctatgtctggagaactccgaggaggtcagccagccatgccagggggtctctgtggaggttggcaagctggtccataagttccatgtaggggttggtagcttggtccaggaaacccttgtagaagttggcagcccagctgaagagatccctgaggaggtcatccagccataccaggagttctctgtggaggttggcaggctggcccaggagacttctgcgatcaatctgttatctcagggcatccctgagattgataaaccatcccaagagttccctgaggagattgatctgcaggcccaggaggtccctgaggagataaattagaagtcctgggtggtccctgaagtgattgatcagctgcctggagagggtattcctcaagcccagcatccatctggtgatccaaaccctcagagccagtctctagcccatgaccagcactcaccccttccaccagcaacatgtgattaattttctcattagtggtatcacactataccagccatttgagccagcaaccttttctgttggctaactcactggccagctctcaccagcggtgtctggggaagtagttctctttgtatgaagcatacctgtgccagagctgtggttgaggaggagccagttttaggttcraagaagccattggctcctcacttagccattagacttgaataggatttccttggggtgggttggtctgtcattacccagccttctctgagcatcctaggaaatcacagattgttaaaggaaatgccgcttcactgctgaagacaccatctggcgacagcaaatgcaaaagaggggactctagggtcttcacttttctggggaaatgttcacgacttctcaaggtacgcttagaccatatgtgcattcaggggactcttgtctttgccagcactcctcaggtgagcccgggatggctatctgaaatgtctggaaaatagagtcccttccccaaacatctgacatggccactaaatctttagacttgccttatagatccttccatatcatccccaagtgccccttctgcctcagtcctgttcctctgggcaatagctctagggaaaagtaggtattagactgctgtgcaaaattcagagcaactacttaaaatgctctagaggattcttagccagtctgtgaaagtgggcctcctctgtggtggggctgtttggcttaggagatgctgtagtagtagagataatcaggttctattttaagcaatcagcagagatcaatattgtacagatacaagcaaaggtttaataaatatatatatatatatttatttctgtagttgtgccagggacagactggccaaagaccaaacactgcagggtccccaagaaatttgtccttatatcattgtgtctgagggccagatatgattatgaagctttttccaaagatccagggatgggaatgggagtgggtaggaggggtaatgcggtcattggagtcgggggctggaacattatgagtgctcaataaatataaactaatgagaatggtggtgatggatgatggtgatgtccttgtgaattcaagaatgaatataggctgggcacggtggcttacacctgtaatcccagcactttgggaggccaaggcgggcagatcatttgaggtcaggagttggagaccaacctggccaacatggtgaaaccttgtctctactaaaaacacaaaaattagccaggcatggtggtggacacctgtaatcccagctattcgggaggctgagacaggagaatcacttgaaccctggaggcagaggttgcagtgagccaaaatcacgccactgccctccagcctgggcaaaaatgcaagactctgtctcaaaaaaaaaaaaaaaggaatacgactatgagtcaattgtgtctgtaactgattaatctgaatcggtcaaaagccattatagttgagcaggaatgggctgtaaaaatacagagatcaggcatccaaaaatagactataaaaatatagagatcagctgggcgtggtggctcacatctgtctgtaatcctagcactttgggaggccgaggtgggtggatcatgaggtcaagagattgagactatcctggccaacatggtgaaaccccatctctactaaaaatataaaaattagctgggcatggtggcacatgcctgtaatcccagctactcgggaggctgaagcaggagaattgcttgaatccaggaggtggaggttgcagtgagccaagatcgcgccactgcactccagcctggtgacagaatgagactctgtctccaaaaaaaaaaaaaaaaaagagagatcaggcatcccaagaggagcctatggcagttaacccactatctcaaaaggtatttatttatttatttagagacagagtctcgctctgtcacccaggctacagtgcagtggtgcgatctcagctcactgcaactgccgcctcctgggttcaagcgattctcctgccttagcctcctgagtagctgggattacagatgcccgtcaccacacccagctaattttttttgtatttttagtagagacggggtttcgccgtgttggccaggctggtctcgaactcctgacctcaggtgatctgcccgcctcggcctcccaaagtgctgggattacaggtgtgagccaccacgcccggtccccaaaaggtctttattgagtaagtagagtgttggatgggggactggaaagaggttccctctctgtgaagcaccagagggtacatgccttctcaccaagttcttggaatcatcctgttaatttttcactctgatggagtgtcaggaggagtttatataaaggggctatgccctttctctgctcctttgacatctttaccatgagagagcccagaacagtgggagggctagaatatgcccctccccaaatatacacattcataacctggccacttctgacatacttaggactataaagggtttccatggaggaggaaagtcgaccgttttactccatggaaatcctgactgcacaaggagagttgtttccaacctcattaggctctggatctcttagggtccttcagctttttacccctttagcccaagaggctgtccagggtagctgatcctggttatttggtcctcaactcttgaccccacggaatgcatatcccctycccaggaggccttctgcccctcttccctcccccagaccagatgtatgtatccaccctaggctcctattcttcatactcaggcacaagtgtttccagtaatcaaaagcattggagtcttccaagataaattcaatactggttgaagcagagaggtagaagccagggcccagtaactaagcatgtatggagtcagaaaaagcctaagcagcactacactatctgcaatgaacttggtttattgttagagttggaggtggctccgttacagcagctgggaactatagcagggaagcgtggggaggagcagaacacagcagcacggggagggtggagctaggaagaacacaaggtgggctcattttggtttcccagtcgtttggcagagaaggcaagcccacatgactaccagcttctgggtttctcagtctggcagtagtctggcagggctgctcactggcttgcttggggcgaggtcctctcctggggtggtattttcagcccgttttcatttcactctgtaggagttaasctgtggctcagcttctccctttttccttcctccatctcattttccccaagtcctctggcctggcttccacctcccagatcctctgtccaagagcgggtttggagaggcagccagtgttcccatttcagctgcaggatggcatagtggaatgttgggggagtcacacattgctggggtgtcaaatgttgggatgtcaggcagtggcttatttttaacccattaaacaccaagccacagcagatgaccacatgcagagaagccaagcaggggatgagaagggatcaggataattgaaatggggtgagtaaaaacttcaaagagtcagggagtttggaagaattctggcattggggcttgggctctccttgccgttttgtgctgtctggacacagccctgggatgtgaatggtataaagcagggtctgggggataagctcctttctcctctcaccagtctattggtctaaagagcttcaagttttaaattgagacattcagatactgagggaagcagtagaacagtatagcagtgggatacccccaggaccctgctagaactcagaccctggtggttgaggagatgggggatgggaaatggaggaaagggtgcagctctgggcacctcactgacggtatcctgccccaggtcacataaattactattggaaatccytcccaggatgccaaataaatagattgagataaagaggtccctggagttggggatataatctccctctacgagggaggaggttgctctctgagacccatcctcagtccccattcaataccagcatttgacagtgctaggagagggttctcaggcatcagatgctatcctattctaatktgtcccctcccccatcctctccctgttaactttggtttgagacacctcacaggaatggatgatggggagggacaacccctcccatttagcccagcccaagtccccacaacaagacatctccctcccctccccctagctcccatctccctcaaccccaaaggactcagcagtagccattctctaaaggagctgggggagtggatccttggggaagggagggcggctctttcagaactcaatcttgcaggcagggaaggactcatcctgcatcaccacggtgctgctgctagccaggaccaggacattcagttgttgctgctgctcatgagtttgttggtaccactcacgagtcacctccgtgtcatgagtagggatcagagtcacctagaagggagataagatatgtctgatgtgagaacataaagggaaggtaggtgagggggaagggscacctcatggtctcagaagcagctctgctgcccttagaaaaggcccatcctttaataaatagggactgtgttccactactgcctctgagtgagcgttgaccagactacttccttggtgtcctttgctactcacctgaagattctccccccactgggccttgccctccagcagggcatccagcacagcccggcttggctcgccattggcagggtcattcccactgaccacatagtaggatgcacgcactcgacggaagaagtcwaggtcagcagtcttgccactscaatgattcgggatgtaggcgagatccacatatacaggggcaccagagctgcccttggaactcaaggccactgtagagacaagccaggattcattgtagaggaaaagtagaacccttttggcaaccttcccctctgtcccactcctgaagtctgaccagcccacacccagccctaacccacactctctgccaagtttcatgayatacttacttggtcctgccttgagtccattgactagkcctttggacatggggctgtgtccatccttttcctctgctggggtgacctggcttgtggtgctgcgtgrtcgaggtggggcccgggatrctcgatctgcagrccctttaccaggggtgggtgagcgttttccccgaagatccagacgccgtgcaggggacrctggcttgkccttrcctggggccctrcgccctactcgcccctgaaccttttccttctcccgtagcctctctactctcccagactctgagctgagcccctcrgggtcagccatgcacacatcagggcggggaggggatgggcgggggtctggctgtgggagaggaggtgggtcatggccaggcctggggtggtgagtaccactgacacccccagctttgtccacaggtaggaagtctccatcttcatctgagtcgagggctgcctcagctgtgatggacggacactcctcagtttctggcgggacatcagaatctgactgtgaggagcctgagtcactggctgatgtagggggtgtctcatcagtcacagggcatgggcccccagtggtccctggcccccctacccggcgccgcccccctcttcctactagccgaacttcctcagttgagaggtccctatcatctatggatgggggcagaggtgggttcaggaaggatggggagagctccccacgatggggccgaggctcagtggcacatccctggggcccagcttcgacctcaggagaggcactgctgggtgggcccccggagccccctgcaggacacactggctgctcaggggagagcaatrtgtcaggccgggagctcctctcagctccttcaggccaggccccacgttcccaggcagggcaagccgcagcctcttcattttcagccttggctggggcagggcctggggggttagggctggtttcagttgggccattggctgcacaatcctcagagggaacctggaagrggcttggcttctccgtggctgcctctgagcactccaggtggcacggcaggatgccatcacccatgwctccaggcaggcttggagctggagctagggccaagtccagtgaagctgggggtgctgggctcagaggagtgaggtcccagaggctgtgggcagctggttccattcctgggtccagctctccagactcctgttctgcagcctcaaggcttggagagaagcgctcygccacacttgaaatcacaggcgtggtagcctcagaggaggagccctcagacagggctggtgaggcaggtcgtggcagattggagaggagaggggccccaggagaactgggtgatgggagctggggcagtgaggaatccaggctgggggccttggtcacttccaggtattcatcatrccgggttctggtggggggtcctggagccagagccagagctcgatccccagagaaggcaagggagccacagggtgccgagcggggttcagctggagagggcakctgtgggggagctggctgcaatgaggagaagccaaaggctgaagcagggaagtccagactgggtcgggcaggccccaggtgtgagtccaagggagggctaacatgtgcctcagtttctggccataatgtgggggaccccataggaatggggtgaggaggacttggggattgggcctctttttckgsctgttcccgagcccccttctccagttctgagtcactagtgctgtcatcccagtgactccggcctgattccttgggggatggggacctcctatctgggctgcagctcaggatgttaccattaagaggggggcttgggcctttgctcaggataggagcacgggggggaactgcaggtggggtgagkctgggctccatacttggccctggctctgkccttgggggtacagtgggtcctgccagggctgcatagctgaaggttggagtgtcagactggaggctcttgggtgagataggagatgaaagctccttctctgcagatgtgtttcggccggcagctgcctccttggt

SEQ ID NO: 10035 - DNA, 19416 bp, Homo sapiens
ccacgggcactgggaatgcagtgccagcaatgctgtggcccgagtggccacctccacgaacgtctacgtgctgggttagtggctggagagagggccaggggctgggagaaactacttgggaatcgtttttggaggcccagaaagaggatcatgggtgtgggacccctgggatgatgatgggtgaaggtcagtggccctggggcccctgctactctgtacactccctcaggccctgaccaccatccctccattcccccctgcctaggcactagccctcatgttgtcaccaatgtgtccgtggtggctttgcccaagggtgccaatgtctcctgggagcctggctttgatggtggttatctgcagagattcagtgtctggtacaccccactgtgagtgacctgctcctgccatttctctgtgccaatcttgcctcctttcctctcctccttgaacctatctggccttctgccctttcttctgtccctctatccctcaccagtcctggctctgcttccctgtttccagattctgaggcattcagggccaaggtcctgagaccttggatggttgagcagaggggaggtggttagatctctggaccccagatcttctggtcttcctagctcacgaggtgccccccatgtcctcatgtctcccagggccaagcgtcctgaccgaatgcaccatgactgggtgtccttggcagtgcctgtgggggctgctcacctcctagtgccagggctgcagccccacacccagtaccagttcagcgtgctagctcagaacaagctggggagtggtcccttcagcgaaatcgtcttgtctgctccggaaggtgagaagcttctcgtcccagaacagcagagacaaggatggggaagggctgctgggagagctgggatatgggaggccctgggtgggaaggggcagaggtgctggccagcttggggtccagaggggtgtgtggaagatgatttgagcttgtcttcaggggttctgggagaagagttgggcactgggagttgtggaaggccaggggaggggcgctgggaatccttgctctgacctgcctttctgtcccacgcagggcttcctaccacgccagctgcacccgggcttcccccaacagagataccgcctcccctgtcccctccgcggggtctggtggcagtgaggacaccccggggggtactcctgcattgggatcccccagagctggtccctaagagactggatggctacgtcttggaaggccggcaaggctcccagggctgggaggtgctggacccggctgtggcaggcacagaaacagagctgctggtgccaggcctcatcaaggtatgtgcgaaaggcgatacagagagaggcctcctaggggctctcctgcgtccttctccattccccaaactctatcttctcatcttgatttgagctcttcacctctgcgtcctacctcacccttccgtcccacgtgcacggtctttccgcgccccgctgggttgggcggtgctgggccctgacctccctcctggtaccccatccccatcgcaggatgttctctacgagttccgcctcgtggccttcgcgggcagcttcgtcagcgaccccagcaacacggccaacgtctccacttccggtgagcacctggcgtgagggaggagccccagggctgctccgagtccactgaccctccctcgtggacccctgcctaggtctggaggtctacccttcgcgcacgcagctgccgggcctcctgcctcagcccgtgctggccggcgtggtgggcggagtctgctttytgggagtggccgtccttgtgagcatcctggccggctgcctcctgaaccsgcgcagggctgcccgccgccgccgcaagcgcctccgccaaggtaagtccctccaccctcagccctgctactgcgcacttgggcctagcctccttaagcccctcctacctgggggaaaagccctcgctcctgtgtgatccaggtgcattctcttagtcctgcatctggtcctgcctacgcttttcccagccggatggggttgggcgcctggtgttgggtgagagagtctccgcctagagggccttgatttttgcctgtgtcacctactattctyatgcccttccagatccacctcttatcttctctccgaccgggaagtcagytgcmccgtaagtgcctccmcctccttggctttcttctgcctttccattgtacgkgccagtatcttctgcttccttttttgcatctttaccagggggatgttgggtgttgggraggaacaaaagtgggagagggtaagaaggggtgtgcagtggccccagcctgaggccgttccagtatggcctgtgccttccytccacccytccaccttgttggtcctttcctcgcttgttctycctagctctgctctgttgttcmccaaacctctcaaggcctgacgctggctcctgggagggggacctgcccctaccacagaccctgatctcctgtccttccccagctctgctctgggctcaggcagtcctgacagcgtggcgaagctgaagctccagggatccccagtccccagcctgcgccagagtctgctctggggggatcctgccggaactcccagcccccacccggatcctccatctagccggggacccttacctctggagcccatttgccggggcccagacgggcgctttgtkatggggcccactgtggcggccccccaggaaaggtcaggccgggagcaggcagaacctcggactccagcccagcgtctggcccggtcctttgactgtagcagcagcagccccagtggggcaccycagcccctctgcattgaagacatcagccctgtggcaccccctccagcagccccacycagtcccttgccaggtcctggacccctgctccagtacctgagcctgcccttcttccgagagatgaatgtggatggggactggcccccgcttgaggagcccagccctgytgcacccccagattacatggatacccggcgctgtcccacctcatctttccttcgttctccagaaacccctcctgtatcccccagggaatcacttcctggggctgtggtaggggctggggccactgcagagcccccttacacagccctggctgactggacactgagggagcggctgctgccaggccttctccctgctgcccctcgaggcagcctcaccagccagagcagygggcgaggcagcgcttcgttcctgcggcccccctccacagccccctctgcaggaggcagctacctcagccctgctccaggagacaccagcagctgggccagtggccctgagagatggccccgaagggagcatgtggtgacagtcagcaagaggtgagagcagtccctgcccatccctgcctccgcctcagtcccaccccagacctctcacccctctcccaataccctgcaccttctctgctccactcccaccctgggaacgggaaaacttgtcccttttagaagcttttgctgaggtccagggatttttcaggggaaacccatgacctaacgtgagtttgcggtcgctgaattcagacttttctgaacagcctctattcctccacccacaccatatgtttgtctttttttttttttacaggaggaacacatctgtggacgagaactatgagtgggactcagaattccctggggacatggaattgctggagactttgcacctgggcttggccagctcccggctcagacctgaagctgagmcagagctaggtgtgtgagccccccggaaaggcaggcatctcggccatactgtcccacatccccccgccaccttaggacccatctattcccagtcaggccctgcctcccaggctcctctgctctagactgtgccttgcccccttgggccatctgtactggaagggcctagcragcttcacatctgagctcttcactcagtgaacctcagggcttcttctcattgtcctgccyrcctcttgcaggtgtgaagactccagaggagggctgcctcctgaacactgcccatgttactggccctgaggcccgctgtgctgcccttcgggaggaattcctggccttccgccgccgccgagatgctactagggctcggctaccagcctatcgacagccagtcccccaccccgaacaggccactctgctgtgaacrtccctratgtgaggctgtgaaaaggcatatggacctgcaaaggaggcccccaaccagacagacctagtttcaaacgagggcactgcccctgcctgcccctttggtgcccaggcacagaccctgatagtgggtttgggtcaccttggtatggaatgtatgtgctgaccccctaggtgagtctggggattggaacagggatcttaggtctgcctctctctctctctctctctctctctctctctctstgtgtgtgtgtgtgtgtgtgaagttttttacaggtgaataaacaaagtttgaaagatgtttctgtgtgttatctgtctttgagagagtgccaggaaaatccctggacccttaaagaagaggagaatcttcttgaataaatggaggtgcattcagcattcattcaagaaacatttattgagtgcttacggaggccagctactaaaggccagccactgaagtagatactgagaaaatacaaagctctggaagcacgcctttgcccttgaggagttctttctagtcagtgaggcggacaaagaaatagttaccgtatgataagttccgtgataaagctatgtgttggttattgtagcacaaaggaagatgttgcattcaaggccacctttagtgaacgctaatatcgtrtgctgggacaaatgccacatattgggggggagtcctcaggaccctcacagatagatggtggtaataatagtattcactatgtgccaggcactgctctaagccctataggtggactgtttagttctctacaattctatgaattaggtagtactattagctctgttctatagaccagggaactcaagcayagaatgcacaacagtcacacagcaggtaaagggtagagcaggtggggagccagtcaaggaagggaaactgtcctaggcagaggaatagcctttgtaaaggcacagaagagtgagaatgcttgacaatcagtgggactggaatatagggctgtgtaggactcggggagggaacagagaataatagaaaggttggacaggactggatattgacatcctggaatctcaggttcaagggaggactctatcatgtgtgcagaactccaccccgggggactctattcaactgaagcctgaaaggatggggggctctttctycacccctgaactgtgctgtcctccaccctcagagacaaaagaaccccagccagcctcctcgcgctgaggtctccccctctgatccctccaggatttaggaagagataccaggtcatagaaaaggagatgaaaggcagggagaagacaggtctgagccctgggtcccaacaccgaaaacacccctagggccctgggcagagtgacctcactgttagtccctgcccaggcttgaagtaagaggtgagcaagatcacgtgggggtgctgtcccggcctgcaagtcccagtcctgtcacacactagtcagttggggtcgggggaaggccttcctgtgcctccttttaccttgccagcctctaaactaggaggcttcttcctacataaacacgcccacagtgtttagctaactttctaggcagaaagtttcctactggggcacaagtytacgggctctcggtggaggctgaggtactcacgggtggagaccactgcagccgcctttgtagattcagactccccgaacctttaacccttgctctggtctactgtccctctgtctcaagcagtcctccctccttctgcgctgcggcgcctttaaaccttcttggcccttgccccgccccgggtccgccccgtctgaggcgggaccctcctgaaaatccccggctgggcagggcgcaccacttgcagctgcagcccttgccttgagtcagtgcgcygctctccagcccgcttgaacggtgagcaggtcgggggtacgggggtcggggacatgtgcgtgctgtgtagaaagcaagaagccagcgctttgaacttgctccagcgagctcggggatcaagggctggtaccaggcaagrgtccggtgactrctttaccccgccccgtgctgtcaggtcctgtccccaagccctgacccgacattgttggacgatgaggtcaggcgaggttagcccatgcatagacagggcgtccgtctggagcagggactcagggactgagccccacccgcgggctccatckctgagtcctcactggggcgaggggaaaaaagggcgtcggactttagctggctggccccgagtgaccccgggtcgtggcgccggccctgggccagctcgtgctcctgggctttyccgcgcgacccttcacttcctggttccaggagcacgtgtgagcactgcgtgccctctgagtccccgaggccgcccttttcattcctgttcctgctagcttgctattctggggacttgaggtcacgggctggggctagggggctctgcatgggtcgcacggtgaccttctgtgaagctccagtcatctctatgacggtcccctgacctcgggggtctgggtgctgcagccctgactgcgccccggggtgccctgtgtgaggttgtgggggtggtggtggctgcttttaccctgcccgagcgccgctgcccccaccgggtgccccctgctgctgggaaagccggtggtggccgcgggcggacgggcgggctgcccagaccactgcgtcaccccagcggcgggagggcggtgggtgactcatctgttgtaacggcccagggtgtggtcgtgggggtggggggcggcggctgggaggccggacctgcaggaccggaggtggactgcygcctccccccgcgccctgtgcctcctggggctacctgaagccggtgtcctgggagatctgtgagcagttggtatctgtggggcagagagaaacggggtgagagtggggatggagtgtgggattcgatgtagaagacctgcggctgggacggggctcccccagtgttctcattgacttcaaagcaccagacagcaatrgctctctatctctagccccctcccagtttctcctccccactacaaggggcagacctacaactgcagaggaggccaaggcagggcgggcccagtagggccctaccattccagaaccaacaaataggttttgtccaaccgcaactccctccctcaccccaaggcctctgcccctgtcccccaccccgggattggcccctaatcctttcttcattccatcccttctccctccagaattttcagctgtgggttctctagctcagaacactttcccttcccaggggatttcttctcctgaacaactacttcctgmgtcctcttcttcaccccaacacgggtcatttcctatcttcccccacacgctgtccatccccactatagctgtctcctggaataatctcttgcacctggctacacccgagcactgctgagacgatcccacttctgctcccgtgctcacagcctgctcaccacaacgtctgtgttgacagggtgtttctgcccggagcccccacccagcctccaacactgtttggtacacagaagccatggcaacrgcccccacctcatcccctcctcccacgcaagctttggagcttcctgtttgtgtagcctcagctttctcttctgctcctgactctcggtggtgaggggctgccctacggtggttcccttaattgtgggccgccccccatccttgctgctggctgtggcacctcgctctgtgggctggtgccctcactgtgctgctctttgagaacactccctgtcccaaatctgagttgggaagttctcctgtgttccatctgcacggtggatggagagtccctttgtcttcccaattaaacaccctagccaagaaccctgaagtcctccctgcccccacccatgtccgccttttctttggctttggctttggtgaggtaagcttccagcccagggtctgggtggggccgagtgccttgcgtggcccctccccgtttcccgcctattgtaactccagggtgagggtgagggttgttctcacagctgcagtagcgctagggtttaggttgctccctgccagtccatcccccaggttgttcagctgtcaccttcctttggggtccccagctctgggggtcccccacacctgtcttccagctgggcatatctcttctcaccctggtaggcaacttgcttactgttttctttatgtttgagggaaggcaggggcaggtcccctgggtgtccctagggtgggccttcccagctccagcagccrcagcccatsagcttctgcctgcccgtgggggtggggaagagaaacagctgctgaccaggcctggcctggttggaactgccccttctcaggaccccgccctatggytctggcacctcagagcttgagggcaatggccccagagtggagcagatacastgcagctggaggccgtgaccctgccagctgtgtccaggccccagcgttgggcggtggagggggttcctcagcatccactttccacccagtggtgggtctgggaggccaagtttgtcctgccttggggggttggggggcactggaagtgtctggcttcaggcctttctctctgctcttaaccccagtgtctaggttaatcattctcctgccctttctttacctgtgccatggtgatccccgagcctcaggccacttggtccctggaaacagccctgagcacagccactcccaggagagaggtctggaactgggctgcggaaagggggcttactggtggtagtagctcttagccccttcctcttcctacctgtcttccagccattcccctgtgcatcagaggttagaggtttctatggtggagtggcctctgggaagggcagggatgcttctcttggtttctcctcagaactcagccaccccaccccgcctgccttccccaagctgatggtgtgtgtgcctggcgctgtgggtcggggcccagactgacatttatctggcccagctttcgggctgggggaagtggagggggcgggttgctcttaatgaggtttaaaaataactgatttaggggaggatctgcyggaaatgtgcagcttgataagctggggtaaaaaggagcagccatgttggagtcgggacgggagggactggcccaagacacagcctctgcggccgagaggtgttgagggtttgaggcaggctggtccccttgtatttcgcagagccccaaggtccattgagagggggtgacrggattgtttaacctgggtgtgtgggagagggggagctggagtgacttcatccctgaaggccaacctggcctggagccagatgtggttagaaggggtggctctctttcttccccttgaacgcagatgcctgtcctgggggtcccctttcgtgagcagcctgacagctagctctgttttggagaagagagaaaagccaaaccagggtggggatgggacagaaaatggggactgtggcccattcttggttcttggctccccttggcatccataccatgcccgggtcttgctcagcccctgagtgtcagacccaggtggtgagtgtggtgggaacacactgccacagtgaggtccgccaactcaggccattggtcgggaaaccacccagttcttgctaatcaagctcctccaacgaagttaaagaaaccctcctgtgtatttccccgtcttgccttctcttctccaggtttccccaaaaatatcacccagggctcctgtattagtttcctatttctgctgtaacaaattgctacaagcttagtgatttaaagcaacacaaatacagcatcttacagttctacagactcaacaggggtctcactggctaaaatacaggtgttggcagagctgtgttccttctgggggtttttgggtgaatctatttccttcccttttctggcttctggaggccacctgcattgcttggttcatggccctgtgtgactctgacttctacttccattttgttgttgttgttgttacttctcccactctgactcacctmtctcccactttcagttagtaaggcccttgtgattacactgggctcatttagatgatgcaggataatctccccatttcgagatcttaatcacatctacgaagtccctttttgtcatataagataacaatatccacaggttctgggaattaggacatggacaccttttgcgggggcatgattctgcctgtcatagctcctagaggggaaagtagaatttgtttttattgcctggtttttcataggaaattcgatttgtttgctgaaatccctcaaggacctattcaagcctacctcttccagaaagccttcccaggctgcttctgcccgtctgcttcttttaactcctacaacatgtgatctgaactgtgcactttagtattctttgtgtgcaatccttacctgttcatatgtactcactttgtctccctgatggcactgtgggcacttgaggaccaaggacttctactatctctttcacaatccctagcacagatagtaggtgctcaattaaaatccagtggtttgcaccaacctagatggttaaaaaaaaagcaaagaaaacccagaggttgagggagggtagatccaaccagtttcctaagctgttccacattcctcctcctctccccaaatcattctctttcccagggctataaagagcagggttgcatttggtarcagttctggtcctcatccttggggctcaccgtgggggaaatggtgtatatccctgcaggcagaattcctgaattccccactccccaggctgcaaggtgttgaccaaaagcccgggtgtgtcctctccctagctccccgcagccaccgccacccattggaatggccaacaggggacctgcatatggcctgagccgggaggtgcagcagaagattgagaaacaatatgatgcagatctggagcagatcctgatccagtggatcaccacccagtgccgaaaggatgtgggccggccccagcctggacgcgagaacttccagaactggctcaaggatggcacggtgagagccgggccccactggcttggaagtgcagggagagcaggactgggtccagtggactggggattgtttaacctgaagaggagaagactgaaggcacacatgtcccagcctcttcctcagcttgaaggcctttgtcaaggatgtgagagggcccatgctttcctcccttcccgtggagtggagggtaagggtgaatgtgcctcccaggcagtggaagactgaggtgacactgaggaagaatgtctctaaggaaagaactgtgggagggtatattagcaaggaaagactaaacactggcttttcactctgggctcggaggaaggaggctggcaagaaggactgtgaggcttactctagtgaaagagtccaagctgtcttcaggcaagacaggagcctctctggttcattgtctctggttctgagggtggtgyacgctgagctgcgataggtaggcatattctcacctttccacccctgctgtcctcatccaggtgctatgtgagctcattaaygcactgtaccccgaggggcaggccccagtaaagaagatccaggcctccaccatggccttcaagcagatggagcagatctctcagttcctgcaagcagctgagcgctatggcattaacaccactgacatcttccaaactgtggacctctgggaaggtgggacagggcgaggggctgggtcctgtcatccaggaggccagagattgggctgggccctcttgaccaggcagaaggggctgttttctggctccctgcagagaaagaggggtgtgtttgtgttccatggagcacttggtcatattggaggctggaatggagaagggtatggaaatgaacagtagaaataattaggaagccaggcctgctgacttagcgatagaggcggaaccctggtatctaggacactgcggaggctgacacattcccattctccttcccaggaaagaacatggcctgtgtgcagcggacgctgatgaatctgggtgggctggcagtagcccgagatgatgggctcttctctggggatcccaactggttccctaagtaagtattgctgggacagccgcagggtccagcaggtgcattgtttctgcccaatcctgtccctaggaaataacttatctcagtagcagctggccctttacaaagcactttcagaaaattcctcatctcacttaatcctcacaacaccctctgggatggsaaatgactgtccctttggacagatgaggaggtggcttcagagagcttatggctctcgagggcagagctggcaccagcccttgagccaacagcaaagcctgtgctctgtccaaggaagggatttactagggcagcctgtgatctcctctaaccaccactcccttgtcacccaggaaatccaaggagaatcctcggaacttctcggataaccagctgcaagagggcaagaacgtgatcgggttacagatgggcaccaaccgcggggcgtctcaggcaggcatgactggctacgggatgccacgccagatcctctgatcccaccccaggccttgcccctgccctcccacgaatggttaatatatatgtagatatatattttagcagtgacattcccagagagccccagagctctcaagctcctttctgtcagggtggggggttcagcctgtcctgtcacctctgaggtgcctgctggcatcctctcccccatgcttactaatacattcccttccccatagccatcaaaactggaccaactggcctcttcctttcccctgggaccaaaatttaggggcctcagtccctcaccgccatgccctggcctattctgtctctccttcttccccctggcctgttctgtctctgagctctgtgtcctccgttcattccatggctgggagtcactgatgctgcctctgccttctgatgctggactggccttgcttctacaagtatgcttctcccacagctgtggctgcaggaacttaatttatagggaggagcctgtggcagctgctgccccagccacagctgcactgactgtgctcaccacacatctggggcagccttccctggcaggggccctcgtggcttctcattttccattcccttcactgtggctaaggggtggggtgaggggatggagagggagggctgcctaccatggtytggggcttgaggaagatgagtttgttgatttaaataaagaatttgtcatttttgaatggactctggctgtgtctggggccactgtgccactrtggggaagggaggaatactgggcaaagtgcagtgagtgatacaggaaggagggcagagatgagaggttgcagtgctaacccctgtcttgagtttcctccccatcctcattctcacttgctttggggggtggtgtaggttggaattgagaggggacaggacctcacagctgaatgcagactatgtaggcagtgtccacagggaagtaaggccctttctagtcaatggaattggctaatcctgcctgctgcctttggctgggtctgcctctacagttggaacagcttctcagtcactgagagggtggggctggctgctggcacagccatcagtcctggcaagtgaagctgtctccaggtgagaggtccctcaggcgggcttggggtgaggtggtctgtgttggagtggtgagggtgggggttgcagtggtgaggaaacgtggagagctggggaatgagcaggagtgagttggtggtggtcgctggagggaagaagccgtgttgattgatcctaagcacctgtgaactaagtgcctgggagagactaaaacttcctttctagggtgtggccttgggccatgatcatcaattttgggtcaggttgtctctagcacctatccttgaccgaggcatgagtgttccacccacagtttctttttttttcttttcttttttttttgagacagagtcttgctttgtcacccaggctgtagtgcagtagcatgatcgctcttgttctccaggctggagtgcagtggcatgatctcggctcactgcgacctccgcctcccaggttcaagcgattctcctgcctcagcctcctgagtagctgggattacaggcatgtgccaccacgcctggctaatttttttgtatttttagtagagacggggtttttccacgttggtcaggctggtcttgaactcccgacctcaggtgatctgccagcctcggcctcccaaagtgctgggattacagatgtgagccaccgtgcctggctattttttgtattttttatagagatggggtttcaccatgttggccagcctggtctcgaacccctgagctcaagcgatctgcctgacctcatggctctgccttttcttgccatctcccaactccccagcctcagcctcccaaagtgctgggagccccacccatagtttctaaccactaggtgttacctttaccccaaggcttcccagtcagactctgtgtctccccagggggaatttgagggacgctgggccagtctgacattaagttccagccccatcagcctcacccagaggcctggccttccttgcccctttccccttttctacctgagggtatctctgtctcctaggaggagaaagccacaacactgtgcctgagggaaacaggtttgtatccagagcttttgttctctccccttttgttcccctgcttctctgaggctcccycttccaaaaagcacccactaggggcgaggcccaatgccaattcttcatagccatggctgtcagcctcatccccacaccacgcttagccttgccacaccacacctcgggagagactgtatttgcttgcttgctgcactcccacaggctgtggcacagataagataggctgcagcctatgggcaaattcccaggggattagatcctttatctctcattcaggaaggctttgtggaatgctagtcagggagagtgatgtcattgcagagaaaacattgaattcgctatgtatactaaaacaacaagccgtttgccaccttccctggtttaactatttatagctataaattattggccacacgcctcacaactctgagaaatgccatttgttacagtgccagcgctgagaaccactgccttctcccagaagattctcacaaacgcccaggaggtggatattactgtaatgtgttccccattttgtctttagatgaggatactggtctcagaagggccaaggaatgtgcccagggccacaaagcaattaagggagaagcagggatttgcatccaatcaagctggctctgaacctggctgagcctgtgcagctctaggctcagcaagaagtgaagctgtcaagggactaggggacagaggtggtggtgggtggcagggcaatgctcctcatctgtaagctgaagatgataattccttcctcgtgaagttgccgtgaggattagatgaaccctggaaagcactttgcatggggaatgctagcacatagtgctcaggaaatggaagtgtggggaataaaaggtggaacatttgtgtatggaccctgggctgagagggagctgatgcccagcagtttcatgcccttcaccactgtcctgttgaacacgggccaagatgctttcagtggccytatcccctttacctggaacagcttattttcaagggagacaccagctgtatttgagaggggctcagccattgggctcaccttcttctggctgcacccaccaccacccaagccttgtgaggaatctcaatgttcccttaattcatctaactgcagactcagctgcttccttctggagccggcctccagtggcatctcaacattttccagctttctgtttgtctgctttctagcattttgtctcacctgaggttacaatttcatccttaacttggcttctctcatctctgaccccacttcaggccctggggcccagactaggcaccagcctgtgtatggttctgccttttcttgccatctcccaacaccttattctgtgtggctgtctacagtggtgtctctctctctttttttcttacatttttctttattattattattattaattattatactttaagttctagggtacatgtgcataacgtgcaggtttgttacataggtatacatgggccatgttagtttgctgcacctatcagctcgtcatttacattaggcatttctcctaacgctatctctcccccagcctcccacctccacaacaggccccggtatgtgatgtttccctccctgtgtccatgtgttctcattgttcaactctttctttctttctttctttttttttttttttaactttaagctctgggatacaggtgctggacatgcaggtttgttgcataggtatacgtgtgccctggtggtttgctccacctatcaacccatcacctaggttttaagccccgcatacattaactgtttgtcctgatgctyaccctcccctcgccacaccccttccccgaccacagaccctggtatgtcttgttcccctctctgtctacgtgttctcattgttcaacgcgctacagaggtgtctcctaacactctgcacttgcagggcttctcctgccgcctggaacaatctccttccaggtgctgccctcacttgctcctttatctccttcaggtttttgtttagacgtcatcttccctgatcacctcatttaaaactgcacacttcaccctcagcctggaccccgtgctccattcctgctttcttttatcaccacctgacacccaatatattttacttatttattttctgtccccacccatagaatgtaaactacacaaaggcaggcttttgttggttttgctcatgtagagtagtggttggcatgttgtaggtgctggataaatatttgttgaatgaatgagtgagcatgacaccaccctcatgctsctcagccccctggcttggcaacacagtgcccagccagcccaagggcctagcaacccagcctttcatcatatctgagatacagcccagctcatgtctcygcttccaatgcttccagattattcatttccaaaaaataaaaacccaagaagctgcatttcctacagatagaggagaggaggttggagggtggattgcatgctctggacacatggaaggtgatttgaggatttgggggaaaaaaatgggaggagggcaggaggaagaggtaggagccagcttgggttcatttgctccttgccttcagcctggaagtggaaaatcactgtggaggtggagggaaagtaggcttggcccatgatggccaatggaaaggagagttggggaagggaggcagagaggaggaggaagagggggagaaggaagaaggtttcagatgctccacccagtttggytcacctgtgggtaacaagcgtagctctctgcagcctattcatatgcgtgtgagtgtgcatccaggtgtgtgagaattctcagggctagggctgggggccagggggtggggtgcggtgcaggtgggaggagataatctgtgactgtgtgtggaggctgcctatgagtatgtgtttaccaaggattggggataatgggtgcagagaggtgtttgtcctgcgtgtgtaggcatctgtgtgtttgtacatggttccgtggagaataatatgtcccattcctgcctccacagctgaaggaggcctttgagagcttggcagaaggcccaaggagcagtggaatggggaaagtgctggatgataggaccccagggagggaacaataaagggcctgggattaaatttgttgaagaaaaggctaaaagggtgaattaataactgtcttcttgcaaagaaatggattttagtccctgtggccagggaggtagattagaagaaaatgcaccaaagttgcatctagagaaatttagattagacaaggaaaaatgatcctcttgactctgaaggttattagcctttggaatctcttaagggtcaggaggaatgtcttcaataataggacaaaatgcatcttcttgcagaggaaaatgggcagttctgcctgggaatcgtcatatacacactcatttttttcattcatatattcattcatttaacaattattgagatcctactttatgtcagggtttatggaggatgtggattattaatacatgatctctttgctcaaagagtgcatagttctgtaggggagatacaacacagatagaagccatactatttatttattttttgagacagagtctctctctgttggccaggctggagtacagtggtgcgatctcggctcactgcaacctttgtctcccgggctctagcaattcttctgcttcagcctccccagtggctgggattacaggcgtgtgccaccacgcccggctaatttttgtatttttagtagagacgggatttcactgtgttggccaggctggtctcaaactcctgacctcaggtgatccacccaactcggcctctcaaagtgctgggattacaggtgtgagccaccacgcaggccagaagccacaakaatttaggaaacctgtgacatttgcctttggagaaatgcaaatagggctttttgggaagactactgcctccctctcaatgctctggatgaattcctggatggtgactggtggtgatgtcatggggagctgaggccgcgtacctcagggatcatctcccctgatcagcccaggggagtaggagagccagctggggggactgctctggaaaaaggagcagtccctggctttgtggtcagaagtcaagtttcagtgtggagcgaggggctatttctttcctgcctggggtggggaagggcaaaaaggcctgagtcagggtgagaaccagggatcaggtaaggacagatcaacatcaatggagctgggggtaggtctgaaggggttatataaacacttcctcagacactgggactgtcagctgtttcacatcattgctggcaggacctgaatttttttttttctttttcttgagatggagtcttgctctgttgcccaggctggagttcagtggtatgatctcggctcactgcaacctcygcctcccaggttcaagcaattctccctgcctcagcctcttgagtagctgggagtacagatgcctgccaccacacctggctaatttttgtatttttagcagagatggggtttcaccatgttggccaggctggtctcgaactcctgacctcaggtgatccacccacctcagcctccc

SEQ ID NO: 10036 - DNA, 30564 bp, Homo sapiens
atccttcctcagctctcttctttccaggggaaggaggtgctcaggggtgggtatccagagagccatacttctgagggaagactggctggcaataaagtcaaattaagtgaccacaactctgcaggagctgtgttgggtccttccgtcctcactgggtggctctggcaaaacccactctgctgtctttgccccaactcccagtgccttcccccaagtccacgtgctttttcaggccctcctttggggagaagagtgggtctaaagggccccctcacagggaagttttggtatgctgtcactcaccacctatcccgttttccaccaacatgcttgctatttgttcatcagataagaaatgtgagagatttctttgaacctaactgaacctgtgacttgagaatttcaggcattttgaatcctgcataaaagtggccttattcctgttaagattcttctgctcccttaccccactctcatcctggcagatacatttgcttaacaactccatccatcccagactagtctagaagctctcctaaatagggaggtaggaaggacctcattcagacctwccctgggtctgagttgagctcgcaacctctccgtcatctccctgatgccagttgctctgggcctctggcgtctaccccatagggatgctggattattagccgagatygtggagccttgacttctgcttgtgattagtattactgtcctgcctgtgtccctgcctatagatttccatgtcttaggccttctctttggagtcttgtcctgggttaatgcccacccccaactccctggcaaaggcccttaagtttatgttcttgctctttccctagaccaatgatcagcctcccaggcctaatgtgtccctgcccaagtctctagtattccctccaaatcagatcttgtggatgttacttatgcagttgccatggggcagggggttagggggaagcgaggactggggagagaattagaaaacacccaattgacaggacaggtgtacgcagtgggtgaattgcaggaagtggtgaaggctgtgatgtatggctgggagcctaggtgacattttggagctctgggctttgatctgctactcgcctctggcctgtgaccctgtgttcagcaaacttccattgagccacagcctctttstccaagaagtgcacactggaagagagaagcaggcagagaggcagcttggagctcctacagagacacagttaggcaagcgacttggtgccacagagacagggtgggttgggggccctggggagtttcagaagaggtgtctgaagggtggggagagggccgcatggcaggaggcatgcctaacattgctgtgggtctcttcttcctctttgtttttgagggggaggatgctgatctccaaagtatcttcyaaaaaaggaacaagaagtatgtgcaggggtcagtggaatgcattcaactgggcaaccaatgagaccaaggataccttccttttaggaaagtagaacacatgggctggcacaggaccacccaggaggagagtcttgagagcggcgtggggcagggctggaagccaagagtaggggtctccctaggtatttgtgcaggagatggagccccttggggcttgggaaggaggtagtaaggttgggaaaccagccccaagagctcctagtgctggtaaactggtcccctctactttctgagggcctgaacccttgtccctctggaaggcagtcccttcttgaggctggttctctgggcttcccttaggccctgagcagtcttgcttccaaaaaaggccagcagcccccaatccctttgattccttttatatctttcctaggaggcaccactgcagggatggggactgactggaaaggccaccttgagtccatcttgcacataaagaggcagctcatttctcatgttattgcaggattgaattcatagaaagtaaacaaaaggatgaataaataaaggaatgaatgtatgataggcccagggatttccctggaagttggcaaagttccttcttcttacagccgatctctgagcagagaagggttgaggcctcaaaagaggccgagcttctggaagaggaaggatgagatcttaaagaaagttgaatataaactcagagaggcacaagccgctacctctgcaatatgccaggaacttggcaagcactggggaggcagaagagacacctctgccttcaaggaatgttttgtggagtgtgtaaagatacaataacaaggtaggaaaagggctggggtgaaggtgagggcgtggtgggaaaagtcacggaatgtgtcctgaagggaacagatcaacagaaatttgacctgtggccagcagtgagtctggaaaggagaaaagggcattctatcgagacagaagctaagtgctaagacactggtatgtgaaagagcacagtagttctaaggcctgcaaagtcatgcacactgcgataaagggataagtgagaaaccaggctggaaaagtaagcagggcctttctgaagcaggaattcaaagacaaacaggacaatatccacacccttgtggggctaagtgtttcattgggatagaagataggcacacaaaaagttaaatgacaatatatgagaaaccgcacttctttacggatctggtaataagactgctgcttacaggcatgtggtcaacagagtccctggatgacaatcttttcttttcttttttaactcagatataacttaatatatgcctgattaacaacatccctattatcgattattaaagccaccctttctattctagaatatgggatagttatgtggtgcttaattggtacaagcaatgttaacacatcaaatgtggtcactactaaaagcccatgtgttccacctttcagggttcatttgatatcaagtaattctctgcttatctatagacaatgagaaactttgctgattaggaacacctgtgcttaacgrtgccaagcagacatctctgaggtcacaccatcttctttgtgcagggctatggagcagctcaggtcctttcttcccaaggcctgctgaaatattaggtatacaccaggaagacagaaccaataagatagatagatacagatatagaaatatgagatgggatttattaggggaattggcttacatgatggtggaggccaagtcctacaacatgcacaaagaaggccctgggatggcaaaagtgtggctcagtccaactccaaaagcctcacaaccagggaggccaatggtataactcacagtcccaagtctggagagcctggagttttgatgttcaaaggcaagaggaggagaataccccagctctgagagacagagagagagacagagagagaaaagaagaagaaggagaaggaggaggaggaggaggaggaggaggaaaagcagcagmrgaggaggaggagragraggaggaggaggaggaaagaggaaagaagaaagcaggagaaggagaagaaggaggaagaagaggaggaggaggaggagggggagagagagaatattttctgatatccttgtcagcaatttgaaaatatgggggctgcctgatacttaggttaggtggaatcctcgttggttgaataagctttcccagagagtaatgactatgaatcaaggacaacctagaggaaagtcttttgttttgaacctcagggactattttttaaatcagctttcactcctggcacagtgagggaacaagttatagggctaggttccttttcttaacaaaaaatctccaatatacatataaatcagacaaaaaatggcaayaacaataaaastcacaaaataagtttccagaaaaaaaaggccatatcataaacttttaaaaattgaaaaccattttaaatgtcatttaacagaaagttattttaatgtctaaatgagattagtttatcctcaagaaaccactggagacagcagtttagatcaaaggtgtggccaattctaacagcggggagggagatccttcccaatgattggtaaagatccaaagactaaaaaacacttggctcggccgggggcagtggctcacacctgtaatcccagcattttgggaggccgaggtgggtggatcatgaggtcaggagttcaagaccagcctggtcaagatggtgaaaccccatctctactaaaaatacaaaaattagccaggcatggtggtggccgcctgtaatcacagctgcttgggaggctgaagcaggagaatcgcttgaacccgggaggtggaggttgcagtgagccgagattgcaccactgcactccagcctgggcgatagagtgagactctgtcaaaacaaaaaaacaaacaaacaaaaaacccgcttcactcttttaccatttcttctagccttgcttccatgctgcattcattaacatgtttccattatagtcttatcaatagatcagggtattaygttgaaatgcattgttgaaaagctgctactttgggactatttgcaggagggatggtgggagagactggcccactgctcctgcctcttcccttccatctcagtcacccaaaagcactaaaacctttacacctggaagaactgtccagcaggcagagcttactaaggatggaatgggtacaacagtagtgctgagcttcctggcccaggatgtaatgagataggggcttggatgactacatggagaaatgatgtgccagggattctggggccaagtagtgcttaggcccatccyggaggttctctcatgatgctgcagcagtgattctgtgagtctgatgcctggtgcactcagtttgagtcttagtacttcggattgggatgagatcagcacgttgctttcatggaaggcttccaagggagccaactgaatgggaaggacctggacaggcaatgttgcttaagccgacccagcatccctacagcatcaccaggctgaggaggtggaatctctgaggggcaagatatgcaagatatctttgtgtctgagggcgaagcctccaagggagtaggtttgatgaagtttgggttgggtctcaatccagctctgccataacctagttgggaaagcttgggccaagttacttcatctccctgagcctcagttttctcattagtcaaagggagctctacttacttcgcagggtttctgtgaaggttacacaagagttataaagcatctagtccagggtctggcaccctgcatgggtccagtaagtgatcttgtatttcattcctccctttcaatctcccgtgtcaggatatctgtcgtttctcccctctgggcctgtttctctgggtcgttggtgccagagctgccttgggagctgacttggcaaccccacgctcagagcacagccttcctcagctgcacacggtgggaggcgcctgggcaagatttgggagctcgccartgcagacaggtatttccagtcctgctagagaagcaatgggtggaggtagaaatggggatgggggaggagatcggatgagcccsggacctgggtggatcccctgggaggagggcggsgagtcatgctccccgcctggttctcctacccccaggctcagatttcaaccctcgctgccgcctctgtggcgcgcccgttcggggagcggagagggtcgcccgtaggttccgaaagaaggacggcgtaccagtagcctggcaaggggccagctcccgcagccctggagcgcgagccggaccctgctgcccctcttgctggcggcgggaagcggcccaccggcctttccacgcttggctgtgcagaggtccacgagggggcgacctgagcccacgtgcagccgagctcttccctcctgaaactacaactcccaggccgctcaggggtcccgcccgcctcgccgtgcctctggcggctccaattggccgccgcgggagggggattggcggtctccagggcgacgggaggcgctcggggcatccgaggckgggaggcgggtccgccccctattgtgtagcggcgagagtggagccgagcggtgcggagcaggtgagggagggggcgtactggaggtatagaagtggtggtgctggtagtgcggagttatgggggacaggagaaagcggggagttctagagagaagtggaattcgttgcaggagtagaactaggggagttctggggagtgaagtggaattcttggcgggtgggtgggagttcccggagaactgcaggagttctggaggcaatgtgggggagttcttggtgggttctaagagaaaggaggagttccaggggaccagagaatgcgagggagaaaggaattgttgggggtggggtatcagaattgtattgtgggctgatgcaggagaatcccagggaggggaattatcgggaggagaggatggggagaagtggctggggggtggggagaccagaagggagttctttatagtgcaggagacctgctgcaattggagatcaggtgygagaagctggaattgtggggggattgtgcgtagtagcgataactgggaagggagtaatgggaggacgagggagtggtgtgtggggagactagaagggtgaggaaatagtggaggccgggggagttggaaagatattaagagactgggaggaattctagggatgcctagttactcagagtctcggaaaacaaccaggagagaactagggggttcctatatacttggaaaaaggtttttcagggaagtgtgggagagctgcctggaggcagtgggaaacagggggcttggttgctagtgaattgccagaagttagacatacaggatcattaagtagaggcaaggatcagactctgtggaggatgttttatagtctgtcctgaactttgcggccaagagtgggttggaggactcagagcagagtccacttggcagtgccaggccctggcatggaccctctggctctctgagactgccctaggatctgtggggctgtcagaagctcctaccctccatgccccagggttaattttgtacacttcagggactcacaggcttttttttggaccatgcctctggggttggggaagaaagagcttgacaaaccctggcaccccgaagatattggaggggagtgagtgggagggatttgggtgaggtccttgggtggtggtgcctggcagggggagggctgcttggcagtatcgtgaggaagtggcgccagctgccagccccgggacctgtccagacctggaggatgctgcctggatcccccatactggcaggtgggggaggcagctcctcctctyccaagtgcctgactcactcactgccaaagcagtgtagggagactgaatggagaaaggcctcgggtcctcagcttccagagtttttcatagaggctggggaaatgggacaagggattgtatcggggtgtcctggggaccactttctgaggcttaagcgccctggatttgcccttgactggctctctgcccctgagcagatatcctcagggcccttatttgtcacagaggggtgaaggcgacagcactggttccatcttgctgctataccttgtgagcatcaagagtaaggaaagaagcgagagcagsctaggccatgagagtcttgatctaccatacttccttcaaaaatatttttccaagcatatgaggaaccccagttctcttctggcttagtttttcaagaccctcagaatgcaggcatccccagaatccttccacatttcctaagaccttcccaactctmccagcctcccccatttcctcacctttctagtatctgcattcagcactcaccattctcccagtactcctacccctgctcttactccccagggcttcaagatcccccccttccccctacccctcacttaactacactcctccctcctttctcttcccagtgcctttctctaatggwggggtttcttctgggctccagtattggccaactctgcatgttgccttgtacttttcatttagatctggtggttctccggagagcagcttcctygggtgttacatgagccaagccctcactgtacagaagagtgagagctgaaacctgttccctgagctgatcagaaggacatcccttggcccctccatctgggctccygtggataggaggggctgggtgagcaggccagctgggctatggtgtggtgcctcggcctggccgtcctcagcctggtcatcagccagggggctgacggtaagctgagctcttgggctcaagaatgccctgttagccttggggtgggtatgggggtgttcctcaagggttcctctttgagcatgtgagggcaggggaggaatagggctggttctggagaagctgaactgggrgtttctccagtcacccaaagtcctaaggtgcctacagagatactgatggcactccccctcccagcactgaccctagccccccgttgtgccctcatgccacccatcatgcaggtcgagggaagcctgaggtggtatcggtggtgggccgggctgrggagagtgtggtgctgggctgtgacctgctgcccccggccggccggccccccctgcatgtcatcgagtggctgcgctttggattcctgcttcccatcttcatccagttcggcctctactctccccgaattgaccctgattacgtgggtaagagttctcctcaggtgggaggtagggaggtatcagcaagaaaggtgggctgggtagagtcgcacaaggcctcctatgaacggcwttgtccctgctctgatctcatctccagctctgctgccttaactctgcttaataagcatggctgtgctcccaagcagtgttaattcattgaaagattcattcatttacacacacacacacacacacacacactcacactcttatagctgtgctatttaggactccacgtggtctgttccaaaggagatcctgcagccctattccaaatatccattctaattctgtaactgctttttctacatctcatcatgaaacctcccagacttcatcctgatctgtagtctcccctcttggccctgccttggtcctggctctactayctgctcactcctctgcsctctcccccttcctcatcgtcttaaatgctagttcaggggttcaagtcttctagggagtgggctgatggggcagcagggtaggtgcggctgtgacctctctgcttttccagggacactcagyctgcttctgagtagagaagcacaggtgtacagagagggtggctggggagggcccaggatccccaaaggtcagtgactggatggggctggcctgggttgctgctttaggtggcacctrttgggacttaaaatcgtgtgtagcctccctgggcgccttctgctgcaccccagctggctccctagaatggctacaatggctctgcttcctcctaatcccggatggagccttaatctaagcggtttagtgccaggtctcagagggcagtctgcaggaggccctaaggacaggtctgggctatggggcgagagagagtcttgttgcctcctcttcagaggggagacccaggaaaggccacctgggaggatgttgatggggagacccccaccttttccctctttagtttgaatcctgagggaaaccccgggattggctgagccttgccacagggcgggctgagcasagaggggaggaggtgcaggcaggtgatgcagaagggaagtttcttttcaaactgggggcagttattggcaaacagcctggkgggagtgtatgtgtctacacaagccctgtgggaatggatgaaagcgggccccaattagcaccagtggagaaaaaaacggctgtgcccaccagccctccctccctgcctccgcctgcccaggcctgggaggggtctcgggctgccgggctgaggctggacagattcataatgttgcctgactgagggcaaggcaaggggaggtggaagagggaggggcttttcctgggactccaccagggagacttgaagctcttccttctctccagcttgtgtcctgccttgaggtccctcaggcctgaagccactggatggttagcaactttgtctacctgtgggtcttctgtctgtgctgttgcttgagctacaggggctgtgagcagtagcctctgggacttactgtctgctcctatcctttgttcacacccctacctccgtctggagctcttggtcaggccagagccggctgagggagttgggacctgagggaggcccctgagcccattaacccttttactgcctcacagtgtggaaggggcctctcagcctttgtgtaggggactcggaactgcagttgctaagcaacaggaggtagaggttgctaaggacaatgctcttctgtcataagccctctgggcagtgaaggggagatgggtcggggactgttgtggggctggtggcctagaatgtgtgcggaaccctgagagagactgttggattagggaccacacagaagggaaggcttcccatctttgaggactctagaagcatctagtagaggagactggatttatcaacgatgccatggagtgaaagcaatataaaacaagctaggactaaagaggaggattcagttagctgctgtgtgtaaagcgccccagcctgtgcctgcacagtgcctgtgtggtgtgaacccatgaccaggcctctggagggaaggaaggttaggcttagtggacaccagctttcctaaggtgggtcttagaccaactcattaaaatggcaggatgggcttttgtgctgtatttcttgggattttcaagatgccccacacagcagaagggatgtgcatttttttctctgccctgagttgtttgataaaaatcagtgacctcgttctccacttagaactcccctgcttgctctagtcacctcccctcaccaccttttattcttaatcctctgcccagtcacagcttcccagaagccttccttactcctcttgcttcatagtgcaatgtctgggcgcagttagcaccattttttgaacttctttgtggatgtgtggacgtgaacttgcccatttaggtgactgtgggttccctgccttcygagagcttaagagagcagagactgtgtctcctgttttcttcacacgccgctgcatatgggaagatctgaagtcaacaggctttagccctgcaggtggagggaggcctccaggaggtgggcccaggactcaggaggactcagggctgccctgctggcgatcttcctgttctgtaacactacaggtctagcagtccagctgtcacagaaaagctaggacatgcagtatgcttctttggatattctgagtaacatttggactgttacccattggctaccagcatctcccaagtgagaatacatagattacccccagtgccctgaacagcactcggtcctaacacccgtgtccatggaaagcacgccgcgtctggagaaagaagcctggctttgtcacttactagccatgtgattttggaaagaaacttaacattaattccttcagctacaatggaattcttgggaggattaaatatggtgacaacgcctaatattagatggcctgtattccacactcaatcttccttccctcttcttccttctttgtagagctataatgaaaagtatcatgtgggacacagaagaggttgcagtctggggtctgcagggcttagcggccaggcagattagctttcttgaggaatcctgacagtgggtggaagggtatgatgatgttaaatatttacccgctgggcctagtcttatctccggggtggggatttcaacacctagccctttaagcaggtccacccatcctagagaatccacaccctggaactcattctaagtagaaaaagactcttggctaagatcacaaagcctgcctcaacttgatccttctcttctttctgaaatagattttcttatttctgaaacagatcactctagaggtagaatggaagcaaactggaggggctgagcactttcacagcttcagaatttctagcattaggaagagctggagtggacactatgcaaagggacttggagctgcatttgcaaacaacataagattaagaaaatgcagccaggcacagtgactcacagcttaatcccagcgctttgggaggctgaggcaggaggatcccttgaggccaygagtttgaaaccagcctgggcaacatagcaagacccctctcttcaaaaattaaacaattagccaggcatggtgacacgtgcttgtactactagctacttgagaggctgaggcaagaggatcgattgaggccaggagttcgaggctgcagtgagctacaatcaaaccactgtactccacctgggcaacagagtgagaccctgtctctaaaaaaaaagaaagctccatttgttcatagcagaggtcaaggtggggatgagcaatgtgatgtagaggggaggaggctggaggcagggagactggcaagtaggctgttggagaaacccaggtgagacatrccacaggtgtaaaggtgaggacagcagagaaggggaaatgtttaggaggtaggatttgaaaaacctaatgagcaagtagatatgggaggtaatcgaggaatctaggagatgccaggttcctgataaggtgacttggtgtgtggtggtgcaggaagagaaaaggaaggtgacgtgtgatcagtttagggacagggtcaggacttgagtgcagctttctgatttcaaatctagagctcatttatttgttcaacaacttttatttgagcatccactgatgccaggcaccatgctacatgccttccctacattatttctctcctccaccccaccccaattttgtttctttctcttctttttacagatgaggaaactgaaattgagagaggttaagtaacttgcccaaaagagtacacagtcgagctggactcatgcctaggtctatctggctcccaagtgtgtgcttgtatcacgaggctacactgccagggacccatgaagctgtctggggtgcayagttgcatccagggagggtgctgagggcttgggtaggcaccctcggtctgagcctggcagtgtggtgtggatgctgactaagagtgggattgaggtgtctggttgtgctgtggttgtgtggctttgtggaagtgtatgtgatcagccagctgggactggagtgccccggggcatggagaggatagggcgaggaggctgctgactttgctgcttgctgggctggactctggccaccctaaggcgcttaggctgctgataatagccctgagggattaggggctttggcaggcggggtctgggttccccctgctagggcctcaaacactgctgaggttttcagggaaacartcctctatcaggagtactcccaggagctcacaccttcccctacataaagagcccagaggtggacagatcctgtaagagtccagaggagactacatgctggctcttcacttccttccccaacagtcctagacaccgagtgcagttcaggggaaggttttgtccacctgctgtccccctaggtttctctttgtctagacagggtcccagctgtcgaatggcaagagtggtcagaggggccgaatggagggacctgtcctgaatgaccccaacctcatctgcgtctctctggaccccacactcagagtaactgggagagactgagcctgttcttacctctaagaattaccagtgtgaccaggggactggggcttccatggggttccttcagcacccttgattcagggctcctcccccaggacgagtccggctgcagaagggggcctctctccagattgagggtctccgggtggaagaccagggctggtacgagtgccgcgtgttcttcctggaccagcacatccctgaagacgattttgctaacggctcctgggtgcatctgacagtcaattgtatgaagctggggggcaggtggtggagaaggacrgggaggaggaggatggggatctctggctggtgggagaaaggggaagagggagttctatttccatcccacaaacrgctcygatgccccacccttcctgagagcccttgtttgctcacttagtagttgcatctcacccctcccccacactcctgcccttttcagttcttcaaatataaattcaatcagccttctaggctcggtgtcaggaactccctctttctcttccctcctgcttccctggccagggaagtgggtgggagagaggggctcttgggccctgagtgaaacacagctcacatatatatagcaccttgtgttttcaaaataccttttcacccaagcccttattatttatctctcactcctaagtaggaaggaggtcataatcattcccattgcataggtgaggctgagtcatgccactgattagtggcagagcagagtctaggacccaggcctcctcactcccagaacagtgctcctcctgagggggcttggctctcccccaggctctggacatccaacctgggttcagccccaggccagtgtgtgggggtgggttgacagaatcctcatttggcctgggtgcagyagacagggtggccctgggctgaggactcctatgaggcagggctggtgggtgggcagcaggctggagccctgagtggtctccctggcccttggacactgctttttgggctgacagccccactggggcccctgatgcctgtctcccttgcagcaccccctcaattccaggagacacctcctgctgtgttggaagtgcaggaactggagcctgtgaccctgcgttgtgtggcccgtggcagccccctgcctcatgtgacgtggaagctccgaggaaaggaccttggccagggccagggccaggtgcaagtgagtcctgggggtggacagagtgagccatatagagtgtgaagggaaggtgggggcctggcagtggggccagaggacagaggaggcaaaggccaggctggaggatgggccagaagaagggcttggcattgtttgccccgagcctggggtgctgcctccctctgctggccaaactcggaagtgcaggatctgaggctggcaggggaaaggactcttcctcacccactccttccctaggtgcagaacgggacgctgcggatccgccgggtagagcgaggcagctctggggtctacacctgccaagcctccagcactgagggcagcgccacccacgccacccagctgctagtgctaggtgctctctggcgggagggctgsggtccagggytacctatgcaagggggctgtgacctgtggctgaattggttcacagcaagataggagggagatttgtgcctgagggcagggcccgtggaagctaagggggttcccaatgcaggctrttgctctgaaaccagcaccttaattttaaaaggctcagtaagcagacaaagcgatcttagtgcccagtagtgtgttatagtggaaaggacatgggtgcttgtgttaggctgtgagccagttaactccttgagtcccagtttcttcatctttataaagagactcatctctacctctcaggtgtgttacaagaatttacttaggtgcagctgagcccagtcactggcacatggtaattcctggccaagatccttcctttagaagggaaactgagaagcagaaggcctggactgtgccttcatagagcctattatctttgtggggaagtgagactaattggggaaacagggaagtgttgctgtccgtggtactgtaagaaaggcagtgccgggtaatggttaaaggtgtcgtctgtggcatcaggaagcctaatatgaatgttgcctctcctgctgtccttgggcaatcacctcacaatctctctgcctctgagccttcacttcttcatctagaaaatggagacaattcccaccacaaagcttttggtgaggattaaacgaggtcgtgcaggtaaagtgcttagcactcagtgtcccgcatgcagtcagtgctctgttgtgtcagctcgcatcatgacctcttcttactgactgctcatgcggtaccggcccagagaggggaaggagtagtggaactgtagtagccagaggtgcttttgcaggaggtatgtggcgcggccaggcccttgggaggggcattccagaccgggggtgcrgggagcaaaggcatggagatgggggacagccagctgcccatactgacctgaaagagttcatgagggctgacatatggaaagatggctggccacgtagggagggtttggatcgcaggggtccacagggctgggtttgagcttagtgtagtaggagccaggtgctgttgcaggttcctgagcagaagtgttctgtggctcaaggggctgtttctgtatgaatggccattagagtggcagctgcaggggagcctggagtcaggggctgctgcagcatcttgaggtgaggtattgggcacctgggttagggccagagacagagaagtaattcaagaggtgacaagcagggatacaaatggtaaatgagcagagttaaactgackcccccaaacacacacaccattcctaggcagtggaactgcatgaatggagttgctcttgatggaacagagagaatttggaaagaagaatgggtctcagggagaggatgaattcttgttacatacagggggaagcttctgcttccactccccaaagccctgtaacaacgagccctaagattccagagagcagagctgggaagagttgtagaggtgacctcagggttctgggaagactgtgggctgaggccaccttcctccccttgtgcatcccacaggacccccagtcatcgtggtgccccccaagaacagcacagtcaatgcctcccaggatgyttcattggcctgccaygctgaggcataccctgctaacctcacctacagctggttccaggacaacatcaatgtcttccacattaggtggggtcaccctcattaggaaggtggaggtggggaattcacaaacagtctctgaagagccgcttggctgggcaaggcctggacccctcctcacacatgccacattgcagccgcctgcagccccgggtgcggatcctggtggacgggagcctgcggctgctggccacccagcctgatgatgccggctgctacacctgtgtrcccagcaatggcctcctgcatccaccctcagcctctgcctacctcactgtgctctgtaagcctgaccycagcttctccctcagcctgctcccttcccctgggccaggccaagcccctctcccccaacttgccactactttcccccagacccagcccaggtgacagctatgcctcctgagacacccctgcccataggcatgccgggggtgatccgctgcccggttcgtgccaaccccccactgctctttgtcagctggaccaaggatggaaaggccctgcagctggacaaggtacaggcttggggcaggggaaggagggtcttagcttggcgttattctgctcaggacagcagggtggagttagctcggtttaattcagttcagtgactggggacacacatcttttgtgaatttaatttgtgttataagacatgttgcataggaaactacttaaaacccctgaggaaaaatttccatggtttaaagtggtggttttgtgtcttctttggggaaagaagagagatgatctctggggaaaatgatggcaaagagtcaagaaggagaactgaagtttctttcgtgtgatgactgggaaattgtgtgtcccgggggaacacacacttcttaccaggtgctrtgtggggtagtgggttgagggcaggggcaaggaggcatccatccttaaagtgggcaccatctgggcagaggacagcaacactgtctggaaggccagggatggagctcgtgccttcctcttagggtggttgaggatagaccagcaacagattctgggactttggtgatgggcctcaaagaggacacagtcattcccttgcagaaaccagggtcaagaggcaggaagtagtatagtacgtttatggaatcatggatcgtccaattgggtgggagccrgagtgcctgcagggacatgaatggtgcagagaaagctggaaagacaggttagcatcaaaaggaagaactggatgccaagttactattgcctcattccaaggcaattgggatcttttgtctgcagagactataaatttttgaggcctagtattgcatcttttcatcatagtgtacctggggcttctacaacaatagtactcagtatatctttgttgaatatttaagaaaaaagtctacaggcagttggagccactggaatttgttgagcattggtgtgataggatcagagctgtgatcaggggttgagcttgcccagtggaatgtagcgggagatactggacataggaagaggggttctgaagctgctgaaatggcccaggtgagagttatggagtctgatttacagaggacatgaagatgaatgggctcatgctctgacaaaagggacttcccaggatgactggcttagtgagtatttcaccagggggagtgagggaacgtgaggaggcagacttcagcaagaaggatggcgggccctttaatagagaaataggagctggttttgggtggaasactctgaacttagttgtggagtgctgggaagagagccaggtgaagtcccagcaggcaggaagccccacgcggcccaactacaggggtggccattcacagtgtattttctgtgagtggcaccccctggagttgtgcagtcacagcctcacactattgggaggggtccctctgcaggaaggaaaggaagcactggaaatcagagaggggtcaggcctagacatggagctgctggagtcttctgcacagctgtgggtttctcrtcctgccccctctcttgtactgccatcccgggcttgtctctgctgagctcctctctctagctgtcatcttctcttccttccagttccctggctggtcccagggcacagaaggctcactgatcatcgccctggggaacgaggatgccctgggagaatactcctgcaccccctacaacagtcttggtaccgccgggccctctcctgtgacccgcgtgctgctcaaggttaggccgggggtgggcgggggcctgtggtgacagtgggtcagatggctggagatggtgctaaggccaggctgatgggggtggggtggggcagacacatggggaggggtttccaagtttgtttcccatggtggccacggcagcagctgcctgatgccatcccagaggtttctgcagaggtggtgctcgggaggtgggacatcagtcacacacatccagaagtaagatatcctgtttgccccaactctcactaaccttgaccgtgctgcctccctctctggggctctgggaggaagaatgttctgcagaggtttgtacatctctgagagycctgcctaagcctgccagcccttactacaccaccattttcctccagcccctacccactggggaacagaaacagagccagagaggaattgagagatggagagagaatgaggtagagacaggcttggtgagtgtttagctagggggagtgagggagagtgaggtgagacatggcatgacagggagcacagagagagggagtagccagccttagatgtaagagagggcccctcccaatgccagatctggcttgcaggctcccccagcttttatagagcggcccaaggaagaatatttccaagaagtagggcgggagctgctcatcccctgctccgcccaaggggaccctcctcctgttgtctcttggaccaaggtaaggctcctgagcccgctctgcctgtacccacgcccactacacccctgcctctcgtgccccagccattttgtgggagggagggtgtgggaaggagaaggctgtcagaggcagggtggggaggaactggagctgcctggagagatgaggggcgcctttggtgaggggtggctgcgtgtgtcctcagggctcaccagtggttctgtaggtgggccgggggctgcaaggccaggcccaggtggacagcaacagcagcctcatcctgcgaccattgaccaaggaggcccacgggcactgggaatgcagtgccagcaatgctgtggcccgagtggccacctccacgaacgtctacgtgctgggttagtggctggagagagggccaggggctgggagaaactacttgggaatcgtttttggaggcccagaaagaggatcatgggtgtgggacccctgggatgatgatgggtgaaggtcagtggccctggggcccctgctactctgtacactccctcaggccctgaccaccatccctccattcccccctgcctaggcactagccctcatgttgtcaccaatgtgtccgtggtggctttgcccaagggtgccaatgtctcctgggagcctggctttgatggtggttatctgcagagattcagtgtctggtacaccccactgtgagtgacctgctcctgccatttctctgtgccaatcttgcctcctttcctctcctccttgaacctatctggccttctgccctttcttctgtccctctatccctcaccagtcctggctctgcttccctgtttccagattctgaggcattcagggccaaggtcctgagaccttggatggttgagcagaggggaggtggttagatctctggaccccagatcttctggtcttcctagctcacgaggtgccccccatgtcctcatgtctcccagggccaagcgtcctgaccgaatgcaccatgactgggtgtccttggcagtgcctgtgggggctgctcacctcctagtgccagggctgcagccccacacccagtaccagttcagcgtgctagctcagaacaagctggggagtggtcccttcagcgaaatcgtcttgtctgctccggaaggtgagaagcttctcgtcccagaacagcagagacaaggatggggaagggctgctgggagagctgggatatgggaggccctgggtgggaaggggcagaggtgctggccagcttggggtccagaggggtgtgtggaagatgatttgagcttgtcttcaggggttctgggagaagagttgggcactgggagttgtggaaggccaggggaggggcgctgggaatccttgctctgacctgcctttctgtcccacgcagggcttcctaccacgccagctgcacccgggcttcccccaacagagataccgcctcccctgtcccctccgcggggtctggtggcagtgaggacaccccggggggtactcctgcattgggatcccccagagctggtccctaagagactggatggctacgtcttggaaggccggcaaggctcccagggctgggaggtgctggacccggctgtggcaggcacagaaacagagctgctggtgccaggcctcatcaaggtatgtgcgaaaggcgatacagagagaggcctcctaggggctctcctgcgtccttctccattccccaaactctatcttctcatcttgatttgagctcttcacctctgcgtcctacctcacccttccgtcccacgtgcacggtctttccgcgccccgctgggttgggcggtgctgggccctgacctccctcctggtaccccatccccatcgcaggatgttctctacgagttccgcctcgtggccttcgcgggcagcttcgtcagcgaccccagcaacacggccaacgtctccacttccggtgagcacctggcgtgagggaggagccccagggctgctccgagtccactgaccctccctcgtggacccctgcctaggtctggaggtctacccttcgcgcacgcagctgccgggcctcctgcctcagcccgtgctggccggcgtggtgggcggagtctgctttytgggagtggccgtccttgtgagcatcctggccggctgcctcctgaaccsgcgcagggctgcccgccgccgccgcaagcgcctccgccaaggtaagtccctccaccctcagccctgctactgcgcacttgggcctagcctccttaagcccctcctacctgggggaaaagccctcgctcctgtgtgatccaggtgcattctcttagtcctgcatctggtcctgcctacgcttttcccagccggatggggttgggcgcctggtgttgggtgagagagtctccgcctagagggccttgatttttgcctgtgtcacctactattctyatgcccttccagatccacctcttatcttctctccgaccgggaagtcagytgcmccgtaagtgcctccmcctccttggctttcttctgcctttccattgtacgkgccagtatcttctgcttccttttttgcatctttaccagggggatgttgggtgttgggraggaacaaaagtgggagagggtaagaaggggtgtgcagtggccccagcctgaggccgttccagtatggcctgtgccttccytccacccytccaccttgttggtcctttcctcgcttgttctycctagctctgctctgttgttcmccaaacctctcaaggcctgacgctggctcctgggagggggacctgcccctaccacagaccctgatctcctgtccttccccagctctgctctgggctcaggcagtcctgacagcgtggcgaagctgaagctccagggatccccagtccccagcctgcgccagagtctgctctggggggatcctgccggaactcccagcccccacccggatcctccatctagccggggacccttacctctggagcccatttgccggggcccagacgggcgctttgtkatggggcccactgtggcggccccccaggaaaggtcaggccgggagcaggcagaacctcggactccagcccagcgtctggcccggtcctttgactgtagcagcagcagccccagtggggcaccycagcccctctgcattgaagacatcagccctgtggcaccccctccagcagccccacycagtcccttgccaggtcctggacccctgctccagtacctgagcctgcccttcttccgagagatgaatgtggatggggactggcccccgcttgaggagcccagccctgytgcacccccagattacatggatacccggcgctgtcccacctcatctttccttcgttctccagaaacccctcctgtatcccccagggaatcacttcctggggctgtggtaggggctggggccactgcagagcccccttacacagccctggctgactggacactgagggagcggctgctgccaggccttctccctgctgcccctcgaggcagcctcaccagccagagcagygggcgaggcagcgcttcgttcctgcggcccccctccacagccccctctgcaggaggcagctacctcagccctgctccaggagacaccagcagctgggccagtggccctgagagatggccccgaagggagcatgtggtgacagtcagcaagaggtgagagcagtccctgcccatccctgcctccgcctcagtcccaccccagacctctcacccctctcccaataccctgcaccttctctgctccactcccaccctgggaacgggaaaacttgtcccttttagaagcttttgctgaggtccagggatttttcaggggaaacccatgacctaacgtgagtttgcggtcgctgaattcagacttttctgaacagcctctattcctccacccacaccatatgtttgtctttttttttttttacaggaggaacacatctgtggacgagaactatgagtgggactcagaattccctggggacatggaattgctggagactttgcacctgggcttggccagctcccggctcagacctgaagctgagmcagagctaggtgtgtgagccccccggaaaggcaggcatctcggccatactgtcccacatccccccgccaccttaggacccatctattcccagtcaggccctgcctcccaggctcctctgctctagactgtgccttgcccccttgggccatctgtactggaagggcctagcragcttcacatctgagctcttcactcagtgaacctcagggcttcttctcattgtcctgccyrcctcttgcaggtgtgaagactccagaggagggctgcctcctgaacactgcccatgttactggccctgaggcccgctgtgctgcccttcgggaggaattcctggccttccgccgccgccgagatgctactagggctcggctaccagcctatcgacagccagtcccccaccccgaacaggccactctgctgtgaacrtccctratgtgaggctgtgaaaaggcatatggacctgcaaaggaggcccccaaccagacagacctagtttcaaacgagggcactgcccctgcctgcccctttggtgcccaggcacagaccctgatagtgggtttgggtcaccttggtatggaatgtatgtgctgaccccctaggtgagtctggggattggaacagggatcttaggtctgcctctctctctctctctctctctctctctctctctstgtgtgtgtgtgtgtgtgtgaagttttttacaggtgaataaacaaagtttgaaagatgtttctgtgtgttatctgtctttgagagagtgccaggaaaatccctggacccttaaagaagaggagaatcttcttgaataaatggaggtgcattcagcattcattcaagaaacatttattgagtgcttacggaggccagctactaaaggccagccactgaagtagatactgagaaaatacaaagctctggaagcacgcctttgcccttgaggagttctttctagtcagtgaggcggacaaagaaatagttaccgtatgataagttccgtgataaagctatgtgttggttattgtagcacaaaggaagatgttgcattcaaggccacctttagtgaacgctaatatcgtrtgctgggacaaatgccacatattgggggggagtcctcaggaccctcacagatagatggtggtaataatagtattcactatgtgccaggcactgctctaagccctataggtggactgtttagttctctacaattctatgaattaggtagtactattagctctgttctatagaccagggaactcaagcayagaatgcacaacagtcacacagcaggtaaagggtagagcaggtggggagccagtcaaggaagggaaactgtcctaggcagaggaatagcctttgtaaaggcacagaagagtgagaatgcttgacaatcagtgggactggaatatagggctgtgtaggactcggggagggaacagagaataatagaaaggttggacaggactggatattgacatcctggaatctcaggttcaagggaggactctatcatgtgtgcagaactccaccccgggggactctattcaactgaagcctgaaaggatggggggctctttctycacccctgaactgtgctgtcctccaccctcagagacaaaagaaccccagccagcctcctcgcgctgaggtctccccctctgatccctccaggatttaggaagagataccaggtcatagaaaaggagatgaaaggcagggagaagacaggtctgagccctgggtcccaacaccgaaaacacccctagggccctgggcagagtgacctcactgttagtccctgcccaggcttgaagtaagaggtgagcaagatcacgtgggggtgctgtcccggcctgcaagtcccagtcctgtcacacactagtcagttggggtcgggggaaggccttcctgtgcctccttttaccttgccagcctctaaactaggaggcttcttcctacataaacacgcccacagtgtttagctaactttctaggcagaaagtttcctactggggcacaagtytacgggctctcggtggaggctgaggtactcacgggtggagaccactgcagccgcctttgtagattcagactccccgaacctttaacccttgctctggtctactgtccctctgtctcaagcagtcctccctccttctgcgctgcggcgcctttaaaccttcttggcccttgccccgccccgggtccgccccgtctgaggcgggaccctcctgaaaatccccggctgggcagggcgcaccacttgcagctgcagcccttgccttgagtcagtgcgcygctctccagcccgcttgaacggtgagcaggtcgggggtacgggggtcggggacatgtgcgtgctgtgtagaaagcaagaagccagcgctttgaacttgctccagcgagctcggggatcaagggctggtaccaggcaagrgtccggtgactrctttaccccgccccgtgctgtcaggtcctgtccccaagccctgacccgacattgttggacgatgaggtcaggcgaggttagcccatgcatagacagggcgtccgtctggagcagggactcagggactgagccccacccgcgggctccatckctgagtcctcactggggcgaggggaaaaaagggcgtcggactttagctggctggccccgagtgaccccgggtcgtggcgccggccctgggccagctcgtgctcctgggctttyccgcgcgacccttcacttcctggttccaggagcacgtgtgagcactgcgtgccctctgagtccccgaggccgcccttttcattcctgttcctgctagcttgctattctggggacttgaggtcacgggctggggctagggggctctgcatgggtcgcacggtgaccttctgtgaagctccagtcatctctatgacggtcccctgacctcgggggtctgggtgctgcagccctgactgcgccccggggtgccctgtgtgaggttgtgggggtggtggtggctgcttttaccctgcccgagcgccgctgcccccaccgggtgccccctgctgctgggaaagccggtggtggccgcgggcggacgggcgggctgcccagaccactgcgtcaccccagcggcgggagggcggtgggtgactcatctgttgtaacggcccagggtgtggtcgtgggggtggggggcggcggctgggaggccggacctgcaggaccggaggtggactgcygcctccccccgcgccctgtgcctcctggggctacctgaagccggtgtcctgggagatctgtgagcagttggtatctgtggggcagagagaaacggggtgagagtggggatggagtgtgggattcgatgtagaagacctgcggctgggacggggctcccccagtgttctcattgacttcaaagcaccagacagcaatrgctctctatctctagccccctcccagtttctcctccccactacaaggggcagacctacaactgcagaggaggccaaggcagggcgggcccagtagggccctaccattccagaaccaacaaataggttttgtccaaccgcaactccctccctcaccccaaggcctctgcccctgtcccccaccccgggattggcccctaatcctttcttcattccatcccttctccctccagaattttcagctgtgggttctctagctcagaacactttcccttcccaggggatttcttctcctgaacaactacttcctgmgtcctcttcttcaccccaacacgggtcatttcctatcttcccccacacgctgtccatccccactatagctgtctcctggaataatctcttgcacctggctacacccgagcactgctgagacgatcccacttctgctcccgtgctcacagcctgctcaccacaacgtctgtgttgacagggtgtttctgcccggagcccccacccagcctccaacactgtttggtacacagaagccatggcaacrgcccccacctcatcccctcctcccacgcaagctttggagcttcctgtttgtgtagcctcagctttctcttctgctcctgactctcggtggtgaggggctgccctacggtggttcccttaattgtgggccgccccccatccttgctgctggctgtggcacctcgctctgtgggctggtgccctcactgtgctgctctttgagaacactccctgtcccaaatctgagttgggaagttctcctgtgttccatctgcacggtggatggagagtccctttgtcttcccaattaaacaccctagccaagaaccctgaagtcctccctgcccccacccatgtccgccttttctttggctttggctttggtgaggtaagcttccagcccagggtctgggtggggccgagtgccttgcgtggcccctccccgtttcccgcctattgtaactccagggtgagggtgagggttgttctcacagctgcagtagcgctagggtttaggttgctccctgccagtccatcccccaggttgttcagctgtcaccttcctttggggtccccagctctgggggtcccccacacctgtcttccagctgggcatatctcttctcaccctggtaggcaacttgcttactgttttctttatgtttgagggaaggcaggggcaggtcccctgggtgtccctagggtgggccttcccagctccagcagccrcagcccatsagcttctgcctgcccgtgggggtggggaagagaaacagctgctgaccaggcctggcctggttggaactgccccttctcaggaccccgccctatggytctggcacctcagagcttgagggcaatggccccagagtggagcagatacastgcagctggaggccgtgaccctgccagctgtgtccaggccccagcgttgggcggtggagggggttcctcagcatccactttccacccagtggtgggtctgggaggccaagtttgtcctgccttggggggttggggggcactggaagtgtctggcttcaggcctttctctctgctcttaaccccagtgtctaggttaatcattctcctgccctttctttacctgtgccatggtgatccccgagcctcaggccacttggtccctggaaacagccctgagcacagccactcccaggagagaggtctggaactgggctgcggaaagggggcttactggtggtagtagctcttagccccttcctcttcctacctgtcttccagccattcccctgtgcatcagaggttagaggtttctatggtggagtggcctctgggaagggcagggatgcttctcttggtttctcctcagaactcagccaccccaccccgcctgccttccccaagctgatggtgtgtgtgcctggcgctgtgggtcggggcccagactgacatttatctggcccagctttcgggctgggggaagtggagggggcgggttgctcttaatgaggtttaaaaataactgatttaggggaggatctgcyggaaatgtgcagcttgataagctggggtaaaaaggagcagccatgttggagtcgggacgggagggactggcccaagacacagcctctgcggccgagaggtgttgagggtttgaggcaggctggtccccttgtatttcgcagagccccaaggtccattgagagggggtgacrggattgtttaacctgggtgtgtgggagagggggagctggagtgacttcatccctgaaggccaacctggcctggagccagatgtggttagaaggggtggctctctttcttccccttgaacgcagatgcctgtcctgggggtcccctttcgtgagcagcctgacagctagctctgttttggagaagagagaaaagccaaaccagggtggggatgggacagaaaatggggactgtggcccattcttggttcttggctccccttggcatccataccatgcccgggtcttgctcagcccctgagtgtcagacccaggtggtgagtgtggtgggaacacactgccacagtgaggtccgccaactcaggccattggtcgggaaaccacccagttcttgctaatcaagctcctccaacgaagttaaagaaaccctcctgtgtatttccccgtcttgccttctcttctccaggtttccccaaaaatatcacccagggctcctgtattagtttcctatttctgctgtaacaaattgctacaagcttagtgatttaaagcaacacaaatacagcatcttacagttctacagactcaacaggggtctcactggctaaaatacaggtgttggcagagctgtgttccttctgggggtttttgggtgaatctatttccttcccttttctggcttctggaggccacctgcattgcttggttcatggccctgtgtgactctgacttctacttccattttgttgttgttgttgttacttctcccactctgactcacctmtctcccactttcagttagtaaggcccttgtgattacactgggctcatttagatgatgcaggataatctccccatttcgagatcttaatcacatctacgaagtccctttttgtcatataagataacaatatccacaggttctgggaattaggacatggacaccttttgcgggggcatgattctgcctgtcatagctcctagaggggaaagtagaatttgtttttattgcctggtttttcataggaaattcgatttgtttgctgaaatccctcaaggacctattcaagcctacctcttccagaaagcc

SEQ ID NO: 10037 - DNA, 33020 bp, Homo sapiens
ctcaaaacacagatggatcacgtttctcctctgcttataaccccccgtgacttccatctctcttgatcttactacagcctacagggccctgcacagtttgagcccttgtagcctctctgatttcatcctttttatcatcttcagccacattgacttctttgcttttccttatatrtaacaggagctttactactataacaagccagcaaagcttctgccttggggtctttgtccttctgttccttctggccagaatcctcttccctctacatggcttgcccacctccttaagtctggccaaatgtccccttctcaatgaggccttctctgaccatccaattttatctatctatctatctatctatctatctatctatctatctatctatctatctatttatttatttgatatggagtctcactctgtcgcccaggctagagtgcagtggcacaatctcagctcactgcagcctccatctcctgagttcaagtgattctcctgcctcagcctcccgagtagctgggattacaggtgcccgccgccatacccagctaattttttgcatttttagtagaggcaaggttttaccatggtggccaggctggtctccaactcctgacctcaattgatccacccaccttggcctcccaaagtgctgggattacaggcgtgaaccaccacgcccggcctgaacatcctagttaaaattgacttctattttcactggctgggtgcagtggctcacatctgtaattccagcactttgggaggccgaggtgggaagattgcttgagcctaggaattcgagaccagcctgggcaacatggcaaaaccccacctctaaaaaaaatatacaaaaattagccaggcatggtggtgcacacctatagtctcagctactcaggaggttgaggtgggaggatcgcttgagcccagaaggtcaaggctgcagtgagccgtgatcacgccactgcactcyagcctgggcracagagtgagaccctgtctaaaaataattataataaaataaataaaattgtgacactttctactcccccttctgctttatttttctctataattcttaacactgactaatgtgcgtgtgtgtgtgtgtgtgtgtttgtatgtgtataatattttgagacatgktctcactctgttgcccaggctagagtgtagtgggaggatcatagtttgctgcatacttgaactcctggcctcttcaagtaatccctctgcctcggcctcccaaagtgatgggattacaggtatcagctatcatgcgtggccatatatttatttttaacactggctaaaatataatttatatattaacatagatatttatttatagaaatagatatattttgtttattgtaagctccataagggcagggatatttgtataattcatgttgtaccctagtggctataccaatagctcctggcacaaagttggcactcaataaatatttgatgaatgaatgaatgagtgaattctgtgactgcgaagaagtgatctgagctttgcaggtcccatgtctctcccagtcttaagggagttagatgcctgttccctgaattaatttgattactcttgaaaggacattccattgctaaagattcaagtttcagttcctcagcctgacattgtagggtgtagataaaccattccttactaatgcatccagcctcagaagggtccttcagcctctcgggtcagacctttcttccctgaccctctggcctggagttaatcacttcccctttaggctcagctacacttagtccagcgcccacatcacattacctgggggcatggctccaaaattgttgtatacatctctgtcaccccctccaaggagggtgggacccttgttagtcagctctgctttcccccagttgtgcccagtccagggctggaaccactgggcactcaggaaccatggacaatgratgtctgkatcccaagttcactccttccttggggacctgggtgtgtctcgcttcttcactagggcccaagccccacttccctttctctcyctggactctcttgctcccaagaggaccttccgtggctccccactgcagaagattcaagtctgaatgtttcagcctgacattcagctcctgctaacgtctccagcctctacttcccttcccaccgagccctccggtgttatcacaaacaccacatgccacatgccacgctatccaggccccattcctgatagtttgttaagagaggtgggcaggcaaggctggctccctgggggttacttcacatcttctccctgttgtcattaatggtcctgagcttggctctgcccagcagctgtgtatgtgtgtgtgtgtgtgtgtgtgtgtgtgtgtgtgtgtgtgtgtgtgtgtgtatgtctgagcccacgcagatacacacacaaaaaagagggagagagaatgagaaaacacttctatcccttccaggcaaaagccaatcaggctctgcgaggcagataggggttctctcaggcgcccacttcccatcatgcccctgcctctccagggctcccctgatgggagtcatttggaaaaacaaatctaaaaccttcacagtttaacccctgccttccctcaggacctggctctgtgcagagctgcactgggaacagaacatctgggtcccctgagcaaatactagcccctccaaggatgtgctcctgtcctgacaaccacactcccagctggcatctgctgtgcagaagaggagggggttcggtggtcgggggagtggtgctatgccttacagacagaggatctgtgactagcaccctttaggggacctcctacccagcccattgcatcactctcccatctccatgggaagaggagactcccctgcccctgggagcccccagtctgaggggcatcataggacctctygggcaagcacagagtctggattcctgagctgcttcagtttggaggggaatggtgggactggggaaggggatacctcctaatccttccctttttgaagcttccaccctcagctctttttcctctttccaccaatcccccagcacctccatgagggtcatttagtctatatagtccccccacccctcctctctaaaacgtactgatgggcagtatctagcctgggggacaggccctggggtgttgaggaagagcagtcttcccccaaaaccagccttcctccctgtagggattgggccctaagagsggggacacaggacagggccctggaggcaggagctcaggacccagtctagctttacccttagttctcagagctgcagtttcctgtcggcaacattgcctccattacttaatggtgcctggttctcagctacctatcccacccctgcctcttcccattcagtggccctagagatgacttctaacactctcacggcctcatttgggttttcaggcaagcttcactgggatcacagtttcactagtagggacggaagatatctacttgtccacgttttgaagctcttctcatctctgagggagctgagggaaaaacacctttatgtggggaactaactgcttttcctgctgggcagttctcctgagcgctaaccccaacccccatgttccagtgcagagtaagtggaggtgctgtggctgcaagctcagttttttggcctcccagctggctgggagggaggtaggggtctgggagccagttctggggactcaccctctactgtatccaggccaaatcccaaggagaggaagatcacaggyaggcatgctccccagggccacagactaggcactgccattgtcccagccctggcttgtgtccagtcccggctctcctcccggtgactctggggagaacggtgtgataagccctaagggacacagagaccagggttcagataggagagggagggcaggggcagagagacaaggaatcccacacagagacagcaggagacagaaaaaaagaaatgagagtcacagagacacaaagacagtgacaggcagttggagacagagagactcagcatgagattgagagatggggacagagatgcagacagtgacagggagagtctcgggcctccagagggagaaaatgacacagggttctgagcaaaaggcaggccgagaggccagccaaccctgagggcggagcagcaggctggggaccgctcccaaggagggcagcgggggtcccggggcgcgtgggactccgcagggagagtctccctggatccctccgggcgcgcggccccccagcgccagctgacagtgctggctgcggtccttcccagggccggcacgcaggggccgcgcccagctcccgccctccccgccccccgcctaaacagattggttcgcagggacctttccgttctctccacccctcccgccaagtcaaaatatttagcctgacaactgaggggaggacaggtctgttggggaaataaggccaaaatacggggggagggtgggccaagaactgagcttcctcaaatcccgctgcggctgcagcggctcccgccaaccctttgtccccaccacaggcttcttccaagtggggctgcaccgccggaggggcagccagcgcgcccgggcttctggggagcgctgtgtctagattctgcttcccggtgccttgacatctgcggggtaacttctggcagcctcgacccgggagaacgtggacagcccttggcctctgggagcccctctcagcctcctaggaggcctccttgtcctctttggagaccccttagcgccaggctccgtcaccgcctagtcccttggttctgaccaagatcccgaggaagaaggcgatcactgtgtagggctctgcctccgtctggtcaccttcttgagctcaggctgctcggtcggtctgtgtgtccctgtctcggggacttggggggccatccgtgctggggccttggcggagagaaccgtgagcctctaggaggtcgtccttyccccgctccctggggccttgcctgtctccccgccaagagacacccctcttcccttcgctctccccagcttgagacggatgggttagtgcagccacggaggcttgcgcggtgggaggggttgggaccagccttctgctgccctgggtgctggggatcccggrgctttccaggtgctcggcctccaaggtgcgcggtcctcagctccacccgcgggcggctcctgcgtccgaggagctaagagaagatctattaatttcttcacgaataaatcgatgctcttgtcagggaggcgatcgatgtcagccctgccctgccttgccctatcctgccccggggccggcgctggctggccggggtcagggactgaagctgagacctgaggcgttgctcactgggggctgcagatcgcacccccaggcacccagcgcgggcggggagctcgcgcctttgcgcgcgggcttctcgcgccaccctgtggcttctcttggaggcgcggtcttggctctccggactcccttcggccggattaggcgaccccttccctttctctgccccgtctgtgtcttcctccccaggttctgcgattgatcctttggtagtccttttcgttttcttcctagagttcggagaaygttctacctaacttactccaagtgacatgctcactcccctaggcacgcgcgccgcgaggatggagcgctgagcctggggctggctaggatgacctggacagcaacctttcctcaacgcagtcatcttccctcctccccaaatgtaaaaatgcagctgctttaagctgagagaaataacgtatcagcttcccacctccggcctcagcagacacctccgaggcgttctgctgcggcccctcagcgtctgccggagctgaggcggatcctcggggagaaggctgacgctgggggcccctaacaggggagggggcagaggkgggggcgtcagagagtaggaagcgggtggagaagaggggcaaggcggggccgggcgggggccgctggctccgccctttcctggcggctgggtctttaacaccgcccagcgcacatgtcgggggaggcctggcagctgcagctgggagcgcacagacggctgccccgcctgagcgaggcgggcgccgccgcgatgctgcgaggcggacggcgcgggyagcttggctggcacagctgggctgcggrgccgggcagcctgctggcttggctgatactggcatctgcgggcgccgcaccctgccccgatgcctgctgcccccacggctcctcgggactgcgatgcacccgggatggggccctggatagcctccaccacctgcccggcgcagagaacctgactgagctgtgagtgtccggcgggcggtgggggggcgcggggacaggcaggcattgcagtgccccgagggcgcggactcgctgcttgtttgctggtcaggcaggacgagcacggcggaaggctggcaccacgcagccttcggcgctgcccgggcgttcctccgcagccgcsgctgccctagcaagctttatggtcagtgcctggatgtcccctagtgttcagggcagctgggccgccggcttcagggagatcgaagggggaaatctccgtggaccaggtctgagagagcctagccgtctagaaggcgctttctggagctcagccagaagcccctgctctgtcctacagagaaggatggttaccagcagagaagtccccagtttgtcacccttactgcctttttccttttctaggggcaagccagcccccgcccactttcttgttatgaggaggcaaccctagcttttcttctggaattggggattgagctggctggcattggtgggaggcggtgaggagctgagtggttgagctctcctctttccatttttaccattccttcccccagaacccgttgatttggatctgggaaatgggaccccctcctggattttctctccccactcccatctccctctccaaccttgtctctctacctggggcggggagtcagggcccttgctgagagaccctcctccctttggtacacgaagctgggaggaatcttcagcattctgcaggactctgacattctgcaggaattggttacaaaatactcaagtactttttagcagctggtgaaacctmtgggagtatgcggtaatgactggcctggaggtactcaggcatcatatggtgatggctggaaaatacttgaatattacatatggctatcatggccagcaagacatctagaagaggggagaactgctagaaaatcctcctcctgtggcctggggtttcgagggtggacaaggaaccttggccttgtgctgtgatgggctggaaggtatccgaggtgaggatcatcactgtctggaagttacttgagcagcttgcagtaattggcactgagttccttgggtatctcatggtaattaacgggaaggcactcaatctctctctctaatagctctagggagaccaggagtagaggagatggccttgtcttggtctaggcctaggtctctgcatgatgggagggggcatgagagacaggttgccagtcctagtccagttctctcatcaccctgggccttcagattggggtccagactcctgagtgctccccatcagggctcgtgtttcccaactctttccaagccccaagtgggtccagcagggtagggatgggagtggtagggggagtggacaggccagaactggggactagcaagcatgtagggtggtgagctgagatgtccccctgggtggggctgcagcctgacayccccctccccactgcctgcacagccccctccctcctcactcacccgcagagctaacgaggagataatggactcgaatagacagattgattatgaatccaaacgaatgaggcagctttgaggcagctttgagcacgctggcctgacagctcccacacaccctgccagcccactgcattctcaccccctccctgggtccctacagcttgaaaccctctgggcaggggctggggggtgggtagaatagggacttggcctccctcggagtcagtggaggttactttataggcctctactaagtccacagggaaacttaggacctgatcctggctgtcctggtggggccaaggctgggaagggaggaaaggaggaagggaggggtcacttaggctggtcctggttcctataagttagggaaagttagagggtagagggggagagttctgagaaccgtcagtgagtcaggggcccctggcatgtgtattgttggggtggggggggcacactaacatgtcactacagggcagccgagttctcaggaactccctggtatgtcggatccagcagctaggcaggccccagggcgtcagctgtcccctagccccgaatgcctactcattcttctttctttcttgtctatctcgctttctgtagctctctgtccttatctgtctgtctccctccccttatctgtcttccttcttgcctgtcactatctctctgacctcttcctgtcagtttctctttcagtgtctctgtttcactctctctttgtttttctgcccgtctgcccccaccctcctcgttgagcctttccatctttctgtctctctctctctctctcttgctgtgtaagtcagccagtctgtgcctcttctcccctcctcgacactctgactgcctcctctcattgctcctctcctctttcctgggtccctccttggggtccctaactgatagcctgtaagactcttgcttgatctgctgaaaagatggtaggggaggtttcggtggagtaggggttgctgcttgggtgtgaagaggggccagaggctatgggggtgcagagatgtttgtgtgtgtgtgtgtgtgtgtatgtctgtgtgtgtgtgtagtacaggtgagaccaggcagtggcccttgggcgggcacgtttgggaacacacatttgcatgagcacaggcttcgtctgtgctgggtggggcagtggcagggataagccttggccttttgtggtagcaagtgtttcagtacaacctcccactgatgagtgtgtgccagggatgcctgatataaaaggagaacaccaatctgagaatggacttgtgtgtgtgcacgtgagagatggacgtgagctttgtttctgtgtgtccatgggtgagcgtgttcctgcaggcacatgtgcaggtgcatggcgtcatctgtgcagatgcttatgcctctgtgtgtgcgcatgtgcatacctaggtgtgtgcatgtgtgcaagaggtatgtgagaatgtgcatatgtgtgagggtgtggggatccatatgtrtgtgcgcttgtgtgttcatgcacacacatgtgcatgtgtgacttgaggtgcgtctctgtgcacatgtatgcatttgtgtgtgcacgcctgtgtaagtgtgtatgcaggtctgaacaggtgcatatgygtgtgcatgtggcatgtgcatgtgtattgtgagggagtaagtgggtgggcatgggaactcaagtgtgggcctgagccctgtgactcccatccgctctccccacagctacatcgagaaccagcagcatctgcagcatctggagctccgtgatctgaggrgcctgggggagcygagaaacctgtgagggaaacggggactgtgggtgtggagctcagcatgggcctggggkagaccagaaggtcagggagggctcaagcatccgarggcctgggaggacctgagaggctgagcactgagggactgggagaagtcaggaagctcagrgctttgaggggtctagagtagttgaggaaacaatgaggggcctgaggaggggtaggggttcagcacaggggactgggaggctgggatgggcagggagggccaggggcccagagtagctgagacctggggactgatcctcctgcacccctccccagcaccatcgtgaagagtggtctccgtttygtggcgccagatgccttccatttcactcctcggctcagtcgcctgtgagtgtggccagtgctgggcagtgggagttggggaggacacccagacttgggctgctaatgggcttggctgtccccggggaatgattgcgaggagggcccaagcctggtcagggaagtcacctcaccattctcctggggcttcctcccatctccctcagggatggcatgctctcgcccctgacagctagaggtcctccttgccatctcacttccatggtccatgctgcaaggacacttctcataggtgcctgccctatctttcttcccagggctcagatacacaccagtgcaaagggagcaagcggcaggagcaggactcctgggttctggctgggactccatttcccagggactcattgacttggcccctaggacatcctgggagctggggtgttaggtctgccacttgtcaccctcctcattcctgggagtcataactatccctcctgtagagcagtggaccccaacttttttggcaccagagactggtttcatggaagacaattttaccacggatggtgcgggaggagaggatgatttcaggaygaaactgttccacctcagattatgaggcattagttagattctcaaaaggagcacacaacctagatccctcacgtgcgcagtagttcacagaatctaatgctgccattgatatgacaggaggcggagctcaggcggtaatgctcactcaccgctgctcacctcctgctgtgtggcccggttcctaagagaccacatatttgccctgtttatagcccctcttccttgctgtgcttctctttttctttaatttattttttaagagtcagggtctccctctgttgctcaggctggagaatagtggcactattacccatctgtggcctgggaattggggacccctgctgtaggacagagagggtcatgggatgggcaggagagactatcagagtccctggcagcccctccctggccttctgagggcaggagttcagctcccctgtcccccaayatgagcaggcagagagatgggaaggatggtggggctgacactcatggagttatgcagggtcctctaaactctgctgtgtccagcaatttaacaaagcaaaataaagtgatgtcatatcaccgtctatgcaccggggcttcagttaaaaacgtgctcaatgacacttcacgatacttatgtcaatgaatcttcacaatcaacctggtgagagagagagtgttcttgtccccatttcatagatgagaattctgagaatcagagaggttgagtttctggactgaggtcacacagctgtaagtggcaggatagaacttacacctgctctagctggctctagagtgggttgtgtctttggtccctatgtggtggtacttctcccacccagccaccacaaattctaggttggctaggaaagaagaggggtcaggataggcccctcagaggcagagggtcccagcagcggcagcctggcacagggcacagggcactggggctcctacatcattttcctgtgtggcctggagccgggcccctgctgggctcactttttccatccatacaacgaggggrctgggggtgtgggggtgtgggtcctttcctgcctgaccttttagtccctgaggagggcccggaaggaggaggaggaggggagctgaggaagtgcgtggagttccttgtggtcaggtaggggcaagggagtggcagcctcaaccctccccctcttcctctggccccgtcctgggctctgtagggaggggagcacagatggaccccttcccccagctgtggcctcagcactttgccagctggggccaaagcagtgggggagggaggagcggctgttccctcagatgcccctccctggggtctggagagggggttaagtggggttaacccttgttgtcccagggaaaggagtgggactcagaaagtccccccaccccccaccccaccatctacacacactgccttccagggctggttctggttgcctaggccggggcgggggagccagatgtcaacttctttcttggctcctcccctccctcattctggtcagagtgaggtcgggtcactcaaggggtctgtcttgctgtgtctccacgcccgcaggaatctctccttcaacgctctggagtctctctcctggaaaactgtgcagggcctctccttacaggaactgtgagtgggggcgcttccaggggcaagagcaccaagtgtgtgtgtgcctgtgtgcacttgggtctgtyggatgacattgggtcactgtgtctgtgtgacactgctggggggtctctttggggactatgtgcatgccagtgaaacccccatcaaagcaggggctgcaggactacccgttaagggggctactgccctgrggagctggcctggatgactgtgtgtgtgctgggcctggctgagcagattacaggcccactgtgtgtccaaggcacatctgcccacattcccagggcaccctgcacaggggtgagtggggcagcaggggtccatgtgtacstggtgggcacttaaagcctctgggtcactctggggggctgtgcccttccctccttgtcaccatgctgagagcccttgcctggtttctcatcctggggagcctggggtgagggagccccatgcatccctcagacgtcagctgtcttgtcttccactttctgcattagatttctttcatttttacgttattttttctttttgtagagttggggttttgccatgttgcccaggctgatcttgaactcctgggctcaagccatcctccgcctcggcctcccaaagtgccrggataacaggtgtgagtcacagygcctggcttatttcttttcttttctttctttcttttcttttcttttctttttttttttttatgagacggagtytcgctctgtcacccaggctggagtgcagtggcacaatctcatctcggctcactgcaagctccgcctcctgggttcacgccattctcctgcctcagcctcctgagtaggtgggactacaggtgcccgccaccatgcctggctaagtttttgcatttttagtagagacggggtttcactgtgttagccaggatggtctcgatcttctgaccttgtgatccgcccgcctcggcctcccaatggcctatttctttgaataacatcctgttactggagtcagagagaaagacctctgtgtcctccctttcacctgtagacggtcctccctgctgcctaactgctccctcttatcccctgtgayccctcaggccctttccttgactctgttggtgtcccccatgccccccagggtcctgtcggggaaccctctgcactgttcttgtgccctgcgctggctacagcgctgggagkaggagggactgggcggagtgcctgaacagaagctgyagtgtcatgggcaagggcccctggcccacatgcccaatgccagctgtggtaggtgccgggtgagggaggtggtgtaagggggctggggaagagacctacctgcctgagggagagggcactgagcaagcactgaaaargcctggggaaygggcactggcaaaggctgggggaaactgcctggggtgacatcgcctgggctccaggtcattgaggagggtgggggaaggagcagccccgcrgtagagttctggggccactcccagctctaacaccccttggccctcgggcgtcctgggtggccaggtgtgcccacgctgaaggtccaggtgcccaatgcctcggtggatgtgggggacgacgtgctgcygcggtgccaggtggaggggcggggcctggagcaggccggctggatcctcacagagctggagcagtcagccacggtgatggtgagaagaccttcgctggcagcccccaagaggtccaggcagagcacaggggacaaagatggggaaagagagacacactgtggaggaaagagacaacgaataaggagcacactgaggttgagggacggacagagatggtttagacccacagggctcaggcctatgctctggggcagcccagggcacgcacacaccctcagggtgggcactgacccagcagggaccccaggctatacttgaagccccaggacttagaacccctttctgggaacatggtgttggctgcaagggagagggtcacagaaaccttacatgttggagctgagaggaacccaacagaccatccctcccgtacatcacttttctctctcccttccttccttccttccttccttccttccttccttccttccttccttccttttatggagtttcgctctgttgcccaggctggagtgcagtggcgcgatcttgactcaccgcaacctccgcctctcgggttcaagcgattctgcgattctcctgcctcagcctcccgagtagctgggagtacaggcacgcgycaccatgcccagctaatttttgtatttttagtagagacagggtttcactacgttggccacgctggtctcaaactcctgacctcgtgatccacccacctcggcctcccaaagtgctgggattacaggtgtgagccactgtgcccggcagatcacttttctatataaggaaactggaacccagggaggaggcacaatatcagttgtactgcatccgggatgagttctcgggggtatcgtggtcttttttctggagattctggaagcagcatcctcttgggcatgtgatgaacgtattagtaagggaggcataggtctggctccagctctctcactaattaattctgggaatgactttcagaaaaatcccttaatctgcctgcactttggttttcttatctgtaagctgagaaggtggacatgatggccttctgatgtcctgcctgcccctgggcgttctctggcctctatctctgttatccatacatgcctttggacatcttcccaggccttaccctttgtccttaggctggcgatgggccgatgagagtagccacaggtaactcagtcggccttgttgacgaggtcaacggcagctgacaatgggctgtgcccacccaaaaagctggctccacctgggcaggaggagtggatatgcagggaccaggaatgtgtgcctggggggctgggagcatggtgtttatttggggagccttcactttggtgggagagtccaccccagaattgctggaggcccctggaaccatgttgagggagatgccactggggcgctgagcagggggcttcagacatggtggagggacaactagccactgagcagttcctccctgctccagagagcaaagctgcctagagtgagtaaaagaaaggggaccaggcagaggccatacccctgcatggagagaccttagatcaactctgtttggggtgattccaggatttgctttctctttgggagacttacatgtttgctaccatctgtgttttctagaaactacctatacaaaagtcactccctactgggcacagtggcccatacctgtaatcccagcactttgggaggccaaggagggataatcacttgagaccagcagtttgagaccagcctgggcaacaaagcaagaccctatctcttaaaaaaaattgcaccctaaatgggttaaatggaggagaagagaggctgctctccctcagttaggaggataaggggtggcagaccagctcaaggggaagagttattggccccacagtarttggaggggatgggacagccaagggaagcagagggcagggcagggcttcccctcgaagtggctggaacccagagcttgcacaaaaggctggaaactctactggaacctttgaactcacatattccaatggaagcctggggaaaccatacctcctctggcatgtggtcagaggattccacatttataaagttttcggataaatgagatttatccaccacttcattattttcattttgtgaaaatcactttctaaaatgtcagaagataatttgtccacctcttcagcttacaaaacaaacaaaaaacccacagttcagcaagatgaagaattgtcgtaagatcatgtaacttacacatgacaaatccacggtttcctaggaagagaaacttgatctgattcaatcctgacgatgattcagaatcaagtcactttgcctgtctaacctcacccatggtcctcatctgctgcaggaggcgatgccgctgctgttgtttctaactgctgctgtgctatttgcacyatctctttgtttctgatcttccttgggctgagactcagtttgttagaactgtgtgtaaaacaggaatgaataggcagtgaggtcctagtggggtctccaacgagctgtgtacaaatttggtacttgggatgcgtgacatctgtttagctgctcagatggctggttttagtttcagtttgggatattttgtgcctattttgaggctactggttagattttagatttttcagataattaaatacgtgatccaggctgggcrcagtggctcacgcctgtaatcccaatactttgggaggccgaggtgagaggattgcttgaggccctgttcaagaccagcctgggcaggacagtaagaccccgtcgctacaaaaataaaacataaaataaaaaaaaaatgtgatccaggagatagtcaacgaacaaacctaaaggaggaaggccattmtctgcyacattctctcccacccctctctcccttctcttccctcccagccctcctctcctttccatctggagccagaggggctctccaaagacttcagccccagccccaagctggctaaagctccttcttattcccccctctctttcctgatctagaaatctgggggtctgccatccctggggctgaccctggccaatgtcaccagtgacctcaacaggaagaacgtgacgtgctgggcagagaacgatgtgggccgggcagaggtctctgttcaggtcaacgtctcctgtgagtctcagtggcagctccggcacccaccccctactcatctcttcttccctcaaaagaggatgtagggtggggggctggaagaaagggtgggatgtgtgtctccacagctgctccctcccagctrtttccagattcccatgaaaacctgatcctttgggggaagtcctggggtcttgtcaaggccagagggatggagatggatttctttctggccccctgcccgagccttgctacctgaggccctcarcgccagatgcccggctgttcccactgctccgaagtattttttcatgcccgtccctcatcgggtccttctccccgcatcctagtttcaaaagaggaaattctcctcctgagttcctctttacgctcgctgcctaatttctctagatcagccaacaaattatcttaaatattctactttacatcagttttcttcttttattgtgaaatatacatagaaatgtgcaaaaaatatatatattttaaacaataattactcttaccagcatcacggaagatcccccaccacccaacacctctccctgttcgcaatcccatcccactctcccatctcatgttgacttttgtcaggataaccatttccttgcttttaaaaataatttttctcaaatatgctttcctatcggtatcatttagttttgcctgttcttgtacattatataaatggaatcatactgcgtgtattattttgtatctggtttctttcattcaacattatatttataagattcattcatgttaatgggagttgctatatgtagytcatgcaattcattgctaaatagtattcctatgtatgaatgctatattatatatatatatacatatatttatgcatacatacactttttttctatcattgaggggcttttacttttaccagattgggtctatttcttttttttttttttgagatggagtctcgctctgtcacccaggctggagtgcagtggcgcgctctcggctcacttcaagctccgcctcccaggttcacgtcattctcctgcttcagcctcctgagtatctgggactacaggcgccctccaccacgcccagctaattttttgtatttttttagtggagacggggtttcaccgtgttagccaggatggtctcgatctcctgacctcgtgatccgcccgcctcggcctcccaaagtattggaattacaggcgtgagccaccgcgcctggcccagattgggtctatttcaaacgcatatcttttttcaaaaagagtgtgtgtgtgtgtgtgtgtgtgtgtgtgtgtgtgtgtgtgtgtgtgtttkaagagatggggtctcagcctgttgcccaggctggaatgctttgggatcataactcactgcagccttgaactcctggcctcaagcgatcctcccacctcagccccctgagtagctgggattacaggagcaagtcactgtgcctggcttttccccaaaaatttaactgtatatatttttggctggtttgattgttagggcccctgacccatcttcttcagcttggttacactgacttcttctagattccttatcccaaagactccatgtttaattgtcataagctgataccccactcctgtggggctgtgacttatttatggcccaccacttatgttctttaagcctctaaattttatatgcctgctgcctgatttatttaaaatgtattgtcaactttcttcaaaacatctctccttggtgaatttcccagggcctgctgacctgtttctcccaggcctgccctttgatttcgggttctactcgctttgcccgtggacttgtcgggtgtgtgccaggctccctccagctgcgccctgacctcctgctgttgctctttctggcccacagtcccggccagtgtgcagctgcacacggcggtggagatgcaccactggtgcatccccttctctgtggatgggcagccggcaccgtctctgcgctggctcttcaatggctccgtgctcaatgagaccagcttcatcttcactgagttcctggagccggcagccaatgagaccgtgcggcacgggtgtctgcgcctcaaccagcccacccacgtcaacaacggcaactrmacrctgctggctgccaaccccttcggccaggcctccgcctccatcatggctgccttcatggacaaccctttcgagttcaaccccgaggaccccatccctggtgcgagggccatcctgaaccctgcccccaytcctgggctcctcctgggttacagccaacttcctgctatagccctgaccccagaaattggagtgcctggttcgggacagaaaggagtctggagtcctggtgtcccgctgttctggcctccttaccctctccccaagccaggactcctgaactcctgagctattccgtccttgtcggctggctgaggagacagccatgcagcagggcatcctggcccagctggaaaagggtcacatgcatcttcttccttgaggcccagcagcccacctccatcccccctcgtcccatgaaggaatgagtcccagagtaggcaggggactcactgctttcctcctccctctgactgctttctctcctccctctgactgctttctctcctccctcctgctgcagtctccttctcgccggtgggtgagtagcccaaggtggagggcaggttctgcctggtctctggagctgaggctggggcaragggtacagctgaactgatccctgagagaccagctggggccagggttggggggttactggaggctacagtgtgtgtcaaggctcacccctcctgccctgtgtccctacagacactaacagcacatctggagacccggtggagaagaaggacgaaacaccttttggggtgagataggaagtagaagcttgtgcagactttgggaccgggaggctgggtagaggctcatctgcatgtcatttctggtcagagcagggagatcactaccatctggcctgagctctgacggccacccgcacagccactgcaggggtccccaggggaggatgaggcaggtctggagacctggctccgggctcccatgcaggatgaaaaaatggcttactacaggaggctctgagagtacaggagsagcccctggatctaactacccctgtcccccaccaggtctcggtggctgtgggcctggccgtctttgcctgcctcttcctttctacgctgctccttgtgctcaacaaatgtggacggagaaacaagtttgggatcaaccgtgagtcggggctgcagagggctgtctrtctgtctgttctcctggctttgtttcctactggctcttcctgactctgtctctggggggctgtgcacatgggagttccagggcgtgtgagtgtgtttggggtataaatgaaggcctggctgtgaggcttgtgagtgtgagtgtgtgtgggagcgtgtgtcgggctggtgctggggtagtttcagaggcggcagctgctaattggtggctggattgtagtcaagcattaagtgggtctgggaggtctgggctctgtgggggtggagggggagttctttggtgcccatggggccaggggtgggacaggagccagcacagggagaggcggtggtgcccccttccccctgcctgctgtctcgctccctagcttctcagtctctcccctgcaagttacaaggtgggggtgaccaggcatcctgcaggcaagggtgggcagggccaaggtgtgggcaaacccctccatgcggctgtgtctcctctctaggcccggctgtgctggctccagaggatgggctggccatgtccctgcatttcatgacattgggtggcagctccctgtcccccaccgagggcaaaggctctgggctccaaggccacatcatcgagaacccacaatacttcagtgatgcctgtgaggggctatgctgggtcaagggcagggacgagtgtgtgtgtgtgtgtgtgtgtgtgtgtgtgtgtgtrgaagcccctaggcctgaacgatccctccctttctcccacccctccccagccctattccagccataggccctgtcatattcttctcaggctgagtccagcctggctcttagctgcatcccctgcccagagtcacagctagcccamaccatgtcctctcggggcaggtgcagccccacactatgacatggggcttgctgaaggggtgcaggttgaattttagcccccatgcagtccctcgtctgggcagccttgtgcagcacacagccctgccaagacagtccccgctacaaccccagccctcccaagactggggctaccgtctgaccctgcaagccccctcaggtgttcaccacatcaagcgccgggacatcgtgctcaagtgggagctgggggagggcgcctttsggaaggtcttccttgctgagtgccacaacctcctgcctgagcaggacaagatgctggtggctgtcaaggtgagaccctgccccggggggtactgctggcctgggtcccacccccaggagctccatcacatcrggacagagtggggggagatgcagagggctgacatggctggataccggggtgggygggctgccctgggtgaacagcagtgagggctcggcccccaactcagtcctgtccctgccgcttccatccaggcactgaaggaggcgtccgagagtgctcggcaggacttccarcgtgaggctgagctgctcaccatgctgcagcaccagcacatcgtgcgcttcttysgcgtctgcaccgagggccgccccctgctcrtggtctttgagtatatgcggcacggggacctcaaccgcttcctcyggtaccagcacctggcctcagcgctggccccggcccctggctctgggccccgtcttcccttccctatagacatccctgcttgtctttcaaaccaaggggagacaccaagaaagatcaggaaggcacattcccgtccccagggagctctgagatggtagaggaggcagatgtgtgaacataggggtgactcttgcaaaggacaagtgtcagtagtcagggaggttgcgatggcaaaggccgtgagctaaaactttggggtgggtgggctttgcagagggtgtatgtgcatttgtgtgtggcacacaaaggccaggcctgtaagggtagcagtttagataacgacagtaacaacgacagtaatgaacatttatcaggcaccttctatgttccaggtgctatgttatatactttataatttattattttttattttttaacatgtatttattactgttattgttttagagttggggtcttgctctgttgcctaggctggagtgcaacggtgttgcaataatagctcactgcagcctcaaattcctgggctcaagcaattctcccgccttagcctccccagtagctgggactacaggtgcacacsattgcacctggctctacaatttgttcttattatggttctatgtgctggtacatatatatcttgtatagtaatataaatatgtatttattttttatggcctccaagcatatattgcaatttacacttgaagcaagttacaaaaaattcatttctttggcttcggacagaacaactctgatacatttatctatttgtgctgataattttaataacttcgagaaatgtgcctgtttcacagataaggcttagagaggttcagtgacttgcccaagggcacacaggtagtgaatggcccaggggtgatgtggccccaggcagagcccctactctcagcccctgatgtgatggtcacatgttccctcggtctagtccttctctgatgagatcacccccgggaggatggggcagtgtttgcaaggcagggagaagagcagggtttggaatcagctgccacttatgagctgagccttctttgccaagtagctttcctctctgacctcactttcctcaccagtaagagggacagtgtgggggctgtggttctggatgagcaagcgctgtatggttgtccagttgatggtcatgatctggtccccaaacatccctttgggagtgatgggtcattcatgcagtcaggctgcaggactcagctaggagagacccctgagtcttgggcttatcctgtggaccaggagggagcccatgcagggtgtggagcaggaggcgaggccagacccaaggttgagtgtggaggaggataggcacagaggagcccaagaaggccagggaggagcctatctctttgctcccagacatggcataggctcaktgctggtcttggggacacaggctagggagataccagcatctggggcccaggctgtgggagacgaggctctaactgctggatggaacactgggggaatcaatggagggaatcattaatgctcagagatgagtctggaagacttcccctaggagggaccatctgttccttctcccctccaggcctttgtacttccagttccctctgcctggggcattgggcctccctccctccatagaaagatggagacagacacacaaactctacccctccctgcctcagctcccttcgaatggcttcaggacttgagtctcartttaggtgtccctwcctctaggaagccttccctggctttttccattcccacccgtggtgcctgccaggtgcccctcacactgcactgccatgacctgcttatctgcatcatactctgcactgtagccccagtgcttggcacactggaaatgtttaacaaatgcctcaactaaacaaatgaggagaagattggctagtaggaaagggcatttttggcaaagtgatcagttcaggcaaaggttcaggagaaggaacattggggaatatggatgagtgactaggactgacccgagtgctcgctctggggagaaggcgggcatcctggacaccttcgaaaggaaggaagaccccgtaggaatggctggacactgagggcagaggggagagagacaggacaatcaaggactccctggtttcagggtctgcctgggtgggaagggtcccttccctgaggcaggggcaggcttggggaaagacaccgagctccaattggcaagggctgagtctgacatgcctatggcaagggatgtaggggccagtgggcatctggagttcaaggagctgccagagaggaaggcatggatgtgggaaccatgggctgtctctggtgggagccctggaggtgggcacacctgttccgctcctccatcccacccctctggacagctgcctctactgttctctcaatyctccacttccaggyccccagtctcctctcccatcacaygcggctgctggggatcgccttcctcaggctcctgggagttctatcctcccagcctatcccctctccttttcttgttcacagatccyatggacctgatgccaagctgctggctgktggggaggatktggctccaggycccctgggtctggggcagctgctggcygtggctagccaggtcgctgcggggatggtgtacctggcgggtctgcattttgtgcacygggacctggccacaygcaactgtctagtgggccagggactggtggtcaagattggtgattttggcatgagcagggatatctacagcaccgactattaccgtgtaagggtcctttgtccccaaygccttcccctgcatccaaactgtagacaccctggatcccaagaccactgagagcctgcccttgctaggatggctgcatgggtctgagattcactggytctggttttcaacctacctcctcggctcctggtggagggggctctgtctccttcgctatcccagatggaaacagcaccttcggtttttgcctcttagacctgagagccaccactgtttgtttatttatttatttaatttatttttttgagacggcgtctcactctgttgctaggctggagtgcagtggcacgatctcrgctcactgcaacctctgactccctggttcaagcgattctcctgcttcagcctcccgagtagctgggattacaggccacacrccatcacgcccaactaatttttgtatttttagtagagatggggtttcaccatgttggccaggatggtctcgatctcctgacctcgtgattgcccacctyggcctcccaaagtgctgggattacaggcgtgaaccaccgagcttgtgtrtttatttttaatgatggggctggggtaggctgtgccttgacgggctgtcccaggcgcccctggaattgatgcagygtccgcccgtggcaggtgggrggccgcaccatgctgcccattcgctggatgccgcccgagagcatcctgtaccgtaagttcaccaccgagagcgacgtgtggagcttcrgcgyggtgctctgggagatcttcacctacggcaagcagccctggtaccagctctccaacacggaggtcagccccggcccatggtcaccccttgctggcctccccgtcccatgccccttcaggttcctttttcagggaactcggttccccttctgcccctctgccacagcctgttggggggccctttccagcgccgtgcccacactgtgtcccctccactstggccctkttcttctcttcctcccttattcttgccttcacctactgtcctaagcccaggcccagttggcccctgggggaacctcaaagtgctttgtacaaggagcccagacccccatccctagctgcattttatagacctaagcaggaattatcagagtggaagggaccagcacgggaagaggaacccagcacaagaaggcccaacactgcagcaggacggctggaggttagactgtcagaaggacagtcctaccccctccccctgccctcctagctggccacagccagagcaggccccaggtgttctgtctcccagagcagctgcccccaccccctgcttggctcgcagctgtcagtttccatttctcctcctaatgcagtctgctccccggaggctggtggggtgggggagagggttatagattttaattttctcaagcactgagagaagaaatggaattagtgccgcccataacccaagtcctctaatagggaggggggaagaaggggaaaagaggctccaggccccttctccaatcactccctgccaccctttctcctttggattccttggctgctttagcagttcttcctagagtctaactttgatctttcttgctgcagtttctttttgggagagctagtcagtcccacagagtggtatccctagaagggagaagtaaggattgccctcttctttaaaatgaaagccagctatttttcacgccctttaactgcagttctgctctattttcttttctctctctggagctgagagtcagagggcccttctcctcctcctttcagcccccaacactaagctgatggattgataaatacctcagcccctcgccttcctcaacccacctggcaagtcttcttaggatctgatcccagttttctggaagcaatcctaccccagcccaagcttcccakagtcgagccttaatccttctcacttctcagtgtcagagcagaaatgaatcctggggttgactgtgtccattcgggttattagcagctaagaagcccagacgagtagtgtgagctgccttgggagcctcagtgagggcactgggactggcctcactctcttgcccccagcctagtgggctttctcctctgtctctccggtggccccaggcaatcgactgcatcacgcagggacgtgagttggagcggccacgtgcctgcccaccagaggtctasrccatcatgyggggctgctggcagcgggagccccagcaacgccacagcatcaaggatgtgcacgcccsgctgcaagccctggcccaggcacctcctgtctacctggatgtcctgggctagggggccggcccaggggctgggagtggttagycggaatactggggcctgccctcagcatcccccatagctcccagcagccccagggtgatctcaaagtatctaattcaccctcagcatgtgggaagggacaggtgggggctgggagtagaggatgttcctgcttctctaggcaaggtcccgtcatagcaattatatttattatcccttggctgtgtctcttgccagttattgggatgacgtcgttccaggagggaggcattgggattcaggtagggggacagctctctgggatcttcccccactcaggttcccctcagctgcctacccctactccatggacctgtcactctcacctttgactatagtttggatcccattcccatggtcacctggctcacctgctggtaaggcagcctctggtcaaacttcctagaccttgagagcctaactgtcaatctttgtagttcatgttcaggaaggctgggctatagtggaaggggtggaagttagatgtactggtaggatgggagcgttgatggggtgtcttccttgtattggtgtgtccgggacagagcaagcacgcagcagcagatgagagagaaacatgtgtgtgtgtgtgtggggtgatggggggcaggaaagggacggagctggactaaggattgatggaggcaggaccccttgttcctgcccctctgttactcttcttagctctaggtgctttgattagcatctggaggccaggtactgtgtaaagaggctatttcctaaggacaaagccatctccctgtcccattctgtccaagggagtaggtgaggtctcccctgtcctctgtcccttggaacatgactggccttaactgagtggtctgaggctctstcagcagcactgagactgggccccatcatgtcagggcacctgggccctgtcttcaccttccctaacccaaaggcttgcattccacccagagccagggaggagcagcttccccgccaccctcagccctatcacttccaatcacctgtccmgttcctgcaataatgcaagcttcccatggctcctcagggctaatcacatggctgtctcatgtccctgggtgccagtcccaccccacccccactcccatgattcaatctgtgtcttatcgcccctaggcctagccctgtggtgtgtctgcctcttgtccaggctggttagtgctaatggaggactgacccagggctgcaggctgatcgatgggggaattggggtgtgtgtgtgtggttggtccctaagggccaagttcacaggccttcctctcctgccgggtatgggtggggctggtgccgcatcacccctatgagggagggcacttaaagcagatggagccatcgggaggaaagggcttgggaacatggtgagggatgcagagttgggggatcagatccaacaggtgagcccagggacagatgcagagggagagacagtgcagagagagagacagggacaggacatacagacatagtgacatagagagagactgcagagggagatataaagactgagacatgcagatagagagaaagatggagacagacacacagacatagccggacacacatggagagagagggtgagaccagcgctgcaaacagacacaggtacggcagtggctcaatcagaggaagtctgggaggacatcatggactccccagggggctttctacctcactcaccccctcacctgtgccctttgagcctctctgcaggggctaggagaggatgggacacccagacgtggaggctctgtgggtagagacaggaggggacctgaggtttgccccataaagagcaggataggggcatcactaaagagctggtttggaggtcaggtagcacgagggagctgccagggcatgtgaaccattttcaaggttatcaggcctcagatgtggggacatcagaggctcttaaaccataaccagaagtattgctggaaaagctgggcaggtgaggtgagggattctgggaataaggcttggacagggaagggagattccgggagagcatgggagaaggaactgaatatctttcattgatctgggagcgggagctggagcctggcactccaatcccttcaggtgatctggacctgggctttgtcttgactggtgaggagggggcttgcatccatatttccctcccctgaaagcaccccattccctccccttcactgatatacagataggtgtgcacatcaacagggaacctggcctacccccacacggcctagacacacatgtgcaaacacagacacatgcacacatatgcacacacatacacagacacagagccccctccccaatcaytggattccgctgtcattaacagtgcccccctccacctcgctgtggcccttgccccctccctgttaattacctcctggctgtgccaagtccattagctgcccccgccctgacataccccaggggctgagcaccagctgagatggatagctgctgggggatcgatggaatggggccccaaggaccccgtggggggctgggaccaggacaacaacctgaagctgtaaagatcggacatttgggttccccccaacctggcccaggccccttccttttcagagagggctgtcttggttaaaagacaggggctcagaaagggtcgtgggcacctcaggaacacccagcactgaagaaagaagctggaactctcccgtctaagcaagcctctgccagctcctccgcatttactctagaaggaaagactcagtggtgcggagaccagtggggctccccaggggcctccagcactgggatggggtctctaaagaacgaaggggtgcaagccaccctcaatgctctcagccttcctaaggagcctctgcctccttcctgccctgctcccacaggggctggcttcctgacaggagagcagagcatctgtccaggtttccaggaaaaggacaggcagagtgctaggacagccttggtggagagtgacccagcctgtggccccttgcatccccaggccaaagacagaacctagagagaattccagacgacagaggccctggcctttctaagtacgagctggagagagcctgtcttgccaaattcctgaagcagcgttggacaagctgcccagcaggggtaggggagggggattcttctggtaggagccaggacccaggaatccagactttcagcccgctgcttactgaactgccaggcgactcaggcacccctgggatgctggggagtgaggtggccccattgctctaagcaacagtaccctcccagactgtctctctctgtctcccaccccagcgcggatggactsccgtgctaagatggaaagtttgagcagcagtggctctggagtggtgggcaggatggagatctggaggcaggaaagacagacaagacaggccagagctgcaggaggagcccacacggcggggcaaggaggggcagagaggagaggcaacccagatccatgcagagactcagccctgcatgtgcagggaacagagaagaaggcagagagcctgagatacaggacagaacccaagagccacagaagcagagcctcagaggccatgcgcttttcatgagccctgcttctagtccagccctggggacgagaggctcttgagcccaccgcctactgaactgggccccattcctcttcttaaagggctatgtttcctggtgcttaagcctctagattctggaatctggttgtgccacttaccagctgtgtgacattgggcaagttactcaacctttctgtactttagtctcctcctctgcaaaatgaggataataatagcaataacctcacaggattgttatgaggtttaaacaagtcccatgtggagagctctccctgtagggcctggccttagtagctgctatgtaaaaacactctctccccctccttctttccctccctatccttcctcctcctctctatcctgccagccgaggccctagccctggtatgtggaggtgaggcaggttgtatgttttgaagggatagtgcttgcagaagagaagytcttattccctgatcccaaccactccctctagctgcaggggacttgccaggctgcagagagtgtgaggtgaggaagggccttctccctccctctgacacccygtgggctccaggtccctgygctgatcyagaaggccctgatgtaggaagagcctccagcctcccctgccccgtgtccctcgtttactcttctcctactccctgattttccctagtgagaatttctctctcagctcaccgcctctgggcagccctccgggattggacagggaactttgtacccttgaagggtgtttcygaggacacaaatcctcgtagaccctgagacaggtctccaagagtatggacctggagtgcgaaacatgccttaaaggctttgtatcccttatccctgtggcctcctgttcctgagtgccaggaagtccttcctacagtctaccctcgtgcttcccacctggatctgaaggggttacacagctccaggcccgcccacrgcaggtcccagctgcctggggcctgtggtcagagctaatgtaggcgagagttggaggacaagaggggataaagttattagcgtcttcatctttgaggaatatcgatcgccaggtctccaggctcacttggtcttataatggggctcacgggggtgttgggaggggctcagaaaactctcacaaatccctttacccatatcctggagtgggcactgggctacccatgtctgctgaaaggaagataggcagagacacagtttgggaggcgagtggcctgggaggcaggagtgaggcagggctgagaggggagtcagggcttggcaacctgggcaaggagcagactggaatgggcttgatttcagttcactacactttactttaaggttgagtgtgtgtgtgtgtgtgtgtgtgtgtgacacacagaaagacagaaagagagagaaagtgagcgagagagggagagagagagaaagggagagctttcccaattgagttagagaggtccacgagggctgcccaagagcgaggaaggactccctccccccaggctcatgtacacaggctggcccaccaaccccaccctcctgcctgctcctccagcacttggatgctctgaaacaccttccctgccctctccaggcagctgtctggtgctcctttgaatgggatgttcttgatgtgatttcatgtgtgatggtgaagggtacctcacagtggagcatgtcaccccttcccacccagggtgattctggtcccagtatatctgggtttgtgtttgtgtgtgacagtccttgtgagaaggtctgtgtaaactcagctctctgcatgggtctgtgcaaattcgtgctcctaatctgaaatcagaagggatgtaggctggggacagggctcagggatctggctgtccaacccctccagggaggtccccctatgggtgtttccagccagaagtttccagctcctggctgactggagacggagcttagactgtagaaagaccctgaggggagagcagcagggtctgggaactgaaaggcgaaaggcacaactccctcccctctcccttctttcttccctccctccctcgcttccttcctccctccctccctccctccctccctccctccctcccttccttccttccttccttccttccttccacttctgttcttcctctcttcctccctttttctttggaagcagggaggaaggagtagaggaggcttctctggccaaggggggtcagaagctctggctctttcctctggaggagctggcgtcccctctgctgggctgggagaggaggtaattaatgacaaggaggccaggaggggtgagtgctcaaggctaatgttggtattaatcaggagctggtccccagcgagggataggattcagctggggcgctgtgtgtgtgttgggggtgatgggggaccaggagcttctgcctcatcccatcagcctccctccctccccagtacccccaccacatccagccctcttgctcttgccccttgccctcattttttttttctggaggtccctcctgctgtgtccttcaacctcctgctgagggaggggcggatccctcctcaaatccaagtccaagccgccccctccccacaaacccctcaccagcccttcctgcggg

SEQ ID NO: 10038 - DNA, 29769 bp, Homo sapiens
ctcctcaggcccctcattgtttcctcaactactctagacccctcaaagccctgagcttcctgacttctcccagtccctcagtgctcagcctctcaggtcctcccaggccytcggatgcttgagccctccctgaccttctggtctmccccaggcccatgctgagctccacacccacagtccccgtttccctcacaggtttctcrgctcccccaggcycctcagatcacggagctccagatgctgcagatgctgctggttctcgatgtagctgtggggagagcggatgggagtcacagggctcaggcccacacttgagttcccatgcccacccacttactccctcacaatacacatgcacatgccacatgcacacrcatatgcacctgttcagacctgcatacacacttacacaggcgtgcacacacaaatgcatacatgtgcacagagacgcacctcaagtcacacatgcacatgtgtgtgcatgaacacacaagcgcacayacatatggatccccacaccctcacacatatgcacattctcacatacctcttgcacacatgcacacacctaggtatgcacatgcgcacacacagaggcataagcatctgcacagatgacgccatgcacctgcacatgtgcctgcaggaacacgctcacccatggacacacagaaacaaagctcacgtccatctctcacgtgcacacacacaagtccattctcagattggtgttctccttttatatcaggcatccctggcacacactcatcagtgggaggttgtactgaaacacttgctaccacaaaaggccaaggcttatccctgccactgccccacccagcacagacgaagcctgtgctcatgcaaatgtgtgttcccaaacgtgcccgcccaagggccactgcctggtctcacctgtactacacacacacacagacatacacacacacacacacacacaaacatctctgcacccccatagcctctggcccctcttcacacccaagcagcaacccctactccaccgaaacctcccctaccatcttttcagcagatcaagcaagagtcttacaggctatcagttagggaccccaaggagggacccaggaaagaggagaggagcaatgagaggaggcagtcagagtgtcgaggaggggagaagaggcacagactggctgacttacacagcaagagagagagagagagagacagaaagatggaaaggctcaacgaggagggtgggggcagacgggcagaaaaacaaagagagagtgaaacagagacactgaaagagaaactgacaggaagaggtcagagagatagtgacaggcaagaaggaagacagataaggggagggagacagacagataaggacagagagctacagaaagcgagatagacaagaaagaaagaagaatgagtaggcattcggggctaggggacagctgacgccctggggcctgcctagctgctggatccgacataccagggagttcctgagaactcggctgccctgtagtgacatgttagtgtgccccccccaccccaacaatacacatgccaggggcccctgactcactgacggttctcagaactctccccctctaccctctaactttccctaacttataggaaccaggaccagcctaagtgacccctcccttcctcctttcctcccttcccagccttggccccaccaggacagccaggatcaggtcctaagtttccctgtggacttagtagaggcctataaagtaacctccactgactccgagggaggccaagtccctattctacccaccccccagcccctgcccagagggtttcaagctgtagggacccagggagggggtgagaatgcagtgggctggcagggtgtgtgggagctgtcaggccagcgtgctcaaagctgcctcaaagctgcctcattcgtttggattcataatcaatctgtctattcgagtccattatctcctcgttagctctgcgggtgagtgaggagggagggggctgtgcaggcagtggggagggggrtgtcaggctgcagccccacccagggggacatctcagctcaccaccctacatgcttgctagtccccagttctggcctgtccactccccctaccactcccatccctaccctgctggacccacttggggcttggaaagagttgggaaacacgagccctgatggggagcactcaggagtctggaccccaatctgaaggcccagggtgatgagagaactggactaggactggcaacctgtctctcatgccccctcccatcatgcagagacctaggcctagaccaagacaaggccatctcctctactcctggtctccctagagctattagagagagagattgagtgccttcccgttaattaccatgagatacccaaggaactcagtgccaattactgcaagctgctcaagtaacttccagacagtgatgatcctcacctcggataccttccagcccatcacagcacaaggccaaggttccttgtccaccctcgaaaccccaggccacaggaggaggattttctagcagttctcccctcttctagatgtcttgctggccatgatagccatatgtaatattcaagtattttccagccatcaccatatgatgcctgagtacctccaggccagtcattaccgcatactcccakaggtttcaccagctgctaaaaagtacttgagtattttgtaaccaattcctgcagaatgtcagagtcctgcagaatgctgaagattcctcccagcttcgtgtaccaaagggaggagggtctctcagcaagggccctgactccccgccccaggtagagagacaaggttggagagggagatgggagtggggagagaaaatccaggagggggtcccatttcccagatccaaatcaacgggttctgggggaaggaatggtaaaaatggaaagaggagagctcaaccactcagctcctcaccgcctcccaccaatgccagccagctcaatccccaattccagaagaaaagctagggttgcctcctcataacaagaaagtgggcgggggctggcttgcccctagaaaaggaaaaaggcagtaagggtgacaaactggggacttctctgctggtaaccatccttctctgtaggacagagcaggggcttctggctgagctccagaaagcgccttctagacggctaggctctctcagacctggtccacggagatttcccccttcgatctccctgaagccggcggcccagctgccctgaacactaggggacatccaggcactgaccataaagcttgctagggcagcsgcggctgcggaggaacgcccgggcagcgccgaaggctgcgtggtgccagccttccgccgtgctcgtcctgcctgaccagcaaacaagcagcgagtccgcgccctcggggcactgcaatgcctgcctgtccccgcgcccccccaccgcccgccggacactcacagctcagtcaggttctctgcgccgggcaggtggtggaggctatccagggccccatcccgggtgcatcgcagtcccgaggagccgtgggggcagcaggcatcggggcagggtgcggcgcccgcagatgccagtatcagccaagccagcaggctgcccggcyccgcagcccagctgtgccagccaagctrcccgcgccgtccgcctcgcagcatcgcggcggcgcccgcctcgctcaggcggggcagccgtctgtgcgctcccagctgcagctgccaggcctcccccgacatgtgcgctgggcggtgttaaagacccagccgccaggaaagggcggagccagcggcccccgcccggccccgccttgcccctcttctccacccgcttcctactctctgacgcccccmcctctgccccctcccctgttaggggcccccagcgtcagccttctccccgaggatccgcctcagctccggcagacgctgaggggccgcagcagaacgcctcggaggtgtctgctgaggccggaggtgggaagctgatacgttatttctctcagcttaaagcagctgcatttttacatttggggaggagggaagatgactgcgttgaggaaaggttgctgtccaggtcatcctagccagccccaggctcagcgctccatcctcgcggcgcgcgtgcctaggggagtgagcatgtcacttggagtaagttaggtagaacrttctccgaactctaggaagaaaacgaaaaggactaccaaaggatcaatcgcagaacctggggaggaagacacagacggggcagagaaagggaaggggtcgcctaatccggccgaagggagtccggagagccaagaccgcgcctccaagagaagccacagggtggcgcgagaagcccgcgcgcaaaggcgcgagctccccgcccgcgctgggtgcctgggggtgcgatctgcagcccccagtgagcaacgcctcaggtctcagcttcagtccctgaccccggccagccagcgccggccccggggcaggatagggcaaggcagggcagggctgacatcgatcgcctccctgacaagagcatcgatttattcgtgaagaaattaatagatcttctcttagctcctcggacgcaggagccgcccgcgggtggagctgaggaccgcgcaccttggaggccgagcacctggaaagcyccgggatccccagcacccagggcagcagaaggctggtcccaacccctcccaccgcgcaagcctccgtggctgcactaacccatccgtctcaagctggggagagcgaagggaagaggggtgtctcttggcggggagacaggcaaggccccagggagcggggraaggacgacctcctagaggctcacggttctctccgccaaggccccagcacggatggccccccaagtccccgagacagggacacacagaccgaccgagcagcctgagctcaagaaggtgaccagacggaggcagagccctacacagtgatcgccttcttcctcgggatcttggtcagaaccaagggactaggcggtgacggagcctggcgctaaggggtctccaaagaggacaaggaggcctcctaggaggctgagaggggctcccagaggccaagggctgtccacgttctcccgggtcgaggctgccagaagttaccccgcagatgtcaaggcaccgggaagcagaatctagacacagcgctccccagaagcccgggcgcgctggctgcccctccggcggtgcagccccacttggaagaagcctgtggtggggacaaagggttggcgggagccgctgcagccgcagcgggatttgaggaagctcagttcttggcccaccctccccccgtattttggccttatttccccaacagacctgtcctcccctcagttgtcaggctaaatattttgacttggcgggaggggtggagagaacggaaaggtccctgcgaaccaatctgtttaggcggggggcggggagggcgggagctgggcgcggcccctgcgtgccggccctgggaaggaccgcagccagcactgtcagctggcgctggggggccgcgcgcccggagggatccagggagactctccctgcggagtcccacgcgccccgggacccccgctgccctccttgggagcggtccccagcctgctgctccgccctcagggttggctggcctctcggcctgccttttgctcagaaccctgtgtcattttctccctctggaggcccgagactctccctgtcactgtctgcatctctgtccccatctctcaatctcatgctgagtctctctgtctccaactgcctgtcactgtctttgtgtctctgtgactctcatttctttttttctgtctcctgctgtctctgtgtgggattccttgtctctctgcccctgccctccctctcctatctgaaccctggtctctgtgtcccttagggcttatcacaccgttctccccagagtcaccgggaggagagccgggactggacacaagccagggctgggacaatggcagtgcctagtctgtggccctggggagcatgcctrcctgtgatcttcctctccttgggatttggcctggatacagtagagggtgagtccccagaactggctcccagacccctacctccctcccagccagctgggaggccaaaaaactgagcttgcagccacagcacctccacttactctgcactggaacatgggggttggggttagcgctcaggagaactgcccagcaggaaaagcagttagttccccacataaaggtgtttttccctcagctccctcagagatgagaagagcttcaaaacgtggacaagtagatatcttccgtccctactagtgaaactgtgatcccagtgaagcttgcctgaaaacccaaatgaggccgtgagagtgttagaagtcatctctagggccactgaatgggaagaggcaggggtgggataggtagctgagaaccaggcaccattaagtaatggaggcaatgttgccgacaggaaactgcagctctgagaactaagggtaaagctagactgggtcctgagctcctgcctccagggccctgtcctgtgtccccsctcttagggcccaatccctacagggaggaaggctggttttgggggaagactgctcttcctcaacaccccagggcctgtcccccaggctagatactgcccatcagtacgttttagagaggaggggtggggggactatatagactaaatgaccctcatggaggtgctgggggattggtggaaagaggaaaaagagctgagggtggaagcttcaaaaagggaaggattaggaggtatccccttccccagtcccaccattcccctccaaactgaagcagctcaggaatccagactctgtgcttgcccragaggtcctatgatgcccctcagactgggggctcccaggggcaggggagtctcctcttcccatggagatgggagagtgatgcaatgggctgggtaggaggtcccctaaagggtgctagtcacagatcctctgtctgtaaggcatagcaccactcccccgaccaccgaaccccctcctcttctgcacagcagatgccagctgggagtgtggttgtcaggacaggagcacatccttggaggggctagtatttgctcaggggacccagatgttctgttcccagtgcagctctgcacagagccaggtcctgagggaaggcaggggttaaactgtgaaggttttagatttgtttttccaaatgactcccatcaggggagccctggagaggcaggggcatgatgggaagtgggcgcctgagagaacccctatctgcctcgcagagcctgattggcttttgcctggaagggatagaagtgttttctcattctctctccctcttttttgtgtgtgtatctgcgtgggctcagacatacacacacacacacacacacacacacacacacacacacacacacacacacatacacagctgctgggcagagccaagctcaggaccattaatgacaacagggagaagatgtgaagtaacccccagggagccagccttgcctgcccacctctcttaacaaactatcaggaatggggcctggatagcgtggcatgtggcatgtggtgtttgtgataacaccggagggctcggtgggaagggaagtagaggctggagacgttagcaggagctgaatgtcaggctgaaacattcagacttgaatcttctgcagtggggagccacggaaggtcctcttgggagcaagagagtccagrgagagaaagggaagtggggcttgggccctagtgaagaagcgagacacacccaggtccccaaggaaggagtgaacttgggatmcagacatycattgtccatggttcctgagtgcccagtggttccagccctggactgggcacaactgggggaaagcagagctgactaacaagggtcccaccctccttggagggggtgacagagatgtatacaacaattttggagccatgcccccaggtaatgtgatgtgggcgctggactaagtgtagctgagcctaaaggggaagtgattaactccaggccagagggtcagggaagaaaggtctgacccgagaggctgaaggacccttctgaggctggatgcattagtaaggaatggtttatctacaccctacaatgtcaggctgaggaactgaaacttgaatctttagcaatggaatgtcctttcaagagtaatcaaattaattcagggaacaggcatctaactcccttaagactgggagagacatgggacctgcaaagctcagatcacttcttcgcagtcacagaattcactcattcattcattcatcaaatatttattgagtgccaactttgtgccaggagctattggtatagccactagggtacaacatgaattatacaaatatccctgcccttatggagcttacaataaacaaaatatatctatttctataaataaatatctatgttaatatataaattatattttagccagtgttaaaaataaatatatggccacgcatgatagctgatacctgtaatcccatcactttgggaggccgaggcagagggattacttgaagaggccaggagttcaagtatgcagcaaactatgatcctcccactacactctagcctgggcaacagagtgagamcatgtctcaaaatattatacacatacaaacacacacacacacacacacgcacattagtcagtgttaagaattatagagaaaaataaagcagaagggggagtagaaagtgtcacaattttatttattttattataattatttttagacagggtctcactctgtygcccaggctrgagtgcagtggcgtgatcacggctcactgcagccttgaccttctgggctcaagcgatcctcccacctcaacctcctgagtagctgagactataggtgtgcaccaccatgcctggctaatttttgtatattttttttagaggtggggttttgccatgttgcccaggctggtctcgaattcctaggctcaagcaatcttcccacctcggcctcccaaagtgctggaattacagatgtgagccactgcacccagccagtgaaaatagaagtcaattttaactaggatgttcaggccgggcgtggtggttcacgcctgtaatcccagcactttgggaggccaaggtgggtggatcaattgaggtcaggagttggagaccagcctggccaccatggtaaaaccttgcctctactaaaaatgcaaaaaattagctgggtatggcggcgggcacctgtaatcccagctactcgggaggctgaggcaggagaatcacttgaactcaggagatggaggctgcagtgagctgagattgtgccactgcactctagcctgggcgacagagtgagactccatatcaaataaataaatagatagatagatagatagatagatagatagatagatagatagatagatagataaaattggatggtcagagaaggcctcattgagaaggggacatttggccagacttaaggaggtgggcaagccatgtagagggaagaggattctggccagaaggaacagaaggacaaagaccccaaggcagaagctttgctggcttgttatagtagtaaagctcctgttayatataaggaaaagcaaagaagtcaatgtggctgaagatgataaaaaggatgaaatcagagaggctacaagggctcaaactgtgcagggccctgtaggctgtagtaagatcaagagagatggaagtcayggggggttataagcagaggagaaacgtgatccatctgtgttttgagatcactctggctgcagagtggagaatggcccatagagggacaagggtggaactggggagacagtttgggaggctatgactgtcaatccaggggaagatgatggtggaagctgtgaaggtgttgacaagcagttcagatcctggacatattttaaagataaacccacaggayrtacaaggtgaaaaagaaaggtgttaagggtgactgcaagaatgaagtcgctgggagtcgcttgcagtcgttgggagcctgactgcaagaatgaagtcgctattaaccaagaaggggagatgggcttgggagagaggatcaggagttcatttttgcctgtgtggctcatctggtagagaccctgcaggctgcaggtgagccctccggggcccaggaaggaggccaccccacacccagagcagagcccggctcctcactcattgtcctactgccagtgtggctcccctccaaagctgccagggctggatggggaatttggcctgggctgtactcaatgctgcgtgccgtgtatgcccacagtgtgccccagcctggatattcgctcagaggtggcagagcttcgtcagctggagaactgcagcgtggtggagggccacctgcagatcctgctcatgttcacagccaccggggaggacttccgcggcctcagcttccctcgcctcacccaggtcaccgactacctgctgctcttccgtgtctayggactggagagcctgcgcgacctcttccccaacctagcagtcatccgcgggacgcgcctcttcctgggctatgcactggtcatctttgagatgccacatctgcgtgacgtggcactgcctgcacttggggccgtgctgcgtggggctgtgcgtgtggagaagaaccaggagctctgccacctctccaccattgactggggactgctgcagccagcacctggcgccaaccacatcgtgggcaacaagctgggcgaggagtgtgctgacgtgtgccctggtgtgctgggtgctgctggtgagccctgtgccaagaccaccttcagcgggcacactgactacagatgctggacctccagccactgccagagaggtgggcactggcacagaacatgaatgtagggaagggagagagcagggtcacatggggctgggtggccacaggatggtgtgggtcagtactttcagctgccactgttttttaatcctcactcatcctatgaggcaggtaaggaaactaaggctcagaaaagttacgtaaccaatgtggcataagacagctaaggggtaggcccaaggcggcatcatggaataggtgaaggacaggttcaaggtgggcatggggggaaaagaataggcatgaacagagagtaggcagcgcaagaagcagtgyggggcagtggctaagtccaaagccagaggacctgggttcaagtctcagctctaccacttactggctatgttcacttagcctctctgtgccacagtttcctcagctgtaaaatgatcattgggtgtcatgaggaatgagttactctacaaagtgtcagagcagggcctgggtcatggtagcagttctatgttcctaatcagagtggccacagcacagtgatccagggtcagctggcaatactgtaatgggaggttgaggttgggggtgagcaggagaagaaaggagatgatcaatgaagaactgaacaggtgagagcaaagatgtaaggtgggacctttaggatgatgcaaggagaggaaaaaagcagtagagaaaggagaaaggaggaaagaaaagggatggctggtgcaggagtaagcaaaacgttataggaaaggaaaagaaaacctttcagaggtggggagcagatctggggtcccccaacctggtggtcttttccactcagctcctggaggtcagctcctctcacccccagcgcctcagcagcagggcgggcgggagagtaacaagatccctgctgtatcggctgcaccccacctccctgatgcctccctgttggctgtaaacacagctgctgcgcatcctctcatgtacagtgtcaacacgacctggctgacccctaccccacagatcgctcccatagccagccagctaccactgtgcagtttctaggcgattgggcctccagctccaaaccctcccactgctgcttggagccacctcctgcccagggcagggagctgaggtgggggcggtatgggcaggagcatgggtaaaacgacagatgtcggcccctccctgcacacactcccaggcccctgggcctagctgctcaggagaggctggcccgctcaccctggcaccatgcccagccatgatctgggcaccaggcctagataggatagacaggacagcaggctggagagcaacaaccctgatggacaaggtcactgctctgtcctgagctctgacacccccgactaggcactgtgggaggtggggagccacagacggccacagtccttgtcctcaagaatcccatcggaggggaacagagtcggcaaccagtgtcatctgaatgggagggacctgggtgcagattgagtgtcatcccaagagaaacagggtggggccagcattggaaggacagccaggactgagggggcatggccaacgtctaacacaccactctccccacagtgtgcccctgcccccatgggatggcttgcacagcgaggggcgagtgctgccacaccgaatgcctggggggctgcagccagccagaagaccctcrtgcctgtgtagcttgccgccacctctacttccagggtgcctgcctgtgggcctgcccgccaggcacctaccagtatgagtcctggcgctgtgtcacagctgagcgctgtgccagcctgcactcygtgcccggccgtgcctccaccttcggcatacaccagggcagttgcctggcccagtgcccttctggcttcacccgtaatagcagcaggtgagtgtagggagggtggggggcaccctgggagcagtgaggaggcctgaggaggcccaaactggtccaaggctcaggacatctgcttgctcctgctagcatattctgccacaagtgcgaggggctgtgccctaaagagtgcaaggtaggcaccaagaccatcgactccatccaggcggcacaggatcttgtgggctgcacgcatgtggagggaagcctcatcctcaaccttcgccagggctgtcagtacctactttggggccacacccctcctcctggtcatacccttcctcccagacacaacccttacaatgacccaactcagcacaattttccatcatcctgggtcccagtcctgagggcccaccttcccggggcccccattcagcccccttgccccacagacccatcaccttccttgctcctactccagccctgtcttcccatccctagacaacctggagccacagctgcagcacagcctggggctggtagaaaccattactggcttcctcaaaatcaagcactcctttgccctcgtgtccctgggctttttcaagaacctcaaactaatccggggagacgccatggtggatgggtaagggttaggcctctgaccagctccttctattacactccttcctccaacactcccagaacagtggtgaagagaatgggctctggaaccaattttgctactcactaggcgtgtgactctaagtaggttaacttctctggtcttcagttttctcatctgtaaaatagggctaatataacattacttacttctcaggactgttttgaatattactcaagttgttatgtgtaaagcacataaaacaatgcctggaacacagtatatacartataaattacagtcacatataactctataacagttggctataattgtcatcatctggtcctgtcagctgcagagcaagactgcctgggtttgaaacccattcctatcatctgccagtcaaggcctacctataatgtagccagcattttttaaaataaaaagaatgagccaggcacggtggctcacacctgtaatccctgcactttgggaggctgaggcgggtggatcacttgaggtcaggaattcaagaccagcctggccaacgtggtgaaaccccatctttactaaaaatacaaaaaaagtagatgggcatggtggcacgtgcctttaatcccagctacttgggaggctgaggcaggagaattgtttgaacccagaaggtagagattacagtgagccgaaatcgtgccactgcactccagcctagggcctgagttacagagagggactccatctcaaaaaaaaaaaaaaaaaaaaaaaaaaaaaaagaatgttttaaattaccatccaggtcgggcackgtggctcctgcctgtaatctctgcactttgggagggcaaggcaggaggatcaccatgcggtcaggagttcaagaccagcctggccaacatggagaaaacccatctctactaaaaatacaaaaattagccaggtgtggtggtgggcacctgtagtcccagctactcaggaggctgaggcaggagaatcacttgaacctgggagacaggggttacactgagctgagatcgtgccactacactgcagcctgggtgacagagggagactccagctcaaaacatacataaataaataaccaaccaggccagatgcggtggctcgtgcctgtaatcctagcactttggcaagccgaggtgggaggatcacttgaacctaggagttagagaccagcctgggcaacatggtgaaactctgtctctataaaaaatacaaaattagctgaccgtggtggtgcatgcctgtagtctcagctactcaagagactgaggtgggaggatcacctgagcccgggaggtcaaggcggcagtgggccacaattgtgccactgcactctggcctggatgacagagtgaggaaaaaaaaaaaaagttaccatctagtcatctagtctagtggctctctgtggcttctcatgtctccagacacattgcatgtacaccgagagtgtccacacctcagctggaaaggaatggcccaggctgagtactactcctcctggtgtctccaaagcctccagagtctggcacatagcaggtgctcagttcaaagagagtcgagggaaggatgggggcagggaagctgaggaccccatttcactgatgaggaaaaccaaaagatggggtgacttggcagacatcatactcctggtcagtggcacagagtgggtatgcacgaatgcccccggtgtgctggtgtgagccagccactgagtgcccctctccccgggcccagcaaaacccttccaggaggaacccataagccatcccctttcccaccccctgcccccacctccccgcagagcaaggtcccctggcctcccccaggaactacactctctacgtgctggacaaccagaacctacaacagctagggtcctgggtggccgcggggctcaccattcccgtgggcaagatctacttcgccttcaacccgcgcctctgcttggaacacatctaccgactggaggaggtgacaggcacgcgaggtcggcagaacaaggctgagatcaacccccgcaccaacggagaccgcgccgcctgtgagaccccaaccccagtgccggtggacacgcggccacacactagacacgcacacccgggggagggagaaagctcgagggggacactctgagaagttctcctcagaggtctcactgggaatgggatgccgcggggtcagggtgggcgctcaagcagctggcaggcgcggttgcgagcaggcccctcgccccacccaggccagactcgcaccctgcgcttcgtgtccaacgtgacggaggcagaccgcatcctgctacgctgggagcgctatgagccactggaggcccgcgacctgctcagcttcatcgtgtactacaaggagtcgtgagtgccgggggcggggccggagcgggggcgggaccggacgaggccaatttcttcgggaccacrggcaggtgagggcggagctcagcgaggctatgaagacccaggaagccaggacccgcaagttgtactccgtggtagggcccaggtctggctctcttccctcaccttcttcatgccttcatgcctcggtttcccctcaccaagtgaaatggagaagacagggcttctgagagcccaggagagccatcctgctgggaaggcttggatcattaaacttcacttcattatgctaatgttctacactgaccacacgctcctgccccagcagcggtttggggagcgcccactaatttggccagttttatgagcagctctgccagcatttcatttaagccttaggaagggagggagcaggggccgccagggaccacagctgctcttttctttggagagagtcaactgaccctaacaatgaggatagtggttagaccacaggaaagacttctccaaaaacacggttaggaatcaaaaggagatatccttagaggagggaagtggatttcagatgcaggctgggaaggcaggagtaaggagttcatgctctctctctctggtagatattatagaagatggaggccacctggcttagaagcatttcctgtgaattaaaatggagaggacttagctgaccactggctcagggtctggcttgggaggagaaaggaaggaagtcagttgtaggagacccactcaaatggccgagacyctcctaggtctcagtggtaggtgaaggtctccagcgtgggcagctggagagtttgttaaatacagattcctgggcctcgccccccactgattctgattcagttaatcctgagcagggcccaagaattcacatgtctaataagctcctaggagatgctgaagctgctggtttgtggactgcactctaaggagccctggcatgactacagtgtgaatctcccccagctccccggcttgtgcacttcacaatctgcacaactatacacagctgtctctgggctcaaagagcasagaaccttgggaacccttcaacaagcttccctaacatcactgccctgcagcgtggctgcagctatgctccctcagagacacacactgcagatcctgcccaatcctgactccaaacagacccagacctgctcagtgtgtcatgcctcacaggacacctgctcccatgacacccactatgagcccccacccccccaacctgctcctggactatcctgcttataggtcccaacaaaggcaggcacttyccgctgggccacaagttcccccactgccacccaatttgacctccctcaagttttgtccctggctcagcatgaattccatcatccccttcccagtccaaagaaacaaattatcatgaacatcaatgtgatgttccattgtctcccatggtctgttctgctatctcccatggggkgcccactgtcatctcccccagggagccctcttctacccctaaagccagtgatgcttccccaagccctgccccgaaactggccttcaggcagccagcactagttgyctctggccccttaatttccctgtggcagtgggtcttggccttttagggtcatggacatgtttgagaagctgttgaagctaggaacactctctctagaaaaacacacatgcacaaaactttgctatagtttgggaggctcataaacctccaaagtcaattcaagggcctaagtgaagacactgggaagggagcagtctcctgttcctcgttccaggcaattagacttaggggaattaggataaccttattgcttgctgtttctaggagaggggactctttcacacacactttcttgttttatttattcaatgcaagattttttcaatattcattgaaactagaacttgatattccctgctaaggatgaggagctatatcattacaaatttcactgacacagatatcacagtccctcccctcctccgcccccccttgccaaggtctaacaggtggctggagtcatggctttgccctcatgcatactggaaggacaatgacagtcctggggtgattcagagcgggggtgccagaacttgagggtggggttgaatgacccctcagctctggggatgggtgttcagcccattccagaacgccacagagcacgtgggtccagatgcttgtggaacccagagctggaacctgctggatgtggagctgcccctaagccgcacccaggagccaggggtgaccctagcctccctcaagccttggacacagtacgcagtgtttgtgcgggccatcacgctaaccactgaggaggacagccctcatcaaggagcccagagtcccatcgtctacctccgaacgctgcctgcaggtaggcatttggagggtgcaagagtcagtcagacgcctgcatccatgagaacaggggagcacaggcaccagaaatagagaagccggggcactgaacacctggcccacagaggctggaaggccagatgcttgagtcctagaaagaagggggagcatttgcctaggtccttgcggggctgggattgggacagtccggggtcaatagctgagggaactgaagggcctatggcagagaaggggaggacagaaacaaaacactgagttctaggaagccaggggtgaggatcacctattctttgggagaacaaggctgttggaccccagaaaggagggctcattactagatagtattcaggaggaagacccacacccctgagttgcatccttctcrcactcctagctcccacggtgccccaagacgtcatctccacgtccaactcctcctcccacctcctggtgcgctggaagccaccgacccagcgcaatgggaacctcacctactacctggtgctgtggcagcggctggcagaggacggcgacctctacctcaatgactactgccaccgcggtgcgcagggacgacgcgcaggccggccgcggggcgggtggggaaggggagatggaggcgcagggccccggcaggtgggggggatcagaggcgggtagaccgcctgtcttactagtgtcttcccgctgcggcgccaggcttgcggctgcccaccagcaacaacgatccgcgcttcgacggcgaagacggggatcctgaggccgagatggagtccgactgctgcccttgccagcacccacctcctggtcaggttctgcccccgctggaggcgcaagaggcctcgttccagaagaagtttgaaaactttctacacaacgcgatcaccatccccatgtgcgaagagcgcgcgcggcctgggagggtctgatgagtggggcctgtgaggggcgggtcttgcgggaggggtggggtttgtgggtggggccttgcttgtgtgggcgggtcccgggttgtgggtgcttttggaggcggtacgcgctgcagagggcacaggggtgcatccggacaggcctgatagggctactcctggcctccccagatccccttggaaggtgacgtccatcaacaagagcccccaaaggtgagcaggactagggcaggtgctgaggggcgtggctttgggggctgggccttsgctctgactcgctctccccagggactcagggcggcaccgccgggcagctgggcccctccggctggggggcaacagctcggatttcgagatccaggaggacaaggtgccccgtgagcgagcggtgctgagcggcctgcgccacttcacggaataccggatcgacatccatgcctgcaaccacgcggcgcacaccgtgggctgcagcgccgccaccttcgtctttgcgcgcaccatgccccacagtaggtgatccacacacacaccttctacccccatcaccgaccccaaggaccctgtgcaaaggtttggggtttgacttctcgctaaccccagagcctcgctttgcttgcccctctcagttcccataatcccaaagctttccccacctcccagctcagcccagtttagcytgggtttgaacataaggtgagatgaaccacttttggcccggctgctggatgccccttcccgcaggagaggctgatggtattccaggaaaggtggcctgggaggcctccagcaagaacagtgtccttctgcgctggctcgagccaccagaccccaacggactcatcctcaagtacgaaatcaagtaccgccgcttgggagaggtaggtgcccgtgggaccccygtcccagccccgttttgtgcctacatcgccttcccagccagctgttctgcgttactctcaggaggccacagtgctgtgtgtgtcccgtcttcgatatgcgaagtttgggggagtccacctggccctgctgccccctggaaactactctgccagggttagggcaacctcactggctggcaatggctcttggacagacagtgttgccttctacatccttggcccaggtatacacagcctctgtcacagacctgtatcaccgaacagccctacctggtccccagcccaccacaggcccctcccccgcatccctccccatcctcacctcccagcatggaaagagaagcatgaccttccctctgacttctacatctttgactctaccctctgctgccctctgactgccagaggaggaggatgctggggggctgcatgtcctcctcactgccacccctgtggggctcacgctgctcatcgttcttgctgcccttggtttcttctacggcaagaagaggtgatgataagtcccaccggtccccacccccttttctccctgagccctcatcataaagtctgtcaaagggaggtagatgagacagtagaaagacaggtcttccatacaggcagtaactcttcccctgcggtggcacagaggaaacatacctctcagttagggtgaccaactcatcccggttagcctgggactttcctggttttatcagtaaaagttgcacatcctaggaaacctctcagtccagccacactgggattgttggtcaccacactctcacaccacctgtcaggtgtgagagtttgtgcacccaagctgaraaataatagagctgtcccttattaggagaagaagcaggaggcctggggatgtgttccagaatgcctgatgtcagatccttccagggctgactgcaagaggaaaatggggctggacctcgatcagcttggctatagggactagctgacagggcggaagcccctttactcctgtgtcctccctattccctgttagatcccaggaatagggccaaggccaacttggagggtacttagggatccccaggagtcaccctgaccaaggctgggggtgtggtcagtaacttccctcctccttgaaatgtccttcttccttcttctgatgttgctcattccttcctgagaacccttccagcctgaccccctcacctcccgttgcagaaacagaaccctgtatgcttctgtgaatccagagtacttcagcgcctctgatagtaggtctgggagtgggtggacaggtggtgtgggaaagggagacaggagaggagcagagacagmcttccagaagaccttcttgcagaagatagccttgggacaagagcccttcagaagaggagaagagaagttggggggtgaggtgtggcagagagcagcatcctcgctttgtgaccctccacctccttgcagtgtatgtccctgatgaatgggaggtgcctcgggagcagatctcgataatccgggaactgggccagggctcttttgggatggtatatgaggggctggcacgaggacttgaggctggagaggagtccacacccgtggccctgaagacggtgaatgagctggccagcccacgggaatgcattgagttcctcaaggaagcttctgtcatgaaagccttcaagtgtcaccatgtggtaagggagagccaagggcattgtcagggtcataattagtgtaaaggtcatgtggtaagaaagaaagggtcagagatgaggttagggcaccattaaggtcaagattgggaccatggttaggatcctaattggggtaaaggtcatggttagggttagagtcaaacagggtcatagtagggccactgtagagtcatggctagggctgagatcagtcatgattggggctcaatattgggtgtccagatcattattagagtcctgattgggctcaaggccaaagttggaccaagttcgtgactgtgatgatcatcagatatgatgaaggtcatgggttagggtcagggtcattgttaggtcaggagtcaggttatagtcatggttggggttagggtcaggtttggtgtctgagtcagactgtggtcatagcagatcagaattttggccaaatgggtcaaggggaactagggggtctgctaggccctttgtctgtcccaggtgcgtctcctgggtgtggtatctcagggccagccaactctggtcatcatggagttaatgacccgtggggacctcaagagccatcttcgatctttgcggcctgaggcagaggtagggaccaggaagaccctggggagtgaaagaagggttgggcasagtgtgggaggtgggggccagttctggacaggagaccagcctctgggttccttcctcaccagcccccaatcttggctctagaacaaccctgggctcccacagccagcattgggggaaatgatccaaatggctggtgagattgcagacggcatggcctaccttgctgccaacaagtttgtgcaccgagatctagcagcccgcaactgcatggtgtcccaggacttcaccgtcaagatcgggggtacagagggtgccaggcagatgagggcggcctgaaaagtagagagactcccttaagctaggcatcaggagacccacagccctggtcctgacagcctgtgagacccttggcaagtcacccccaccctgtatcttagtctcttgtccaagggcagaggggtttggatgggatgagttctgaggtccattgagcccctactttccagggttcttggtgactctggaggatgagaagattgggagaggtatcccaggggcaggagctagtgcgtggctcttatgccccacacctcctccaccctcaccctcactttccagacttcgggatgactcgggacgtgtatgagacagactattaccgcaagggtgggaaggggctgctgcccgtgcgctggatggcccccgagtccctcaaagatgggatcttcaccacccactcggatgtctggtggggccgagctggagcacagggctccagggatgtggaggcgggatctggggaggggcctggaacacccccatcccttggaatgcactgagtagcacgaagggtgctgggctcaggagctcctgcatgcccccaggtcctttggcgtggtactctgggagattgtgaccctggcagaacaaccctaccagggcctgtccaatgagcaggtgctgaagttcgtcatggatggcggggtcctggaggagctggagggctgtccccttcagctgtgagtcacctcccctgccccttcctcattgttgatctacctacaaccctcccccacccggccccatgattctggctcacctcctctgatgctttgacatccactgaccctcagctatgagcgccacccccctatcccaaacccccaagactcccatttaatcccttctcaccctcccaggcataatggcccacgatccccactcccaccaactgaccctcagtgcaggaggctgagagcgtggcaggggctcccggatgcctctgaccctgctccccacacccaccaggcaggagctgatgagccgctgctggcagccgaacccacgcctgcgcccatctttcacacacattctggacagcatacaggaggagctgcggccctccttccgcctcctctccttctactacagcccggaatgccsgggggcccggggctccctgcctaccaccgatgcagagcctgactcctcacccactccaagagactgcagccctcaaaatgggggtccagggcactgaggggcacctcattccctggctggcctcccatggggagacaggaagggacccgacctctgtggctgagacgcctgaatgttcacccccaccccaactcagggcaagggatggccgagggtggggcagagaacaggagcagggaaggctgtgggggtgggcagaggggtctcaccataggagtttctcagactctgagtccctcgggggagagcaagcagggtcaaagccagaggagtagagatcaggtcagggagagatgtcctgccctcagaggtagggaccccactcagactaggaagagggggcccgcccaccctagaggccctgcccctcagtttggggtctcctctggacaggtagggccagcgacatgtttgaaatcagatgagcaatcagaagcaggcctggggcgctctccatgcatgtatgggaggggggtggggctccacatgactgccttgcttgccactggtttcacctcctcccctcagctccactgaccaggtggcatggggagaacccaggggcctggggagtggttcccarcctgcccgccctcacctcctcctctcctyttgccctgcccagggctccccaagcttggtgctccttcctccttttctccaggggcatcccttggagtacagtcaccctttcttcagtccctcccctcaatgattagccctggatgcttaaggctttcagagcctcatcttcctccctcccctcaccctcacccagccccgcccccacccctgcctctcatgggaagactggagaargcacaataaatgctgaggcctgtttgtaccctggtcccaggcagcccattatctctccatctacatggtgttaacactggatgaacttcctttctccctcctctgggactcgaggtggtgaccctaaggcaragacacgggataaatacactgctgtcaaacaccacctccmtgaggacccgagcagccagggttgccatggcagtgaggcaggacaatcttgctattatctcctgctcaggaccagaagtggttgagcccggcagggaacctttgtgtctagcctccaagcagaaccaaccagtcccggacacctcatcttaatttcaccccttgttatgttcgttatatcggtccactgggtaggtattttctggagtgtcataggacagactttaagtgggcagacatggggcaagggagaggccctgatgacatcacctgttcatgccagatgcccccacccaagccagggaacacacagcagagcagggtctgtgtgtctggcaccctgtggttatcctgggaggccagaatctcagtgttcatcgcacgtgtagagacaccattgaggcatgtggatgttgyacaggagagccagctcccaggcttttctgccagtgccatgagggcatttgaaagggaagggttgcaaaagaatgacttcaaaccttgaygaagggggtggcagcgggaggggctgcccamggctcagaactctttagcttcctgcccccaggggcttggggcatagctgccatgccacacacatgccacacactctgggtctggcgagatgagactttctgtgcacccttgctcacgcccgccagcagttgtcctgcaaaccacagctccctcacaccagagtggagtgggcacgagtctgcgtgaggccgtctctatgacaacaactaccctgttatccccacagggccagggtgggcagcaaggaccacmtgtgtggagccccacccctcccctgccctgcattggtgactgaagcaacagtgacccctaatggttaccagcagaaccgcagctaagggaaaaagttggggagtttgggcttccctgccttctgttgctgggtctctgagaggcctccaggagggtgaaagggtagagagactccacgcaagccctggctctgagacctgcacactcacacagagcacacaggcatgcctgcatttgcacacgcctgcagggcagcagtggggtcaacccctctccccactacctatgccccctaaccctcacagtgccgattgtctggatgtggaagagcttaaggaagggattggaagtcgaagaaaagagggcttcagaaatatgccatcgcggctgcacctgcaaagatgggcaggtggtgtctggcccagaagtacttctgggggaagaatgtagggatgctaggaaataagctctattgctgtccaagtcctagaaaagaagtggatttaactaggtagcaagatagatggaggttggacttcaggagggacttcccaatgctacagggaagctttggagagggaaaatatgtctcctgagagacagttgcagacagacaacaggttgacctggagaaggaaggatgaacacctaccacagaggcagaacagtaaatgcagcgactgaaatacagaaacacccgtcttggtccccctcctcttccccagattcagacagaactccagaaaaaaaaaaaarcctgtagctggctgggagaagacaggtgagcataaaagaagggaatgtttaccatccatccctcaaaactgtccctgtggccttgtggcaggtcttccacccgagaatgggtgctggggactatggatctcataccctaccccctctaagctcaggaacaactgatgcatctttgtgggggctgggagaacaggttggagttctctggggagagaggcccagaggcctgggggaggaggtggaaatggtccgaagtcaagtgagctgtgccactaagccaggcctcggtggcagcaggatgaggttcctcttcctctaggctcacagttattcttcctctaggctctggctacggagcagagagtggttcctggctgtcaccaagtaggaagaagaatggggtacaaggacatgagagctcagcttccgacacctgctcataccaacgtgttttatcccgccccataataccaagctccaagtcccagggagcttggatggaagagtaccaggtcttagatgtccaaccaaggggcagtcctggagtagacactttggaccttgcccttggcccagtgtggacgcactgtggaagctcctcccctggtccatgagctgtttggcatcttctcgcactttctgttgagggctaagaacaagggggatgttagtatgtgaccaccaacccacagtgaaggtcttcctgcttccagccagaggctcccatgcataactcctcaggccaacaccacctgctcccagggttaggactgaagttttggtctcctccaagccctgtgaggtcgattgacaaagtactgacactccctgtccaccccctttctttgcacaggaggcagagagcttgaaccacctggctcatctcctggtcatccaccatgaaattgagcccctctgggttactcggccaagggcccactagtaagtgatcactagggtggcaccatccactgctggagagagtggggaatgtagcatcctcttgaatgtgtgccaaataaggaatccaggtgggcggagctggggatgggtttagagcagatgatacttggtgagcccctggaccctggatgcaaagctgaagtgaagggtgcttggggagccctgggcatatagtgcagaaggtacctggtgagtccctggtacacagttggagcacaaggtgcttggcgagctccagatgcacggtcagatgggaagggcacttggtgagataggagctggagatcaattcctcagctgcagctgatgcctggctgaggcaaggctctttaaaggggccacatggctcagagttctgatgtccttgctgttgaaaagtggcctgatgggccatgggttaagtgttcagagtgggtgtggcgaggggtggggtgaccactgggcgtggatatctggatttccctaactctgaaatatctgcccttttccaaagccaggagatctagactcctgcccaggatcttggctaattgcatagcttgtccagctccagcttagatatgctcctcattcagccctgtgaaatatgctcctcattcagccctgtgaaatatgctcctcattcagccctgtgaaggcagcacatctgaatggtttggcctcctcgacttagcaggcccagagttgcaggcagagtccagcctctcctcaccttcagcactcccaccatgaaagaggagggaggagggaggggcataagggaggcactcacagggtgaagataggactgaagttccaggaccaaaaagtgaggctggttcarggacagagggcattccttcttgcctctctccctaccctgtccttccacacagagggaggtagctgtcaatcaccaaggcctctagatgtcagagggaggacaagaaagaatggggatgccaggtaggtcatgaggagagaaagaaatagagcagggtgtggaagagagaggcagcggtagggagacagcaactcagaaacgtccctatgcacagctgtggaagctctgaggacaccccgggactttttacccagccctgtccctttgatgtctgtgggtgtggcccccaacyctccccacttgtgwacaacagggggactttctgctcmgtcatttctggagatgagacgggtcccatcctgagggcccrctctggctcccagcctcccaggtgtgtcatcctgtgtcttaagcagaactggacaggaggaggggggckgacagacamgcaggaggagamaggggaggacagatgaagcagagaagacaagggtggcagccaggaggaaattctgagactatgaaragggagtctcaagaaaatgagacaaaaaggacagaagttgtcagcaggttcagacaagaaacggagagggagaaggggcctggctagcaaccctccctagatggckgcaacttctggggcatgggaggcacaggtgtgaaggaggcmggggtacctcttttggaagcagaatttcctaggggagagaccttaatgctggaaggccaagagctgaaataagataatggatrcccagtgctttgtaagctataaagcactatacaaattattgtcgttgttatctggttgtgatatcatttacaaagatactgcagaagtacatttagtgacatggaaagatggccaggatgaactatggagtgaaaagagcaggttacagataatataaatgatgccattttttacatttccatgtacaaattcagaaaaaatatctggaagcataaatatgcatctgggtgatgagttgtggatgatttatatcttctttttgcttatctgtattttctctttgtgatttttaaagaacatacattattcatgcagggaaaaacaagcagtttgcttttaaaagaacgaggcttcctgcccagaggtctgggctcaggatgagtgcacagagccttayaggcgccctgctctgtcccctcgctacctgggtgtgtatcgcgggctctgtcacatacatactctccaaggacatttttttcctccatgttttaggctgggacaaagtccattttattgaattcaggattggcagcatgtttttgtagccctaccgtgtcttccatcccaggagacataaaacaggtgggaagyagagaaaagcagacacttctcagagattcctagcaaccctaggcttaccccaagggaggccaatagctctctgtttacaggattttggggctataaaaagtgagggcaccttcccctcccaaccctgtgtggtcggcctctgcctatagtggctcaaactcccaagtctgggttcccacaccctcccatttctcacacattccatgcccatcacctagacgtgtctcctttttccattccttccctcattctctgctcaccctttcctcccagtcgaagtgtggaccatcacaccccttgaggccttccccaaattcttcctcactgggctcccactctcctttctttcccagcctgaaaatacaacc

SEQ ID NO: 10039 - DNA, 115155 bp, Homo sapiens
tcatcttttttttttctattatagtcatttgccttgagtgtgaagtagcatcacactgtgattttgatttgcacttccctaatggctaatcctatggagtawcttttcatgtgcttgatgtacatcttcttcggagaaatgtctatkcagacactttgctcattttaaaaactgggtatttgcctttttattattgagttgtaagagttttttatatagtctagatatgggtcccttacctgatatatgatttgcaaatattttctcctattctatgggttatcttttcattttcttgatggtatccattgaaacacacaagattttaaatttgacttcagtmcaatttatctattttttgttattcatgctttcagtgtcatagctaagaaggttttgcctaacagaggtcacaaggatttactgcaatatattcttctaagagtttaatagtttagttcttacatttaggtctacatttcattttgagtaaatttttgtatatgatgtgaaggagtccaatttcattcttctgcatgtagatatcatagcaccatgtgttgaaaagatgattctttccaccattgaattgcatgcaatygtgtgygtgtgtgtgtgtgtgtgtgtgttcaaattctttgtgaaaagaaaaattacacgagattttcatgtttcttaaactaatctaaaacagataggtcagtgtctatgtcttcttttgagagccaaacaattatacaaatagtaagcatacatcatgctttctttgtatctttcttccctttagaaccctgaattatttggaaaaacagatgtgttcttcacttttctttagttgaagtctatctaaatatatctctaaaaataataggatcatgtttttactgaattgattcataacatggtcctatgtttgtgaaatcccttaaaggaaactttcatatgcatttaygacaggactgcctaatgagagctgcatacgccatttctacataaaaggaaagatttcatgtgatatttactctcaatcatttagacatatcaaactgacacattattaaaactgacaggttttccttgcttcgttgggacttcttggtttttctaaccctktaactatactagacattttcttgttttgagaaggaatgagacggcatcaaccacatatgcatttcattaaagtatctgccttttccttgcacaggtttggctacttgtacacaatcattctcagactttttttaaaaagatacagttttcaagattcattttagtgtagaaaatgagtgccctggatttgccagtcttccrcactcaaatcccaatgaaaccaaaagggctccaatctcattagggaaagctgcacagtaacckgcagagagggtgtctaagcatcttcaagtcagctctttagacctttcttggtactcagggagctgcagcaaatccttactgcagcttcaggtaggcgactgcctcaaacaaaggtcagggtggtttttgtcatctacaagtaactgggcataaaagaattagagagcaaaatcctggacttctacagctaggaagatgcttggcagtaactgcatagaagagatagcttcataytgtagagagaattttttttaaagcttagtcaaccccaaatctatagygttttatttctgccataaagacagtttacatttacagtccaccaccatagttaatagagatagaagtagttgtaactacagcatcgttaatgaagacacagtacataaaatgcaaactttgctgattctctaaattggcgtaaaagtctaaacacaagaaggtggtctttataacctagcataattcaacactaataatcggcataagcttttagagttaacaagatttagattttcctcttaagaaacttttcttaaactatattattaaatatttcctacattctctggagctgcactacctgatakggtagttgttagccacatgtggctgttgagccctggaataagactagtccaaatgaagatgtgctataaatgtaaaagacacactggattttraagactgtaaaagattgtaaaatatctaattaataattctgtatgttgtatagacatgaaatggtaatttttgatgtattgggttaaagtgcattattataattaattttacctgttcctctgtacttttgaatataactaccagaaaatttaacattccttatgtggctcacatttgtggttcactttatgtttttattggtcagtgctgctccagaggctaagggactgtgrctaataaggtaactgcagtggggttccatttgtctgtgatctattatattacacatatttctccctactcaggtgtcatagttcactccatagtgtaaatatgggctcaatacttctcagtgcatatttttgtcttctcatacctctctactgttgaacagtctatgtcctctcctgagaaccycttttcccactttgcctacatggctaattcttttaaccttttaatggccagcggaagcattattttctctgcaaaatgttctctgaactcccttacatcacagccaggaccccaagagaaagatacattctgtcctctggggtatgacagtatgttggccaatatctactgaatgtctrttgtctgctgggcacagggatgggtagctggaagtccccaaatgtgaatgagagggatatggaccctgtgcctgtactgcttgcattctacagtgggatackgacaagcaaawacccactaacaaaacggtttttgaaaatgctatagaggagagatttagagaacacaccaaaggctacagaaccaaaggctagagaacacacccagactacatctttgtggcggagaggtatactgagactgaactaaaggcatgtgatcccacaggaaccctggacgtaaaacartaattaggtgtttaagtatataaacccaacagcattgttttcacatcacaaatgattcaaatgagacttgacttcaaagtacaaattaccaaataggcattcttatattacatataatgcyctagtatccttgcaatgactctgttagccaggaaatttaggtattgatttacttaaaaaaacaaagaacaacaacaaacaagtctccacataattagcatgattaagtgaaaatgaattccacaagaggtgtgcaatttacttaacactcatgccactatcaaaagagttcaggatttcagtgattggatttttgtggggttgagaaaacagaataakaagaagwagtgagcagctttgggaagtcacctaacatacagcagtggactttttaacaacaatgttggagggctggaatattctcggcytgytgggcaatctccatggtccaaaacctggttaagaagtaagaggaatgtatttaaaagatagacttgagtagtccaaatatctttcccaaagtctatgcactaaggtstgtgtgcgccctactccttggtgarcccattagtcccttacccagaacctattaagtttactttagacagaattgtgacaagtgaggctatctggattcccagtcygcactagactggaagttaccmatcagaagatgaggagaatgttagtggcagctatgctagtaacagtaaggacaatagattgtcagttagtgaagggggagagagagaaattacaaaaggcagagataatcactaagtcatagcatcctagagtccttcggtgcagcgactgatagcttttgtacctcctgggagcattcctaacacctagaaagaatatagaataggaactggatatatttactgaatccgctacaacctactacaataattacttttaataaaattaacattgaattatcaagaaaatgctaaatgaygttcaacaaactgcttaagagaaacatttgcaatacattgtagaaaaatctgtataatggttaaaaataattttcataaaaaaagtttkaccccccactaagggccaagctccaattatgctggtcatcattgaattgaaacggtttgctttgtatcaattctgaataaatgatgcactaaaaaacagcagactttattttgcctagagcagattttgaattgtggtatatgcaaataatatggtattatattatatgaggtttaactatataaaatggcaacagattgcatagttcaatcactagggtgatgaaaaataattgttttaaaatgtgccattgccactaaggaaaacattggcactatgtgcccggcactgtgmtgggtgctgaatttattaagcattaatttgaaaaattgctttcactttcaagactgtgacagtattctaaaactctcattcatattgtttaaaggttaagtgaaatttgcaatacacartacagccattacataacaggcacagaatacagtttcatgacttggatagttyttgttttttaagckcattagcaacttcatttccaaatgctatcaaattcttcaggatatgaaaacctacatataagaatggagtgcctcatcggctcatttgtcttatgtaataagtgttttaacacgggcatgccgtttcagaatttcgggtgagactaagctgtactttagcttttttgtgtcaagcaaaaacaatttcagcaacaacactcgcttcccctggtaatttttttcatggcgarttactaaatgctagatgctcaagtcaaaaagaaacctgacatctggggaggtgttgagggggtgttaatagttctagtgagatgtctggggagcgttgaggatacgatttttcaaacagcaaatacaaggataaggggaaattatggtttcgtatgactctctcctccttccactttctcgtttcaccaatctgtggcccccccaatttagaggcgggttcagtgagattaggctgcaggaaaccgagaggctccaccgcgctgccgccccggcctcgtgatgtaattgttatttcttattcggagaccgaaccgaggagagctgctgaagaagtagcagccctgctccttttcccttgtcttgttgggtcagatccttcccggggatgatgcagattggctgacagactccgctggagacttcgcagtgacaaagcagccgaggattaaccctgctcctgggtcctacktctgtccagggagctgagcggggcgctcctcaggtctccttcctagttttcctcccagagtcgctccacacgagtgctgggcgcctactacgtgctgggcgtggggtcaaagtgacccagagttcgcgcccgtgccccccaacattaaagcaggacacacagattacaaggagatagaaattgggggtgggtgggtgaaagggggcccagagagcgcgtgttgtggggtgaaggggaggaggtagacgcttaaggcaggcggggaccctggagcgtctggggcgccccggcccccaggctgtgcccaaacgggagcattcggcctgggtcccaagagcgctttccccggtccccaggaggagctgtccaggcgcctgcagcggtcgcgggcggctggacagagctgggagcccgggggacggcccgggcgcgccgtgcagcccctctctcggggacgcggtcctctcgctgcctccgggtcttgcagccccgtctgggacacccggagagcaggcgagaaggaaatccacgaaacagagggggttccgcagctcctgtgagccgcccggatccgcgcggcttcctcctgaccgggtgacaatgggagggagggggagaaaagggttaagaaacttggctgaagagctgaatggcgtggggcggcgaggggagggactgggccgcggcggactcggcggcggagggaggagcgcggctgcgggcgggcggtgagcgaggcgctcaaagtcagcctcgcagacattgcagcagagccccgaactcgggaggcggcggcggaggaggcggcggcgaggcgcagggacgacccggccccacgcccgcccgccacccgcgcgcgcccgtccgcccgtggcctcgcgtccgccgctgcgccgtgagcgccgctggtcggagggaagagctcgccggggcgccgggccaggacggggcggcaggcgccttcgcggaccgagcctgacggagccggaggctgggagccgcggcggcctggggtgagtgacggccgcggccagggcgccaggagtagcggccgccggcgccgccggaaacggcccgggagcgcggcccgcgtcggctctcgcttggctggcagggccgcgggggcgtcggggcggcggggagggcgcgtttccggggaaatcctgcctctgctgcctggttcgagtctccgggttctcgcggggggccggggcggcgggccggcaagttgtggagtggccccgggtcggcccgcccgtccgtgccagttctgggcaagggggcggccgtcgcgtggcccctgagcggggccggactcggggggccgggtcggggttgcccccgctcgcttgccctctcggtcccgaaccccgggcaccgctcgcctcgccgctctccgtcctgctgtccagccggatcctgggcggcgcctttcgcctgggtgcctccctgctccttgctcgctggatacccggctgggaaagtgaataggaaaagggacagctcgcccggcccccacccgaccccgggccgctctgcccgcactcgcggtcccctcccgatggcgaggctcacggacccgaggcctcagccatcattttaccaggagccaggggccggcccccatttagggtgagcccggtggaagtccgggaggctgccttttctcccttcttctgtgtccaccttattacgattgaatattgttttatgaaggtttccgtggatgtattctgcagaccctcccatcccttccaaagtagtttcccaattttgatcaggagttggtgttcagtcagaaggaacaaaggaaccaactgtrtcttagaggcggacaggctgggagtctgtgacacatgttgatctctgaagcattccaggagtttctaccttttatcacgtcaataattggctgctgaaggtagtaaaagaagtacggaatgataagcacttttgcgttttaaaaatattttttaatggcacattttactttggggaaaaaagacgttcttaggcacaaggatttttaaaaacccagttggtggaactgagttggagtttgtttctggtattgtaaatgattacatgtgggattgtgaaggaaattgtgtccttagaggaagagaagccatctgtaggtgtccatagtaaaaatggttgtcgggttatatgtgatgaatgctctttctgtttcttgggggaatttgtgaagcaaggggcttcggtaattcattctttaaagttatgaattgcattgaacctgcttattagtgaatcataggtttagtaagtgggtggcattattcagtgtttaatcatcagttttccacctttgttgaagagacagtgaaataatagactttttaaacaaatggtgtttcatctgcctggcccctaagtgtcggttgccgcctggagtatgttgaagtgtttttcaccytccaagtaagtgagttgctctggttttgcccggcagttcggtaacgtcgatagggtttatttggttcagggagcactggcttcatcacctacagtaactttttttctgcctgggcatagttcctagagacaaagaaggagaatcaattagtggagcggctactgccctgcaggttgtaggattggttgttctagtctgtttcatactctggtggagaaagacctctttccaaacttacctttaaaagtgccctaggagtgtgagtaaaatatacatcagaacataacagaaaaaaaaaaggactgttcgttgttgattttattcaaatgagttagttgaaaaaccaggtttaatgcctgtgggaagttagttgaaaaccaggtttaatgcctcttttacatgcatttctaaactcygcagaacttggattttgctaattttaacaccctaaaatattgttaactttgcactaaagaagtgtgtgaagagactaaaggcttttctgactcttgcagttataagtgcaaaacatcatgataaaaaataacctataccaccacctagagtctgtttgttagtttattgctcatgaagtttgcttaaattgacatgtctgttacagttctgatatagtcgaaaatgattaagaagtactagctttcaaaagcccgtccaagagaacaattatttaagtaataaatagcaagtgccactttaaattatccgtgccacctttagaattgaaaattatgacatatcaagttgagtgggctattctccaaaagatgttaattcagaagattttaaaacggagttttcagtttgtgcgccaaggcagttctgattgcttaaagacttctgcgttgttatcagagattcaagaaatcttcccaatcagatgccattagaactttttgaagtccagatgaaacaaaagcaaaaatacaggagagcattacaactacagaaattctggaaattcagaagttaagagagaacgcagcccatgacagagttgtgattcagagatatgaagagtaaaatcaatgtgaattaaagtgataatctgttttgctggtagtttatatgtggtaaagcagtctattaaatgagagaccttagggaggcagctttgttgccatgtggcttatcacattgtccatggargaagtaatgttcctcctttaagtggtgtagcctgagagaaagatgkcctccaagatctttaattaaataccagttgaacagaaagaactagagcactgtattaattctgtcaaacatcactattttagaacattgaggacaactaaaaatgaattaacgcatatctgaaagcagagtttgatagaaggtgacagatgaggcaaaatatgccaatctaatggaacaaataagataaggagatatgccatccttgactctagaaagatcagagggaagaagattattgttaattgcacagattctattgcagaccaatgctagaagacaatgacatagaagtaattttaaatcagagtggcttargatatatgargttaaaggaatttggcttttaattttaaaacgtaaagaatgtaagaaactcaaaagctcatgttctaactgttgtttgggaaaagcagtaatagtttggtgtatcaggttaaaagataattttgctcagaatgagtttaaaataccgaatttttgtcaaggaaaacattattcactttaaattgtgctagggtcagttttgcttttcgcatttgagattgcttgatacaattagtttttaatgtaggttagtaagaggaaatggtagtcccttccctaccatttccctccctcccttgctctcttccccttttctaaaataaacactgtctagatctttggatattttcttccatgaaaaactgccttagttgcagcgttccttcttggctgtgggtggggagaagtttcttcactcttgtacttttcccttctgccccttcaggtgattgatacacaatcagagtgggttttgttctgtgtgtttgtttaataaygatttactgttacacggatgaagactgggaaaaagcatttgccgttctagcaaagtcctgtatacccatgtcttccaactggagaaatattttcattaaaataatcttgactactgttgaaaagtcaaagaaaattttcaacaagatatgctagggtcttgcaggatatgagtttgaatctgtgaactaaaaaggttcaagttgcatttccttaagttgtagttttttcagggacttttgggggagggggaatgagcaggctcatcctgtagtatttagataacacaacaattagagaaatgtaacaccactatggccactaagacttgagaaggtaaaaaccaggagtgtcagatggtgaaacaggccattggaatggaactgaagattatgtcgagaggttggaatgaacaaaaagtaaatggaggagagagatctagtttctgtatcctgtttgcatctgatgctgaagcagagacatgaattgctgatggtaatggattctattctcttttaggaggccagcaatattatataaatagtggttgtttgagggagagaaacgacaagttccccttttgtgcatgttcacactttgttttgaatgtctctgagatatctttaaagtagaggatcaaaattgggtaccagcatggaatcaggagttatactttggaggaaaatgaattaatattagatcacattttctttaatcttttaagatctggaattttacaagggtcttcatcaacagggaaaaccgtgttctgagtgctaaagtttgggtggtgaactggataattcttttataggatctctgataaagataaacatgtaaataactgcagaaataatgctttatttaagcacattacctatgattcatggtagggggaaaatagagaccacagaaactcctgaagtcttatcagggtttctttgcaaactattatatggatgcccatctgttgttttttcttgaaatttagtgttcaggttgatggatactgaatgtataggattctgaaggttggagtttatttaaaacagaactttccttttgttttactacgagttatgaaatgcagttttaatttgttgcaataaatatagaaactgagatgagtaggaatttatactaacttttctcactgttatggtacatactctatatcatgaaccttgaaattcaaattgatccctacactatcttgcaaatattacaaatgaagaattacaaaagttgtggtattttagcttatcaaaatgcacccgaaacataaaatatttttcyttaagttcttaaawcagaagaataggaaagagttgaaaataaatgtgatacattttatcattatattagtattttgttgaaattaataccttgaatcatgctatggataaacatttagcctagaactctaaaagtagtakaatgtgaatcagatttaaagaattgagaaggctggcaattcaaaaatagaggaagaaaacactctttggggttatgaaaaaaaggatcctcttagtattargatttcttaaaaagctatacacagttttaagatagattgttcttgaagataatggggcaaataattacctgctaaacaaattatgagtcctgtgattctttttttggttgaaataatttcargaactccagcatatgttgcagttttggctagaaaggtgattgtgacatacatccattcatccattctccctctctccttccctccttccctcccttccttctttccactttcaatacatagggctggggtagcaaaaaaaaataataatagtaaacagttttgtaaaacttgataatagaattmtctgacagggttaatagttgtgtttgaaattcagagctagtatggttcactctccccagaaaataaaattttaatttcttacacctcagggaataaaaactctaaattaaaacccatcttgcctctttaactttgtgtcacttagcaaaaatatctttaaggatggaaagaagagaccccatgtgtcttaaattccaagtcactgtgtgactaagctcgragttccaataaatattaaactagaattctgctgggaatttgagtcatccgcttaagctactcctgggaccaagacaactctggttgacctgatgttgrtgtttattcagagctttggtggaaaggagcctctcacycttggacttctaattaacaaagtcattccttagtcacttgttaagtgatagagctactccttgttttcaggcctgtaatttgctaaaggattgagcacaacagagaaactaaggagtttggagcttctgctgtttagagtctgctttcattattttacttttactttcttatctagctatgtgagggtactatgtaaaagtctggtgatttgctttagatmcttaagagaaaagcttagctgtagtcacatatagtgtctaagatggctttccttatagttacatgtttttaatagttgagtttgcctatactcttcataacatgtgcacatgttaaatatgttactgctttaaaaaagcatttcattagtaagatggggaatcgtttatgtacaatattgaaatgagagtagtagtataatggtgtgtttggtaactaacaggacacaatcaaaatttgagaattagaagttcagaatgaaaaaaggacttctctcttgaggaatctatctagaagttgagagatagcaagtgtttaacagagtgtaatgatttctgagaagcatgcttttaaagattttttttaaattcctgaatttatgagtttatattataataatctataatagagcaatagatttatacactggaaaagaaacaaattaagggaaggagagaatacacaatgacatggaggacatcaagaaaatatgtttggaaacatgtgaaactctccaaatgggaaataaatattcttgagagaaattaatcacagttgcagtttttctcctaaagggactgtttgcacaatgggttatgtaggctcaggtttgatttttgaaaaacatgttaaaaaatagtattcctgttattccacgtttatttttcgagtttaggttctgctactaaatcaagatgatacagataaaaggaaagcccttttatctcccccggcagcatctgttgaataagggggttatatttgatttctaaattctaaaattctgactgtacagcagtatatgccgttgttgacagtaaacagtaaagatttcaagcctgtggttttaaaagaagaagagatgattgggtagaaacttggaatattaagaagttgtttagttacttggctgttgccttttcctgttttgttgggagggggagcagggaaaggaagagtattgaactttttggggcaaccgttttgtgccagacattgtgctggaagctttacacacattttgtcttttaatccttccagttcccctgtgacatgtaggtatcattttctctagtttagagataaggaaacctagtctgaaaaatgcaagaatagttaacttgcctgtggtcacatggcaaatttcattgataatttgattttcttaaagaatatgccattgtttgaagaaaaaaccagttgccatctgacattcaggaagccgttaaaaaaccttgctcccaacctggtagccataaaactcatgcagcatttgcaagcctcatagcctggattctccaagaccaggctctctgggaaggcacattgttgccagtcgatgattctgcagcagcttatgctagttctcaaagcgctgatgtcctgctacctgcattgcgctggagggaaatgtagtcaccaagggctgccgcacaggctcttttccctccagtgctaactcttctgaagtgtatcacagaattactgcggtgttatttgaggcagtgaaagcaactatgtttctttatataattcattgaaatagcttgtcatggtcttaaactgagtgttcccaaggctagttatgtttgtccacttcaaggagcagttgtagcaaattcagaaccatagctcttcctggttgaaaagttacaactcttgactattaacagttcttaacatgattttttttttaattaccctatcttcactcacaacaattttgttaaagactatcctgtgctgataaactgctctctgaaatgcaaagaggaaattaacaatgtatttgtgaattggaaggaagtggaagcagagagatgaggagtagttgactttattttgagggtagactgtgtcaggagggagattgttgagtgggggagctttgtggcacatagtacatttttaagtacataccaggtacgttcttttattgttaaagccataagaaatggagttatgagcttctccacctccttttacttgcctcatttaaaatttatggaatttttgaacctaaaagattcaagctgagtggttccctatacactgaaaggtatagtcaaattgaaactatattggagacacaaagatgaataataagacgtgtaaacataatattttctagggtgctttggattttgagttgccaaatcatgttggaaaagcaagagatttgtataaaagctgcaaaggaaacatctgtgttttgtttagagaatacgttatattttggccaaataagaaaaaagagaaattgtcaaagtgaacaatatggggggaagaatgtcttcctaaagatcagaatgaacttatattatttccttaactgatccatgctttttaaaaaaaaatgaattaaaatacactgaatctatgtgaagccaaatataaggattgaaaacagtcttttttaaatttaccatctgattcctttccaatatctggatgtttgctattattgtggcaagacccattgttaactgtattgctaaaaatctacttttatctatcctggtaatacttgactgacctgagtcaaagtcacattttcttttttttttttttttaactttgaatttcttttgcttgggctttcacarattgaagttatttcatagaatcgttagatttttcaggttggaagagaatttgataaaagctacggctgctctggatttaagcacacctatcttagaggcaccttgtcctccccccatttatcaaacaagttagtttttagatgcatcttttgtatggaagagcacacagttagtgtagactataaataaaataatgataaaatgctaccatttagtgcttatgtgccattttctttccttttgggtttccttctttatttctgttttgtctttactctgttttcctttttatttcttaatatctcattcatctttttttttaattgccaggggatccatgtgatacaatggggtcaataattacttatcttcctgtagtttttgttattgctgttaagttaaaatgcccaaaacagtyactatctgcattttacggaggaagaaattgagtccttaagaatttaaagacgttttgaaagtcattcagctagcagttgggtagacctaggatggtcagtcaaatcttgatttatttcacacttttttgtttatttttgtcaaagcagtctcagaaagaggggtttgtgtaccaggtgttaaggaatagttaataacctttggtgatggatcccgcagtaaaatccaagctaaccccacaaagggatctataataataagaactgggtcttgagacatgaaacgagaattggctggctgcatcacttttgttctagtaccttattttcttctcatggtcttcataaaagtcttaggatttgttgaatattctagtacttgaaatgtaatttccaggctgagaatttaaaaaaagaatagtacagttatgtacatgttcatgcagtggcattgttttacatgttacgtacatttggaattttatttaaaaagaagtagggagacttgctatttatttgcagacaaagagagccagatacctttagttgaccagaacactcacaggccagctctactttttactgatgagtagtattccaacaccattaatgtaggtggttgggtctgttggttcaactggaaacatatctcaaagtttatggaccccattcctctattctcttgagaaaggtaacaaataagatgagggggcactgtgtggaccagtggtgataatgtgccatgaaccaagtgcacgttggtctacacccctagaaaagagagcaagagagaagaaacctatgtgtagaccttttcatggaccacacactggccacgttcctgatgttggtgaaacaaattggaaaggaatattctccctcatgggacagtgggcaagggagtttgtaggcttacttctgtccccaagcctctaacaagatcagattttctttcacagttttgtgtacgccctgattgtaaaagttaaacttgtgttatagctgttttccttggtagaactcmatgaataggagcttattcatcagtgtactgttggtcctgtaagtgtctggcacacagaaggatgtctataagcatttgttaaattgaactgtaccagtcccaaccactggcaaaatttggcacagcagtagaacctttatgtatttatgcatagcagttgttaattattatgtgtaacttatgaataatggaagctcttccacgttttttctttagtctgtttaaattaggacttttaaaaggaacaatattttttccttaaaatgtatcttcttctttccaggcatactaattatgagggaaaaagtgaaactgactgttattgacattataattaattggtacttgaaataatttgttttgtaatattacatttcttcagtaatacgcaaattatattagaaaacatgtttagcaaaatctttgggggcaacattttttttgtaaggaaatgaatacaaatatttctggagcctactaggcagtttccttagcatcacttcctgtagtcaaagggacccgccagctgggcacacttaactgccttggatttgacggcttggtaaggtggaaatcttaacatttcacatccagagttcattttggtgtgcagtaaccttaaaagttaagagggtatcaagaacagttgatgattcagaacttggtaagttatgggattaagtagtatatgaagcccatctatgttttaaaaattaggatttgctcttcactgaaggtgaatttcctgactcttttctaagagtcatattcaactacattaataactgctggtaagagacagaaaataaaattattttgaaatggagctcagagatttctagacgagaaatttattttaaaatgctaatagaaaataaattatatggatatatatttataacactgatttttaacagatgctcttaaaataactttaacctagtttcttgctttgtgaagacaaagttgtttgttgtttcttttttgtttaacaaaggtaacttcatgagtatttgacagtatatttcttttggctcatatttctgtgtattcacctgcttgtaaatcatagcaaaaaggaacaagctaatggactaatatatgaagtaaaagggcagaaaaatgagcacatttactatttatgcactgtgttctactgtgtgctttcctccagtgcttacttatcctgaattcctgaacaattttttccctcattgttcattagtgtcagtcggtatgttatagaaatgtgtgaatttctataaattagttgtgagtgtgaatttcccactgttggattcctcagcagacacccaaacttaatttttatttcatgaactaaaagttgtagctaaggcatgacatctgatcaaaattaacactattatcctttgcaatgaaaagggtgaataaaactaaagttcctggtagttgcccctgatacaagtgtttgcttagctttgaccatacatctatctatttattttacattttacacatccatgggtattcctcccgataatgccaaggaatgctttcctttgcaggcatcattctaacaacacaaacacattcactgtgaattttaaactctcgttctcttttttcctcctttaataaattatctcattgagattattcattgttttggcagtactctaaacgatcttgcttttgcaaaatcattgtatattctgtttaatggcatgttactttaaaactgtaaagtttagggttgctaaaggcaaaagctgacaatatttgttaatattgagaataggtaaaaatgggcctttgggcagtcaacaaaagtaaaattaaaatctgactttaaatcttttgaaaatctaaaattaatatggatttctttataccaatcagaaattcaaattttgttttatgttactgatctttaagttgtttatgtgtcacagtgagagtggtaggaaccttttttttaattgtatgaagtaaatggaaggaaaaataacagtatacatcactgtggtaaaactatctttaatgatagcatgttactttggactacgttttgttttattttacagtgaattaggaagtgtttttcattgtgttttttggaattctggtaaatgtgagcagcaattcatatgcatataggtgtaaaaaagacgtatttgaaaagatatgctgcgtgaatttgtccagtgaggataagtagcaagttgtaattaccttctgtagtttaagtcattggctgtattgaatacttcagtgaagtatcgcgggggaaaaytgtggttgtacatactaccttgtgagtgttgcaggatttagtagttctcaatgaccattgttacttttaaaaaggaaaaaaagtagtgaggggataggataggaagttttgatgtgtgggaggggaaaggaatcattacttctcagctgctgaagtcgcagtttattttgttttaggcctctttgcatagcatattctagaggatggcgaaggataatacttyggggtgaaaatgttagtatccttaacatacttccgggtggtttaactattaatcagaagcaccatggagattaaagaattggagctagggattagataggttttagtgaggctttgccacggaaaagctatgaaatgggtgagtcattcaacatctccttgcttcagtatcagcrttacttcgaaagtgaggttttactttcaaatgtattgagtatcagggygaatagaacttagggctgagaggatgtcccttatgattttttgagcttggcatttaatattttacagcaaagtttttagcttaacataattgaacttgtactagatagggttaataggctagaacaaaaggtcaaagcataaggcattaggcttaattaagggagagcaggagtggcaggagtgtgtgacagttaaatgggtttcccacagactaatgtcggttacagtgcaaccatgcctcaacttaagtgggttattttgtgcaaagggcagcagtgattagcagtttgacatgccagacacttctggccaatcccatctgttttagaggttaaaaaagcacacctttatgagctgatggattgatttgtgtgcccgtctggtaaagattagaagtccaaggccaatgcagtaaatgtcagttatagagtattatactttcttggttggctcattgttttaaccgtcaactgttttataatgggggataagtgctgtttatggtgttgaatgcaagataggtgggggaacaggtgagggaggaagaaaaatatttcctagatggacttgtgaatcaaaatattctgtagcaggtgttcacattttaaatggagtgtttttgacctgttccttacagtttcagtcacattgttcttttctgagtgttatctgagcaacactgccagtccaggatttaattttgcatacagaattggtaggtttgtttatttaggtacctctttttaaaggtgtaataattttttattgaccacctgaacaagggaaaataaaatgaaaatgacacacacacgcgcacacacacacagagttctgtgttcttttatgtggtcagtcaggtgcatgtgaaaaggagacccaggaggggctcaggaaaacaaagtttattatactcatgagttctcggaggcacagcatgccattcagggccacatgagaaagccccagtgttggtctaggggccaaaggggcaggagctagaagagagaccgggctgcagccgtttctggagtatctgtgggaaaggcaaggcagggcgggtaaccaagtttaggattcgctagtttgcattagctgtaggtaaatgctactgctactactactaataagctataggtgtgtaataatagtagctttgaataagttataggtatacaggctctaaactgtaagagtgatccctagtttgcctggtagataccaggcaggggaatattgcctcctgggtgtatgggtcaggtagaggaggtatcgctgtggattgtttagtttgcatgtgaaaggcacgctgagtcctttgccttctctaagcgttggctggcccctagaggggcaatctcttcccagccagaaaggagtcaaaaccatcataatatacagaaaataagaaacataaacaatacacacatatgtacttgctttaagggtaggatttactgtggtcacgtgagtttgaagtgtgtttgaacttagactctaacctatttctttcttcattgaaagttgttaagtgcgatgccatyagtatagttcattttcagttctggattgtagctcatttaaagatacacaaatactacgttttggttatagaaattggctccaacatattctgaaattcaaggaaagggaagatcccaatattatgtgtatgaaatcttcagacattgtcctcataatcagtgaacttagtaacataaagcattgattgattcttttgggataggcagagagagaatgtttgagaaaaacaaaagttatctkaacagattatattcttcctgaggtttgagtttaartagaaatgtagccaagaacattggaaacacattggaaggttctgattggtctcaatagcttatccttgtcaaagaataggaaccaaatattgcctgttacctagttacacacatatatttcatgtctgactctgaattgtttcttatagaaagaaaattaaaataccaagatgtggtcactgaaagttatatgtagataacaataggaattagtattttattatgtatatgtatgcatttattttaaaactaagctaatccaaagtgaattggcttaacttataagaagacatwgagaaattttatttctcatttacaaaggacaaagtgacatcatgtattgaagttttttaggaatatattaattaaatatatgtccatctgtgtgttctttgtggagtagcatctcttgaaatgatttggatctaatatagatttacgtaagaaaagttttgcccttctctatagggagagaaaatgaagaagcatgaattttataatatcatagcttttttttcattaaatcatttgtaagttgcaaaagattggcttgagtagtgtaaaagtgcttggatagtaaattaaatgtgagagatttacctaatttaatgtgtggaaactgtttaaatgaatcttttggtgatgttgtattaaacctgaaacaaatacttcacagtctgcatatgtactaatattataaacatttaaaaagtaccctaaatcctattcttttgagttccttctcttttctccagtaacttcaagtgccaataataccttgtttgtgttacaattgcattttacaaagctaaagggaaataatttgtagggktaacttttgtgtgtgtgtgttttgatatactcttgaggttttggagaatacacattatcccctgtaatctatgattgttaatctgtcaatctattgtacctcttttcttttattaatatagtattattggatttgagacatgtaaactatgcttctctaagcaaattagttgaatatattcgtgtttaggttataaaaaatgaaagcaagaactcttaacatacttggcatcctgtgttttaaattcttttcctaaaactatagctttgtaacctgaatattaggtgttagaaattttataagacaatgggaaaataatggccctatattgtattttgcttctaaatgctattagggtatagaattgttctttatttaggcagattaattttaagaagaaagccataatatatgatggacttattcaaatatatattttagtgttatttatatatttgtaaaatgaatacgtgtgtgtgtgtatgtatttgtatgatatattttaaatggagatgtctacacctgttgattgcattaagcatttagtatcccctaatgaaggatggaaaaggtgctgccacactgtctaagtggatcatttctccttggtaaattacacacattctacttttttgtattctgtgaccttgcggtcagtgacttcagcccagaatagtttcagagtcatgtaaatgaatgcaattaaggtattgcctatcatcttacatagttcagatggaaccttattggatagagaggtttatttgctttatgagaaaggtcaaaataaggttaaattttattacataaaatgatttggtaatgtttttatttagctcctaaaaaagtaatgtcctaataggaaatgataatgctttttgtttttcctttatcacctggaggtctcttcaggttctgtttgtttttgtctgattataaactctattttgaggagatgccttctgtcgactaagattttgggaacatcctgcctgtagttaagattctagatatctttgacttatacacttaggtgacataccctgttaatgatgtagggtagctttggtgttgctgatgtgtaggcatacttcattttattgtgcttcactttactgctctttgaagataattttgttttttacaaactgaaggtttgtggcagccctgcattgagcaagtaccattttttcaacagcatgttttcagtttgtgtctttgtggtcatgttttgataattmtcacaatatataaaactttttcatattattatatrtgtcatggtgatctgtaatcagtgatctttgatgttactattgtgattgttttgaggtaccatgaactgtgcccatatcagccggcgaacttgttcagtgtggtctgactgctttacagactggctgttcccccatctcatctccctttccttgggattccctgttccttgagacacaacaataytgaaattaggccaattaataaccctataatggctaagtatttaaatgcaaggaaaagttgtaggtctcttactttaaatcaagagctagaaaaggttaagctcagtgaggaaggcatgtcaaaagccaagctcttctgaaagctaggcctcttgtgccagttcaccaagttgtgaatgtaaaaggaaaagttcttaaaggacattaaaagtgctactccagtgaacacatgaatgataagaacacaaagcagcctgatatggtttggctgtgtctccacccaaatctcatcttgaattgtagttcctatactccccatgtgtcctgggagggacccagtgggaggtaattgaatcatggaggcagttacccccatgctgttctcgtgatagtgagttctcatgagatctgatggttttttaatttaattttaatgatttatttatttctgagaagaagtctcgctctgccgcccaggctggagtgcagtggcgcggtctcagctcactgcaagctccgcctcctgggttcacgccattctcccgcctcagcctcccaagtagctgggaccacaggcgcccgccmccacgcctggctaattttttgatttttagtagagatggggtttcaccatgttagccaggatggtctctgtctcctgacctcgtgatctgcctgcctcggcctcccaaagtgctggaattacaggcgtgagccaccgygcccggccgagatctgatggttttataagaggcttttcccactttgcttggcacttcttcctgctgccttgtgaagaaggtgccttgctttcccctcaccttctgccatgattttaagtttcctgagacctccccaacaatgcrgaactctgagtcartgaaacctctttcctttataaattacccagtctcgggcattttttcatagctgtgtgagaacggactaatagacagccttattgctaatatggagaatattttagtagtctgcctagaaaatcaaagcagccataacattcccttaagccaaaacctaatccagagcagcgcctcactctaattccacaaaggccgagaggagatgaagaaactgcagaagaaaagttggaagctagcagaggtttgttcatgaagtttaaggatagaagctgcctggataacataaaagtgcacgatgaagcaggtaatgctgatgtagaagctacagcaagcttccagaagatctaggtaagatcattgatgaagatggctacattaaacagcagattttcagtgtaaatgaaacagccttctgttggatgaatatgccatctaggactttaatagctagagaggagaaaccaatgcctggcctcagaacctcaaaggacaaactgactttcttgttagtggataatacagctggtgacttgaagtggaaaccaatgtttggccattccaaaaatcctaagccccttaagaattatactaaatctcttctacctatgctgtataaatggaagaagaagcctggatgacagaacatctgtttacagcatggtttgctgaatattttaggccccctcttgagaccaactgctcagaaaaaaaagattcctatcgaaatattactgtttattgaccacgcacctggtcactcaagagctctgatggagatgtacaaggaagttaatgttaattttcatggctgctaatacaacatctattctgtagcctgtggatcaaggagtaatttcaactttcaagtcttactattgaagaaatacatcttgtgaagctgtagttgccatagatagtgattcctctgatggatctgggcaaaggcaattgtaaaccttctgaaaaggattcaccattctagatgccattgagaacatttgtgattaatgggaggaggtcaaaatactaacattaataggagtttgaaagaagctgcttccaccccttatggataactttggcgggttgaagacatcagtggaggaagtaagtggaggaagtaastgcagatgtggtggaaattgcaagaaaactagaattagaagtggagcctgaagatgtgactgaatttgtataatctcatgagaaaacatggacggatgaggagttactccttatagatgagcaaagaaagtagttactagaratggaatctactcctgattgaagatactgtgaacattgttgaaataacaacgaaggatttagaatatcatgtaaacataattgataaaacagtggcagggtttgagaggattgactcccatctagaaagatattctactgtgggtaaaatgctatcaaacagcattacatgctacagagaattattctgtgaaaggaagaatcagccgatgtggcaaacttcattgttgtcttgttttaagaaatcattacagagaccccaaccttcagcaaccacaagcctgatcatttggcagccatcaatatggaggcaaggtgcccaccactgaagagtaaaactctctaaagattcacatgattgttagcatttttagcaataaagtatttttatactaaggtatgtacattgtttcgacataawgcttttgcacacttaatagactatagtacagtgtaaacataacttttatgtgcactaggaaaccaaaaaacttgtgtgacttgctttattgtgatatttgctttattttagtgatctggaatggaacccactatatctctgaggtatgcctttatgtgcttagagacttgtattaataatgcctgagtaccatgctggttggtataggacgtcagacagcgacactagagtcccaactcatctgggtagaatggacacctaccacccaaccaggctgattgtctgggccggggggattaggagagcattgaaataagatactggaggagtcttactgatgaagaactgacagtgaatgagtggatgagagagagaatgtgcatgtgtgtgtagtaattaaaggcatatatttttcattgtagttggtccatataaaactaccgtcttctcttttatatttttacttaagcctggcatattaattgattaaggctctgtgattaattgatgtcatttatcagacatttactgagtaccagctgtataccttgcaccatgctgggtattgaaggctcacagacacagggagaataacaataagcaagatacagactaagtgacctacaggtatagtggtgaagagctggattttggggaagtattactttaagcaatttgttatctttaagtggttttaaggagactgaagggcccccagtaaaatgaaatgaaaatgaaaaatagctactttattttgggaggttagaattcaggtttacagatgtatttttattcaaagctataatctgtgagaactgatcataggttataggctaggaattgagagttctagaagtataagtcagatctaagtggcgtggctgatagaaatggaatgctgctatggtggtatcagggagttcgcatggtacctcccttatcacygctagcttcactgtccattggcctgttgaccaaaataaagtttcctcagccaccacaatgttaaattgtttgctacatctcttgctggccaaaaactttgatccactcttttgttcctgaaagtatgaacttttccacgtcagtgtcattctatatctagtatggttctaattctgagtttaacattttctgttcctagtggtacagaaaagaaatgaggtgtttcaaactctgcamtgactgttaaataattctaatactttttctcccagaatccttgactgaaattcctctttatctttgacattaactttttacatcattgacaatagggacaatctttatagtaaaataaaaacagatgagtagtgggccgggtgtgctggctcacgcctgtaatcccagcactttgggaggccgaggcaggtggatcacctgaggtcaggagtttgagatcggcctggccaacatggcgaaaactcgtctctactaaaaatacaaaaactagccgggcgtggtgctgggcacctgtaatcccagctacttgggagactgaggtgggagaatcgcttggacctggaaggcggaggttgcagtgagccgagatcacgccactgcactccagcctgggtgacagagggagactccacctcaaaaaacaaacaaacaaaaaaacaattgggtagtgtattttggcaaataattctgtaatgaaagctgttttgttacatgtggtcaacaactatgtccaaagaaagcatgtatcatgaagaatatgaatacttttttttaccttgtaatacatcttttttgttgttttttgagatgatttagttagtagttaaaattccattgtaaaacaaatctttgagataaggtgcacttgaagtaacacttatttctcttaattttcaggaagtgtttggattgtgagctatttcagaactgttctcaggactcattattttaacatttgggagaaacacagccagaaggtattgtcttttgtctcattgccccacttttaaaaatgttatcaagcctttccaattgtagaaaagtaagactgttatgccacrttttgttatttttctttaacttttagatatggataaactaccttgccatttgtcacaaagaaggttatatttcaattttggtaaatcaaaattttgtgtaagcgaataaaacgtctggtttagagtaaaccagttttacctattttaaacactgaggtatttacattttactttactactatagaactattttaaagaatgtcttgatttgaaaatgagatacataaagttcctttttatctaagacagtgtgaagtatacctgaaacattcaggcagtcttaaaagtcttcctgccwgtgacagctctaccttctagtgtagggatcagctgccatctgcatttggatcagtctgtcatcagagtccgtggacagactcagccaggccacctggttttgcctccgaacatccatttgcgaaattctytctttgcattatcatttgtggatagattggtatagcataataatttatctgcttgtaggcccagagtgtcaggacatgtgacatattactaggaaggaaggttatgttaaaatcatctgttgagaaacttactcactttgtgctttgtcttttgtaccttatcttagtccatttgagctgctgtaacaaataccatagatgggaggcttatacaccatagaggtttatttctcacagttctggaggctgggaagtccaagaccaaggtgccagcagatttaatgtttagtaagggcctgttcctcatagatggctgacttctcactgtaacctcacatgggtggaggtggccagagaattattgggacctcttttataagggtactaatcctgttcatgagggcattgccctcatgatctaatcactcaccaaaggccccacctccaaattaccctcacattgcaaatatggtttcaatttatgaattttggggagacacaacattcaggccatagcatacctcatagaycacatatggatatgccagccaatttgactaatgtcagtggtgaacatagtcttcttgatctatatccaaggcatccttcttaatattcgaccttatacctcctctgtatcttgtgttttccttctcaaaaacttttgccagctgtcttgcttgggatagaaacagatgaaggaaggatgcataaatacatgcaataaaataatgtatttgttaagattatagtgaattggccaccttcttttactataatacagatgtaactttattagctgaatattcatgatttttattcatatgaaataatacaaaaattggtttttaccgattttcttaatcactgtcaagcagtgtgaatttctagggttggttgaatacagtcttttaataagtctccccagcatgctgcattgaacttttaaaatggaaactctgtgtttaagattattatttattggcaaaccagcatattcttcctctttttgtcggttacgggggaaaggcaaaagcaaataagaaatgtaaataagcaaattaggtctgtgaaagaacttgtaaatgaacccaaaaaattaaatttaaaatatactttatcagtaaaataaattatatgatcagaaactggattttatggaattcagagttatcttttcaaattaaagatgagaatgaactattataaatatttcgtataaacattcacacttagctataaagatggaagttataattttaatgctaatatgaattatcaattcatgaaaggttatcatatctcaaaattaaaggtatgtttcaatagagttgatagttattcttattaaaaagaaactgcaaagaaattgaaagtttagctgaaggattaaatcgacaaattcccatgtatattcaagataggaattagttttaagtaattattttgaaaagaaatcataatgcataaggtccttttaagaagaagtttcttatttttatacaaaacctcctgaagtgtaacttcatgtaatcaaatagacacccttatttgctagcttgattgttgtttatgtaagtatagtctgagtaactagcaccctactccagaaggcttattgyaatttgtgtattttctaatcgatsctgcctctacctaacaggaatagtctttggcgtcttttactatagattagttttgcctgttttaaactatataaagttggaaccatgtcgtatgaactcatcagtgtctttttttatcaacattrtgtctgtaagagtcatccatgttgtgtatgttatttgttttttccccctaaattgtctatgttctattctatgattataccaccatttatccattccactgtaagtggacatttagttttctttcgagtttgtgtctgcarataaggctgctgtgaacttttttgggtcttttggtagaaataagccttcatttctcatgagtacagtgtaagcatgggagtggaactgctgggtggtgggatrtgcatgtgtttagagtaataggtacttacagtgcttttaagaatatttaggaaatgtcaatcagtgtgtcttttgttaatggtaggttttataattagagagacttatttttctttgacttaatgtaaactctaaagttgtttcttaggagttatttaaattttcccatctattaaaaaataagttacctattttctgattccattataatatgtatttggctcacaraacctgggtttgttctaaccctagtgaatgaaactaggacacaatatcctcctctatgtacttatgatcgtatgattgmaatactgaaagtggattttgaagcaaatcaggcataacatgtattgaaggctttttttattagttgaatatttggacacctctttgaatatttaaagtaatagatacttttgagtcacaaaacacttatttcagcattcctgacaagcgtttcttgtgacctttgtgtttttattattctggtgattaaaattgatattattcattctagcatataagtatttgaaaaattaatctttttctaggtctttcctatagagcagtgctgttcactagaagtataatgtgagctacattatgtaagtttaaattttaaatgttaaagtttctagtagctatggttaaaagtaactggtgaaattaataatatatttgatttaacccagtatctgcaaaatgttatcctttcaatgaataatcaatataaaattatgagatattttgcattgaaaaataatgtaaatctgtactgaatttttgaaagctggtgtgtgttttgacgcacagctctctgaattctgactagtcatctttcaagtgcacagtagccacatgtgtctagtgattgctgtattagacagcacagctatagagttacattttgggtttttaaaagacagtgctttagtcaagttcatgactagttaaaattacccttaaaaatccagtagaaaggtgccatgtcaaatgctgaagtaccatctttcagtaagtttcaaacagcctatttttccttctattttggaataagtagcattttctttggttgaacatcagataaatcaattagccagtgtttagggggcatgttgaatgacagatacatatctttaaactaaaaaatcaaaatctgtaacagtagattcatatcttccatctyattccagcttctattatactaggtagaattttacttttaggggaagtgtgtttttcttttttcaaaagcatggctggcttaattgaatgtgataaattgctgtatgctgtaactccaccatatttaataaaatagggaagtttacagatagtttgtatgtgtacatatagatgtgcctatgacttctcattacttaggatatttaaaggttacctaaattttgagggttaatgtttcttcatgtttatttttgccaaatgggataaatcaagactataaaccatctcacattaatgtgggtttgattttgccaccaaattgggttttaaagcttcttggtattcaaaattgggaatgtggataagggactattgacctgtgagaacagtcaatatggaaacttattgtggagggaatagccctttgagaaataaayggcataatcacactttagtgcttgttttggttcccagatctgggatacagtggttgttttatagccctacccccaacacatttttgataatactacctccacactcttaaatgaaattggtactcttgttgacactcaattcttattgggtagtaagaaaagaaaatcatttctctgcttaaaagccttcacctcacttggtataaaactaaagtccttgcattagctgaaaaggcgtcttctcagtgaagcccaccctggtgaccacacaattcaaaacggaagcctcctctttttcctctctcctttatgctgttctctttttccaagcacttaacacctttaaaaatacaatgaaatttgtgtttctttttaaagtatagtttatttattgtttaatctttctaaaattgggactccctgaaggcaagaatttctgttgcrttcgttactaataaatctgaagaagctagtctgaggctgagcatctagaaggaggacatacctgtttatagactagttatttattgaatgcatggagaagatacacatttttttttatttctgaaaatttgcctttataggttttctggggcagggaatatttaaaggaaatgaaaacaaaaattgtaagttataagcataagaatacatttggatgatttgaataatttgaaagtagtttttttcatcaaactgacatacayatccctttgaaaggtaatatgtaaatatgaagttttcaaaaaatagggtttattattatggtcaggtaatttttcttataggtataaatatgtgtttttttcatttggataataaaattatgttggtaatcagtctgagaagtacatttataaaagatttcttctgtttctgtaaaatataggagacatacattatattttggtatcttagtatagatcaggcagagctcaaaaggttttggaaagtaatttttccaaatttcctctttggaaagagaagtatagtttggctttcattttatacaggtggtatctaattgtagttctcaaagttttatttttaggtcaactacaataaatgtttttaaaatagtacaaaaatttaattaaagacataccaagttatggtatatggtaccctagaatacattcaaaggggacattataatgtttgttacattgtaggataaatatgagatgataaatgtgatcaaagtctttcctgaaagtctgttggcaggttcttggttttatattacacctttacatatttaacatttgattgcagtcaaccctaattatgactatgtcaataatcattttcattggaacaggaagaattatgagttttggtttctttgtctttccactgccattttccaaattcaggctttattacgttctgattattagatagttattagatagttactgcagtaactttctatttggtcttttgccttttagtttttattacccaatacattctacacagcaaagtaaaactttctgcagaaaattattattaccctgaacaaagacctttgctcacaagataagacaagtcctatttctacctggttccttgcatatctcatgatcaaatatttggtttgccccttccttaagcatgttaattgcacatttcttattctgccacattatttttgctatcttcagctcagatgtcttttgaaccctactagttttcttttaccaaaaggccatccatcctgtgatttgtatgatcactcggacagaagggaacatgtgctcccatctactttctcmtagtggttgatgaatgccattcacactgcctttatttttcatagcgtttcattcatcgctgcagcaaaattataaacttctagatggagggggttgtatcttttataaatttgtgacttacaaagcactcaacttgatgcctcccacatatagggtgataaatcaaagtattggtgaaacacaactccagagtgtgtcctgatataattttaaagcttagaaacgatcaaaaaagataaaagttcatctttgttatattacgcaagttacttacatttgtgcaacagttttttcatgtgctttgtatgaagacttgaaatgatatcatgtgtgttagaaatttacaggttgcaaagtgtgatatgggtaattatgacagtactcagactttattttgttgaatatgtacatttctttgacttaacttactgtgatatgtagaatgctcttttaatgttccttacctgaataagcaaaatttatttaatatgttagctaracaaattttgcttattattttgcttaaattttgcttattatttccttataagttactatagacttaatattctttgctgttcatcaagagggaaagtacaaacgcttttggtgaaagtaataaattacctgcttagaatgtaacaatttcaaagataaaagttttgttaacttcccaaaatttatccttagtttttcatatttaattcacattggggtaaagtatatttttaaaaaagaatcatttcacagatttccctaaatttcttcaagataaacccaaccttttcaattctatttcttaagagtattttttaaatattgctaagtagcctgcctggctagtggagattctaaatgggactgaattggggatagtgacttttttttttatttgattagggcatggttctcgtgctaagaacagtatctaagaatgaaataagtttgactttcagagatatccccccctccaaaaaaacccccaaaatctgaagatcatgtatatctgggtagtgggtgtaaatttagttcacagaaagaaatggtaaaaggttaaaggaggaaatgagtttcatagaatcagcagcatargcaaagatgaattctgtaatcatacatagaccctgaacatttgggctgactgtggttttatgtatttaaatgctgagatgttggtgacacggagtagtagcagaaactgaatttgggaggaggaaatgattatagtttctcaatcttctttactgtaacaaaatatgatgtgcaattgggatacccttttggcaactgaataggtttgggaagttaactttattggccatctagattatgtgggcagtatacacagccctttattatctagggcataaagtttagaaaatattcagcatttttttccagtgtaggttaaaaaaatattgatcttctggctttattcatatcacaaacaaaaattctgaaagacagcctgtttattgtcatagaaatggatataacctcacaaggagtgttattaaagttacttttgtaagtgttttaaaaacatgggcatgcagtttgtattaatagtgatactcctctactgagttactgctaatttgccattttcgcagtaatttcagaaaataagaaatcgttaacattattgtattatttaaatactcccatggatttctattaaggatgaatagcatcattacagtatttgttagaaagtcatatacatcacgatgcctgtaatcccagcactttgggaggccgaggcgggtggatcacgaggtcaggagtttgagaccagcctggccagcacagtgaaacctcgtccctactaaaaatacaaaaaatcaaccggccatggtggcacacaactgtaatcccagctactcaggaggctgaggcaggagaaatgcttgaacccaggaggcggaagttgcagtgagccgagatcgcgccactgcactccagcctgggcaacagagcgagactctgtctcaaaaaaaaaaaaaaaaaagtcatatacaatttaaacttagtytggtgaccacagaaagctattttcttagttttaaaccttttattagtataacctctcttcatcttggttactttaatgtaaaatgagaattatacagactttatttttatagcaacattgtatgaaatgaataaatgtgaactatttaaattggctcaggcatttagacttgtttctgataaacttatcacatgaatactacttattaccttgtaaacttgtattttaaaagaaaacatttatttgagatataaggattcctgttttctcttcagaaaaagcagaggtaattgttatttttttaaaaaaatttaaaacaaagggtatatttctcttttacctcttgagtaggcattaagagcagctactgtcacagccacagttaaatagaatagtatggaaaatgatggctttagaatcctaagatttatatttgagccctgcatcttcacatatactcttagtaaatcagttaacctgagcttcagttttttgatctgtaagatgaggatacatcttacatcataagaatattatgcagaataaatgaggaaatacataaagtgcatcagtgtaatgctatagaaagataatgtgttatggacaatattgttaattctaatgtatttttcaaaacaaagaaaataggtttttggatgatcactgttttacttaatcaccatgtccttctaattagaacctttcttccacacatttttatttttattttttattttttatgttcatttacttttaagagtttccacaaacctcggtccatgcttttaggattcctttcaagtttgaaccacttaacatctgccacctactgacctagttctttccacttcctccagctctcctctcctcatacacacttgtgtattatgtttgttggatgattaacctgtctttcatttcatttttgcaaatatctagatcaatactgggttaggaaaaacagtttctgaatttgtttgaactataaagcaaggtggtacataggagtcaataataatattcattttttccccccaggaaaacagttttcaggggaaacaattagtaaactcccacatggacttgcttttcgtttcatagtatggctgtgataggttttaaaagtgatttctgcctacatatccaggttaaaaaaagttttcagtataaagcatgagtttggaagtgactcaccacatatggaactacttcaaaatgcatgccccttaactactatttgaatttttataggtttgtagttttgctgactgcaagaaaataaaaggctcagtgccagttcttactgggtcaggatttattttaaagtaccaacatttcctcagctttttgatacctaaaaagtcctagagattttcctgcaaaaagttttaacaggctttattccagtaagggaaattcagggtgtttatcctgtggtagtaacaaaagcaagggatttgktgaatttgcaatagaaattgccagaatctagatgaccctaggaacatatttttatttaaagagtctagtggggtccagcaaggacttgtaattatatttgtgtctttagcatagctccaggaacaagaaatttgatgaatgatttgtaaacagatggttaatttttcatgaaatgatcaggagaccaggtgaccaaggcaattgatctcacactgttgaggtttactggggagtgattgtggaatgccttactgtgaaacacactgacttgagtttgaatcccagatttaccccttaactgagaaagtcaccaaacttctcagcctcatctgtaaaattggatagtatctattttacaattaatgattaagtgaaataatgtatgtcttagcagtattgtaacaggtatttactagtgtctaattaataaagttaataatgataactgacaataacccactcgataattgttttaaaacttacattccatgttgaaagtcaccattacagtatagaagtatacttgaggctacttaaaatctttaagaaactgcatttcagccaaagtagtgtttatgggtaaatggattgaagttgacacaggctgtgatgtggtggttttgaacaagaccagataatctaggtatgaaccccaactctgccacttacttactattgttgactgtgggcaaatcaccttacctccctaaggctcagtgttctcatctgtaaaatggaaataaattcatagagttatttgagaattaccatataggaattaagcctacgttaagcatttaacryagtcctggcacatagtatgcagtatttttttttttttttttttgagacagagtctcgctctgtcgcccaagctggggtgcagtggagcaatctgggctcactgcaagctctgcctcccaggttcacgccattctcctgcctcagcctccagagtagctgggactacaggtgcccaccaccatgcccagctaattttttgtatttttagtagaaacagggtttcaccatgttagccaggatggtctcgatctcctgacctcgtgatccacccacctcggcctcccgaagtgctgagattacaggcgtgagccaccgcgcccggtgatcattttaatttttcagctttctcagtggcccattatttaaaagaaccatatttgaaatcaaacagactactttatatttttgtaaaatcatttttacatcacacacatcttttggtccttctgtggcttcagacttttaattccagtcttaactcacccttctgctgcatctcctgcttcatttcctgaatgtagtgtgaccaggggagagcagaaggaagcagggattggatctgaaatcagtagacctctgtagtcaaccttacaatgagcaagacatcctctctggactaaagtccttagttaaattgattcagttgctgctttttgaagttttaccaacagaataactttaagcctttgtttactattagagaatatggtgagaaggttttgaaggaaatacctactttttttcagtgacttcgaacggtttttttttttagagccatcattyatccaaatattttttcaaaaatgacagctactaaaactactgataactaaacaattactgtatattacagatactgtgttaaggatagagttaggtttatcctataggaaagttttaaaaaatatcttctattttgtctacagtaagttacttgatagtacaaggagtttrttagaattttcaaagtttttaagacttttataatgaggcagtgtgtggtttgttaggtggttgtagtgagaatttgaagagttcttgttttggatagtcatagttctggctttgttattaatggcttggctttgagctaaaaatcaaaaccctttgactcaaaattacccctttgggtcaaactatcactgacctacttccttcctccactttgaacttaggattacttcagagatgagtgggagcatctcagatgaatgatggtgtcctccaagcgccttccagagtgtatacacatagaaagggaatgtgktgatcctccaagcgccttccagagtgtacacacatagaaagggaatgtggtgtcctttgagcacytttcagagtgtatacacatagaaagggaatgtggtgaacctccaaccaccttccagagtgtatacacatagaaagggaatgtggtgaacctctgaacgccttccagagtgtacacacatagaaagggaatgtggtgatcctccgagcgccttccagagtgtatacacatagaaagggaatgtggtgatcctccgagcgccttccagagtgtatacacatagaaagggaatgtggtgatcctccgagcgccttccagagtgtatacacatagaaagggaatgtagtgatcctccgagcgcyttccagagtgtatacacatagaaagggaatgtggtgatcctccgagcgccttccagagtgtatacacatagaaagggaatgtrgtgaacctccaaccgccttccagagtgtryatacatagaaagggaatgtggtgaacctctgaaygccttccagagtgtayacacatagaaagggaatgtggtgatcctcygagygccttccagagtgtacacacatagaaggggaaggtagtgatcctccaaccgccttccagagtgtatacacatagaaagggaatgtcgtgatctattttaacttaaatcatcatttcctgaatttatttggccttgggacctcccttcttccctccttaccacctatcctcctctctccctccttccatgttttcctccctctgagtgagcacttattctgtagaacattgttaaatatgtagtcattgggagcataattttaccatttaacttattagaactctatatttgtactgcctttgctttggtaatatgtttattttcaattcttaattaagaggaaaccctgtttgtaacatattattcctatgagaaaatatgatttccattgaaatatcttgtttyattgtcatgtgacatgttgtctaggcatgcagcatgaagaaagggaaaacccctgacttctaccagaggaatcaatccaacttcgtgttagtttgacttaacccagtgtgggaaactgtgtgaatattcgtaaaaacttttctgtgttaataaaaatataagtaatagaaggccttactacaagtaaagtaaacagtaagggtgtatcttctcactcaacaaaaaatttggagtattggcagttaatgaattgtcataatgatcttattagtgtcccacatggtattttctgttttctactctgccatcttgagtgacttggtgatgtcactcctcatggttgaaagatggctattttcccacatttccttgtcarcttcactggtcataattaaatcatatacccatgcctaagccctgcctcttactatcagagtagacattatttgtcacaagtggctttacttaattgggattcacctcctgaggggaagagggtgagtttctacaggtggataaggaagaggacagtgtgtttttgaggaggtcactgcagtgtttgtcacagctggtgaggatatgagttttgctcatctctgcagactctctggtgagatcacaaagtacagacatgtttattatttatttatttatttgttttcctttattggagacagggactctgttgcccaggctggagtgcagtggggttagcatagctcaccacagcctcaaactcctgggctcaagcaatctcctgcctcagcctctcaaagcactgggattatgggtgtgaactatgcaccctacccagtcatatttattgagtgcctgctgtatttcggttattcttctaagtcctggggatagaacagtgaacaaaagagaaaaaaaattgctaccctcctggagcttacattttattggtgagatagacaaataagataaagcaattcaatttatggtatcttattaagtgctaaataaaaattgaagcaaagagaggagaatggagggtattgagggcaggggcaggggagatgtccaggaagttttagatgacacccagggaaggccttactcggagggtgacttgagtagaggctgagtcagcatgggagctagtgatgcagccctctgggaaggagagtattccagtcgaagttcctgtggctggagtggggtgagtgagggagggtcacaggagatgaggtcagagggggaagcccctagaaagttttgagcagaagagtggcccaatatcatgttttagcagaatcgcttcagcagttgtgttaagtagaccaaagaggtgtcaaaaacagaagcaaggaaaccagtgaggcggccattatgataattcaggagagaaggagatgacttgaatggggacagtaagaagtagctgaattctggattctggattccaaggtaaagcctgcagaatttgctaaaagattgtatgtgggtgtgagaggaagagaggcatctcggatggcagcctgaacaattggaagaatggagctgatctgagattaggaataacagggactcagttattgacatattaaacttgaaatgcttggagacctccaaatggggatgtcagataaacacttgtttatataaatactttttggaccaatgtatattttttaaaagaacgatattgaccattaataataggaaatgacttttaaaagtatgtaatttcaataataacaataaagaataggaaatagaaaaattaagtgttatatggagtggatattttatgttccattgaacaacacagggaaacactggaagtaattttaaaataagagtattcaaataaacatttgtacactgtacatttatttagtgcctacgttagtgttaaaaattgcatattaaatctatttaatctttgaatcagtgcctgatttttcagccccaaaccttgtaaaaaatatacatacaaaaagaaatacaacccaaggactaatggtgtggatgtagttttatgactgtttcctctgtaacgtgaagcaatgatccttctaaaggaaatgtgttattaaataggcgatcttaccccactccaacttcctcagtattgtgtagcctgtagttaatgtgcaagcacatcattaaaaagaaatccaagcccagagaaagaatcagtacagtatatcttatgcaagtttatcaggatgaatggcttctcactccctttcttttgaagaggaattagtgtgagatgtcttttaacaagattattgtactcatttgcatttaacaagaatgcagcacgtagctaagattttcaatccgtgtgcatcacataaaatgccaaaaaagcaccttataaagtacctttcacatgctagatactcaagaagtatttggatagcaaatttgatttagagtatcattcacatttctaacttatttaaaatatttttaagtattatactacatgcagtggttattgcttaacagtgtgtgctttacctgtaatgcaaggttgttgagaaaattgaattgtattttttttagatggaagtaccatataataaatataaagagttatttattgtgcaagtaaactttgctctttaaaatggattaagtatttctcatcacagttttggctgtcatggtgaatatatgattgctggcctgtgtgaccaagtagagagaaaaaagcccgtttagatttagagggaaaatgcattttgttaagaacctgaagtgtattgaattactccagtttacctatttctcatgttaagtaatttttgcaaaatgatcatctttcatcagacagttctgaagttygcagtaattaagtaagcaagcatttatgttagctttatttgagaccaaagtggtggtagatatgaattagcctcattctttgattgaccaagctataagtttttatctgccagtcagtttttcaattcttttgagtgtatctctttatatactcctttggttttgtttctaacaaggagaataaagaaaatctgtcacctaacagttaacatttgttcatgtgtgaaaattattaagatgcttacctaaacaagatacttgtcaaagctctgatttgccacaatatagccacttgttttctgttatgtaagtaacccttggtataaacaggaatgtatttgaattatgaggcacaatatgacagtgatctgccaagaacctaccatcgagcatagaatcagacttaactaccacagctgaatctgtcgatatgttgctctccttgcccctggtgtcttgcaaccgctttcttcaattttgtgttaatcatttactgccttttaaataatactggtttttacattaatctttaagtaatatgttactttatgtttttgttttgcgaaaatggtagcattctgtatgaagtcttcggatacttgctgtttsaaatttttttttaatttagtttttgtgggtacaagtgtatatattcatggggtacagagatgttttgatacaggcatgcaatgtgaagtaagcacatcatgaagaatgaggtgtccatcccctcaagcatttatacatttagttgcaaacaacccagttacactctttaagttatttaatatgtacagttatgagacttgttttttcaacttatattggttttttgaaatttatttatactgctgtatgtaggtatagttcattwatttccactcctgggcaatattccattgtgtgtatttatttcttcccctctgtgtggacatttggatggttgctgggtcctttcgtttgtttgttattgttttgttttgttttgtttttgatatacctatgttgatatacttacatacatatataggtgtacttatatttacacacatatgtatgactattataagcattgctgatgtcarcgttcttttatatgtgttctgaagaagatgtgcaagactctagggtatatacccaagagtagatatgtaaagaatgctcaattatatgaaataatatgaagttgtttccaatgttatcagaccagtttacatttcattaataatatatcagaagtttctgttgagctacatcattgtcagatctaagaattgtcagactttttaactttttccaaattagtagatacagtggcatcgtattatgatcttgatttacttttctgtgtgataacgaatgaggctgaacatcttttcatgtgttttttcatcattggtgtactatcttatgaaattcttattatgtcctatgcccattatgtactcaaaactgtttttttatgcatttgtattctacatatttttaattttaaagtaacacatacagaaaagttacacgtacaatacagtggaacttttttcctctgttgacttatttcccatgaataaacaagtgtgtgtttcccagaaagaaacaagaccttgtcctggaaaccacaacaaaaccatcaaaatcattgatcatcactacyatctaatcgtcagagctcattcaagtttccargttgtcccgataatgtccttttcagcaaaaggattccatttagaatcacactttgcattttattgtctcatctttttggtctcccacagtctggaacagttcttcagtctttgactttaaagacactggcatgttagaagaccatgtcggcccgtaattatgtagaatatcttttcctttagggttgtcttctgtttcctcatgattagatccatgttatgaatattgagcaggaatatcacagaagtgatactgtgtcttctctttgcatcctctgcggtggcatacaatttcattttgacccattactgttgacttttcactgggattacttgattaagatggtgtctgctaatttcatctactgtgaaattactcattttccctctgtaattaataattattttgcatgcaggtgctttgaaactatgtaaaatccctttcctgatcacagttttagttaatttatttgtatcagtgtgtgcttatgagcccgtattttattcagtgagctgtaatccgttactattgtaacttattttggtgcccatcttgtccctgattttgccagcagtacccccttcagtatctttttgacatgtcatcccttgatcatactgatatctctaatttcattccaatcctataggcttcaattatatttccttccctttttgtacctcctcttatagtgagaaacctgactaccatgatccttagtgttactttatttgatcattctccctgtatgtagtcaatctgccatttctcctgtccctcaccctgccccttagttttacttgagcctcaaagcccctttatgtggaagccgttctcaccccacatcgatttctacattgcacaccacagtgcatctttttgtggatgcccttctgctccaacttgggcattgatacccagtgctggaccactcctgtgcaaggacttctctgtcatcctgctcacctcaaaccacccttttcttaatttattggatgcaaaatggcatcttattggtcttgatttgcttttctgtgattgacaataaggttagacatcttttcatgtgattattcaccattagtgtattctttcgtgaaatgcgagttcatacctttcgtacattatatacttaaaactttacattaaatacttttatgtcttaaattttttaaaattttaaaataacacatacaataacaagaacaatacagatctagagcttgggctcgaattccccataccacatcatttcttccactccacagtracaccaacctcatcctgcttgagctctctgacycctcttattagggctaccccctctctattttgcccatttttaattaaaatgttataggacacacacacacagacacacacacacacacacacacacacacactctggataccaaagttttgtgtgtgtgtgtatatgagacagagtgtcgcccaggctggagtgcagtgatgcgttctcagctcactgcaacctccgcctcctgggttcaagcaattctcctgcttcarcctccctagtagctgggattacaggtgacygccaccacacccagctaatttttgtattttagtagagacggggtttcaccatgttggccaggctggtctcgaactcctgacctcaaatgatccacccaccttagcctcccaaagtgctgggattataggcgtgagccatcacaccaacccccaatgtttttggcagtgtattttatggtgttgttcatttttcatcttctgttgtatttttgatgaatgaagttttcaattttaatgcatttgaatttattaatcttaacgctttgcatatagttaacctttctgtgtcttaaggaaacgtttcctactatgagatcataaagatatcctcttatattttgttttaaaaatattaaagacatgccttctctatttaaacctttaatccctctggaatttattgtttatatgttagacatcaggaatccacttttgcctccacgatgggtaaccagttgtttcaacactattgaatgatgtctccgttctctggagatctaaagtgtaacttttgtcaaatattttctctgtgtgatgatctacttctccagcaatcaatttgtttttctcctttccaggagcgcactagcttaattattagaactttatgatacattttggtatctggcaaggcaagtttcctactattttcttttggtggtaggattttttctctttcatgggcttttgctgctccatgcaaattttagaatcaacttattaaaccttttacattttgataggcattgcattaaaggcatttgtttaatttgggaagaattgtcattttacgatactgagtatttatataataaacatggtgtgtcattccatttatttggattatttaggtttcgttgttaatgccttccaatatattttatttatattgagcatgcagtatttacaagttacttttcttcctaggtatgctttgctgttggatattttttaaatgttgttttctgtttgttactgstgtacaaaaatacagttgattttatttaaaaaaagtattctaatatttagccagaattaattgaatattaacaaactgttctgataaatgtgacataacttcaaaagcacacaagtaagattagagatctaggtttttaccctgaaattacttttgatgttttaataagtattaggtgaatagtcatttttatagctttactgagatataatttacatactataaattcacctgtttaaagtgttcagttccgtagtttttatgttcacataggtgtgtaaccaacaccacagtctttttttaacagtttcatgatcttaaaaggagctccacacctgttagctgtcactctccatttccatcccttcccaccscagccctagacaaccaccgatccttctgtctagattaatttgcctattctgtacattccatagaaatgggatcacgtgatttttagtgattggcttctttcactgagcgtaataaagtttgactatgttgtagcatgtgtcagcacttcattcctttttgtgactaaataatacttcactgtatggatttatcacattttatctacttatcagtggatggacatcaggtttttatttcccttctgtatatacacaggaatggaattcctgggtcacgtcgtaacttgatgttgctttttaaggaactgtctgttccccttagtggctacactgcattttacattcccaccagtagtgtatgaagaaggtggatagtcatcttaattctacttttgcattctccaaagagtaattgtaatacattaggtttatcttaaagtatgattgttatttaaaataatgagagaagtggcagtgtattttacatcagactcatttttttcttcaacttttattttaagttctggggtacatgtgcaggatgcgcaagttttttacataggtaaacatatgccatgtggtttactgcatagatcaacccatcacttagatactaagcccagcatcaattagctattcttcctgatgctctccctccccccacacctcccacccaacaggcccagtgtgtattgttccccagaaatgtgtccatgtattctcatcattcagctcccacttttaagtgacaacatacagtgcttggttttctgttccgcgttagtttgctgaggataatggcttctatccatgtccctgcaaaggacatgatctcattcctttttatggctgcatagtattccatggtatatatgtaccacattttctttatccagtctatcactgatgggcatttgggttgatttcatgtcgtggctgttgtgaatagtgctgcagtgaacatacatgtgcatgtgtctttatgatagagtgatttataatccttcaggtgtatacccagtaatgggattgctgggtcaaatgttatttctgcctctaggtctttgaggacttgccacgctgtcttccacaatggttgaactaatttacactcccaccagcaatgtaaagtattcttttttctccacaaccttgccagcatctgttgttttctgactctttaataatcaccattctgacaggcatgagatggttatctcattatggttttgatttgcatttctctaatgatcagtgatgttgagcttttatatctayatttgctggccgcacgaatgtcttctttttagaactgtctgttcatgtctttgttcaccttttaatgttttttttcttgtaaatttatttaaactctttgtaaactctggatatgagacctttgtcagcacatcggactcattttaaataaatttatgattttgtatgtaatatrtcatttttatttttgtttttcatggctttatttaggtataatttacatgtatccagcaattcatccactgcaagtgttcagttggaaggttttgagtcaatgcactcagatgttgcagccatcaccacagtccggcrttaggacattttcatgtcttcacagagtctttcatgcccatttccaatctctgttctcctctcctgccccaggaggtgatctgctttctctacatacagttcagctttttaagacatttcatatataaatggaatcatacaatatagatatctttttggaatcatacaatatagatatctttcgtatttagcttctttcactaagcattaagtttctgaggttcatccttggtgacgygaatcattagttcattccctttttttgttggttacactttatgcttgcctttaatagttgatgggcatttgttttgtttacagtttttggttattatgattgaygctgatatcaccatttgtagacagattttttgtggacatatatttttcatttctcttaggtactccagtgtacaattagtgggtcattgcaaggttatacattcatgtatgtttaactttttgaaaaaccaccaaactgtttttcaagtggttatgccatttttacattctcaccagcaatggaggagagtttcagtttcttcctgtcctccccaacctttgagttttttcagtcttttttttttttaatatagctattctagtgagtgtgtaatgtgatctcattgtgattttactagtatttcatgtctttagtggatgacaatgagcatctttttatgtgtttaccaaacattcacatgtcttctttggtgaagtacctttaaatctttagtccattaaaaacaatttggttagtttatcttattgctgacttcaaagggttttaatatatgctgtatagtatatcttcatcagttatatgatttgcatatattttcttccattctgtggattatctttcaatttgatgacattccatttttaatttttttaaatggattgtgcttttgttttcttatttaaggaatatttctgtaacttaaggtcataagagtttatcctattccttcttctagaagttgtgttttaatttttacaattcagactataatccatttttagttatttttgtatgttgagagatacaggtttacacttaattatttattttcacatatggatatctaactgtaccgcaccatgtattaaaaagactattattttaattgcagtggcatatttgtcgaaaatcaaatgactatgaatgggagtttattctggactctattctgttccattgtctatatgtgtatctttatagcaggaccaacactgttggttaccatatagatttatagtatgttttgagattagataagtttaagtcctgcagcttcatactttttcagagttgtttcactattcttggtattttatactttcatatatattttaggaccaatttctagaaaaagattacgatggcatttaggtagatcagtgtagggagaattgacgtcttagtaatattggatctttcaatcaactgaatctttgttccaataaacaagtcttctttaatttccctcaacagtgttttgtagttttgagtgcacatgttttactcctgcctctgcttcccaaagtgctggaattgcaggcgtgagccaccgtgcctggctgcgtttcttatatactggcaacaaaccatccaaaaataaattccattcagccacaagagtaacaaaaagaataaagcttaagaataaatttaatggccaggtgtggtggcttatgcctgtcatcccagcactttggaaggtctaggtgggtggatcacctgaggtcaggagttcaagaccagcctgaccaacatagtgaaatcccgtctctactaaaaatacaaaattagccaggcatggtggtgcatgcctgtaatcccagctacttgggaggctgaggcaggagagttgcttgaacctgggaggcagaggttgcagtgagccaagactgcatcattgcactccagcttgggcgacagagtgagactgtgtctcaaaaaaaaaaaaaaaaaaaaaaaaaaaaaaaaaaaagaaatgcagttgtttgtggatcttgtcataaacctttctgaacttttttttattaattattttgggtttcttgtagagtccttagagttattggcaagcaagatcatgttacctgcatataaggataattttgacttctttttcagtctatctatctttatatttgttgcactgagtagacatcagatatccttgtcttcttcagatcttaggtggggaaagcattcagtctttcaccattagtatgatattagttgtaggcaattatcttagaaaggaaagattgttttaacactgaaacaattaatatagtaattatatatattataaatataataatatattattaatagactaaaagactaaaaacccacataaaagagtaaaaactcacatgattatctcgatagatacaggaaaaatcatttgacaaaatccaacacatcagtgataaaagcaaacaaaactcacaaactacacatagggaagagggaatagcagctgtattatatactacagctgtataataattaatagtggaaggtggaattttttctccgtaaaatggggacaaagcatgaatgtttgcgctcaccacttcttttcaacactagactggaagttctagccatattttttctcattgtaatgtttatgcagcctattttggagcatgtggaaatattaagggaaaataaccccaactccttttcctaccatctagaatatcactgttatcattgtgttctccgtcccttcagtatggtgtgtgtatatgtgtgtggggtaacacattaaaaaacaaatttgagatcatcctttatgctcacatctctgacctaatttgttaccatttttttccttgctcattactacctactttggtcatctctcagttccttaagcaggcacgtcctttgcatacactatttcttttattggaaattctcttcactttattctttgtatgactagggccttctcagcttaaatgtcattttctcagagaagcttttgcttttccttatcactttatgtaaaatagcttcctctctacctcttgctttgtttgaaatcttcaattattttattttctgtttgcttctttcctgtctctttcccatgggaactgtgttcgtcttattcatgttgtaattccaacacctagcatagtgtctagccttctaatttgtttagcaatttgttcaactcagatgaatagtatcttgctttcttagcattgtattgtgataattttaccacattattaaataaatggatctttgaaaacatccattttaaagattgtataatatttcataatataattatgatgaagttatttaaaattttcttattcattagacatgcttcttttgtcatgattcagaacacatctggcatattcagtttcactgacttgaactgaaggctaatttactcacttattaatataggaaaactttaagtattaatgttagagtagtttattttgtgttatcttttgttggttttatttaaatattcttttaatttatcttttgtgtggtcatatatttgtctcagaaggagagtgtcttagtagagaccaaccattaacataaacaattctagaatgtgacaaaatatcaaatacacattgtgggctcggaatacttttaactttttacatggaaaatgtaggctcattaagttcatatgctagtaccaagtattttgcattacctgaattgagaccattgtagatgaacagtagtagggaaaaatcagaatttattttccagagaactgtcaaggccctgtctttttccaaaatactgggatttgaattccacctcagtctcttattgactttgtgatttggggtaacttaaacccagtttcctcatctacaaactggggataataataatcaccttacagggtttttttaagattatatctgtaaaaggcttattgttatgtttgagacatagtaattgctcattaaactatagttatcattacctgttaagtctcttagttctaggagtgttggtaagagtagtagctgtaaggattcctcatggtgtcatcaacagataatgaccagttcattaataatgttcctctaagttgggcaccgtggtgcacacctgcagttccagctacttgggaggttgagtcgggaggatcatttgaacccaggagtttgagaccagcctgagcaacatagcgagatcctcgtctctaaaaataaaaataataatgataatagtaatgttcctctagagatatttccttttacccttctcaggagttggtggttttctttatagaatatgccagtttgtagggtttcttatctatatacacagaccaaaaaaagatttagcccacaagttcacattttaaagttccagtaatcaatttatagattactagttgcagcattctctttccttccttccttccttccttcattcttttctttttctttcttttctttctttctcttttctttctttctttcttgtctttcttcttttctttctttctttctctctctctctctttctttccttccttctttccttctttctttctttgacggagtctcgctctgtcgcccaggctggagtgcagtggcgcgatcttggctcactgcaagctctgcctcccaggttcacaccattctcctgcctcagcctcccgagtagctgggactacaggtgcccaccaccacacccagctaatttttttatatttttagtagaaatggggttttaccttgttagccaggatggtctcgatctccagacctcatgatctgcccatttcggcttcccaaagtgctgggattacaggtgtgagccactgcgcccggccagcattctcaaatatagttatgggtactttcttgttccaactttaaaataaaaggttataatcttttttcaagaaggaaaaaaggtaattgaaaactgaacagttaaattctactggaatttcagtgagttsgtagataatgttgataacgggaagatgggcgtgccttgagtattacttcagagactggggattggagacttcagaaattcccgaggtccctaccacattctaataggagtactcatgtaattacacatatggttattgttaagttgatgtgtgaatcacatccttctaggtatatataatcagggcaagtgattgtttcctactcttcttagaattcctatctgaatttatagtcaagatttaattgagtccaagatctataatttggggcatatgacttaaccagccctgctcagtatctgttgctcctctatgaaatggaatctctgctcatttcaccgagttgtgaaaatcaaatacagtcatgtccatgatagcattttgtaactggtaaagcattactcacttaatgatgctcccatttatgtgtcagacctgtctctttcccacagctatttagtagggtgctgctggtggccgtgtgatagctcagaactacatctgtattgtgcactgcctcttaggagttttatacttgtattagggagtggaaaattttagattttttcctatttgcatcattttatttgtggtgtttgttagaaaaataatatgtatgtatttactgtagagaaattagaaaatgcaaatcagcaaaaagaaaaaataacaattacctctaaatgcagaaataattactgcatttacttttgtttaaaacaaaaattcaattatgctgaaataatgttgtttcctgtttttatcacttatatagtatataatttcatataatttaattttcttgtataatattttaatgactacataatattccatgatgtaatatactgtagtttatttaactatttctaattttttcattttgacrttttatggctgtatacaatgtactgcacaaatataataatatgtattttgaacatccttatggctaaatatttacacctatcctccatgatttttttaattaggataaatcttagacatggaattgctgcatcaacggacatataacatgttaaggcatttaatttttgttacagttttatcgaggtataattgatgaataaactgcacatatttaaggaacaatctgacaagttttgacatgtgtgtacacctgtgaaaccatcatcaccattaagatgatatttctttgtaatccctcccttgggcatccttcatccccaggcaacctcactgatctattttctttcacaatagatgaatttgcgttttctggaatgttatccaaatggaatcacacaaaatatgtttctttttgtctggcttcttgcactcagggtaattattttgagattcatccatatttattttccgtatgtgttgtgtgtattctgttttgatactgagtagtaaaattatattgtatggatataccatatgattcattcacctattgatgggcatttcagttgtttccagtttttgactattaaaaataaatctactttgggcattgttgtgtaaatcttttcatggatatatagggcatttgatatttattaccaatttttttgctgcaaagattacatacttggtattttgaaactgaaaaagttccatataagaaaactatagctattcttttttttttttttaaraaatacacgtttaggaggatttataattttttgtatgtaaattaattaatttagcacagcacgctaagaaatttgaaattaacaaaggttaataaacacatcctagcaactataaacctttttcacagcttattttgttgaagcagctacttttatcgattattacctaraaagcagagatctattgctttctgttaatgaaccagcattcataaacaattgatatttttctgtcaaatgactacttttgcattgaacttgaacaagaaaaggtaatgggataagttgaacttgatcaaaaggtattccagaatctggtttggaatagatgccaaactatcttttccctcttgttaagatgcacacttgactgaaggaggacagggaatctgaagacwccggatgacatcagagctacttttcaacagccttctcaattttctttctcagaaagcagaggctcagagcttggagacagacggtgagaatatttttttcctgagttcttaaggcttaatcattatgactttaatatatttcagacaattctttctcagttataaattagcttataattcaaaatatgtattatgtacttcatctgtgcaagttacttcatcaggcaatgtggtttaaaaaatgaaagagctacaatccttcctttaaggaacttatatggaaagaataaatgtagataaataatgtaatcaaacagtaaaagaggttaaatgctgtaagagaaatggagaaaaatattcttgagaattcagtgtgtagattacttctggagagaggaattggaaagcttgaaagaagaaatagtatttttgttgacaacacttaattcgatttatcaaaaaccagagaaaatggacagttaatacaaatcctacaatagcaatccctgatttcagataaaaagttaattaccgttttgaggaaaaatagaagcatgtttgattattgtgtgtttattatagtataggccagtgattacttttggaattattaaaattcctcttacaaaggaaagagcattattagtatttctgagaaatgataaagtaattggattaaattaacacaagtaggtgggcagagcaacaaaaaagacgatgagcaagtggttaattctacttggattaacactcctgttttctagtatagctacaacctaaatgaatttgtcatgtcttaagctcttggaccttatgctgcttatttctgggaaggagaaatccaagtgaactaggtaaaggcataatgattgattattgtgctcataatccgttgtgaatagttcagtttcatctagctaactgaaaaactctggtcaaagagagagagcagatacagcatgctgaaattcaccatgttttacctgaccacagtgtttcaaaaagggaatggcaactttgagccaaatttgctctttacctgtaggcctcatatggataatcctaactgctttttcttcactattctgataatgttcagaaaacctagtaatgaagttattttaatcacccacttaaatgcttagcttttcttgtaatttcatcaagaaaatctttaaaatgttattttttaaaagactgcataaaattactaataattatttggttgcaagtcacttttcrtatattcatttatattttacttataattggaatttaaaatcaatgacgcaattatttgtaaatactaaaatttttttattcagatataattaggtgttaatcactggttggcagtctgaaatctgcttttatatttgatgaaacagttgatattgaaccccatttctgaacttctaattctattaaaattaacattataatcatgcatattcctgtgaccgccccgccacaagatataattggtttgttgttgttcttaattttcaacacctttgttttaccacatagccagaatgataagcaatgctcactggatccaactaggagttggataagtaaattataggtagccatctggtaaatatacacagccaatgagttgttcttagaaaattgtcaaatttagatttttcttccagattaaaaaaaaagacagccaggcatggtgtctcacacctgtaatcccagcactttgggaggccaaggtgggcagatcatgaggtcaggagttcaagaccagcctgaccagtatggtgaaaccctgtctctactaaaaatacaaatactagccaggtgtggtagcgcgtgcctgtagtcccagttatttgggaggctgaggcaggagaatcacttaagtcggcagtcggggttgcagtgagccaagattgtgccactgcactccagcctgggtgacagagaaagactccgtctcaaaaaaaaaaaaaaaaaaaaaaaaagacattataatgtatagtgaacaactttgaaaactaaaaatttataaaaacaaattactgatagtgattttctatattcctttcacatatttttaaacgtttttagattttaaagatgattatgtcaaatgtgttttttctaaaacgtgttgtgttaaatatgttttccttttaaatgaacagtccatggtcaaataagcttgggagatgttgggtcaaagtatagaatgtcttttcaatatgcctttcattaaccagtggactgtgtctccaaaaggaggatctggtatatctcaggagatgagtatttgacaagttgaggattctaaactaatgttttatgaggtttttactatagtttgtcttaccctgcaaaacactcatgttatatttttaagtatagtaattttttttgactgaaagctcaaagataatgattgggaggaaaaaggatgtaattaattgaatattgcaaactaaataaagaatgaagtgtttaaaaagcctttcagtgtcttaggccatgtttcccttgctattttgttagctccttcttttgaaagagatacaatcatcatattgagtaactaacaaaattaattcacccttttttatattttataggactttatatactttctgtgctgtttatctcagtgtataatatttattagctaattttgataaaattgctgatacaaaaacagagaatattttcggtagtgttaactaaatgaccataaatcaatttagcttaaacacttgaatatactaattttctctaatggaatttttattgttatatgtcatggttttccactaggacgagttctctattgtacttttttctagtttgattaaatttttgacaactatggtagaatagatgtcttgagtttaaaactttcctgtcagacataaaatatctatataaatttttttttaaaaaagggccagtactctgggcgtggtggctcacgcttgcaatcccagcactttgagaggccgaggcgggcggatcacgaggtcaggagatcgagaccatcctggctgacacggtgaaaccctgtctgtactaaaaatacaaaaaattagccgggcgccatggcgggcgcctgtagtcccagctactcgggaggctgaggcaggagaatggcgtgaacccgggaggtggagcttgcagtgagctgagatcgcgccactgcactccagcctgggcgacagagcaagactccatctcaaaaaaaaagtgccagtactgatgagctgggttacgaggttggtaaagtaggctaattgtatacatggaatgcctgtccaacttcataaaacactcctcaaagtcatatttttttttatttgtttaagaaataactctttgtaaaatgtgtttaaactttcacaccagatttttagtagaaacgtgatgctggtgaaagaaagatcaatttataatctgggtgagttgtcctagttggaattaattgccgtaaaccaatttggccttctcactagtgttttcctggccttgtggataaccctggtaagaaaatctgtatgcttggctcaaatgaatcattgttagtttccagcattgcttccatccactcttaattccctttctcacagccagccatcttcgttcagagtcttatcatttctcatctggagctcttgtgctggcaggcctgtttactgacatccttgttcgagtcttttacaaccaccagatcttcctaaaactccagcttrcttgtgttacttgtctgatcaaaaataatgtagcaattgcaatagcataatgaacatagaaaagtaatagaccttccttaatcctaacttactgttactatgggaaacattaatacaattaacatttttttaatttggtatctttaaataattgacttttccttaagtcttttacttagtatcttaattgatataacttacgttgtttggggaggaagatccctactagactaagcctccatatcaactcagattttataaagtcgctatatgcgaagcctccatatcaactcaggtttttttttttttccttttccatgaaaggtttcaaatgaaggaatcaaaataattttaaaagtgttgatcaaactgtcaatacactttctcttcttacacagaccctggtcttttttcactgaaattaactgttgtgaacctgatagtctccttgattctctgctacatttgcccttcaaccatgtggcctgtggtttgcatatctgaaaattttctgattctaacgtcagagcttatgcattttatttagataactagaatttcttcattctggattagaggtatatgagtaattttcaaacctcgcttgcttcctttttgcatttatttatttaaaaaaatgttcatagtacagtctatgtaagcttctagcttgaagctttgtctcctgctgttgccgcccctctctgcacctcctccccacctgccatcttctagcctgtcctccaagctagtgcttctcaaaatatctgcagtaaaggccaataatttgtttgtctgtttctattttattttttttagtaactcacttttattgtctttttaaaaagctatatgacagaagtttttarcaagactacaaaatctaagtccacatctttcatcattaaatttaattataacttttatagaacatgccatcaaattattttgtcatgttctataaaagtttgtcattactggcaatttttattcttggaggtgattacttaaagtttctagaacatactctatgccattgtgcttcctggactgggcttatggtcctcctactttctgaagaatactgaagcttcttttctaattgagaaagccttgtttgtccctagagtcagttcacatgcagcctctgtagagaaccttcactaaaaatggtgttccctgccttaccactcagtcttcttccaaaaattgtgtctttcagtgctttctccactttgtccatgccwtctttttagtagcatctcactatgttgttgatctgttttttcccgatgagattgtgagcccactaagggctggtttatcacttagttatccttataacttcagctcttaacaacatagcagcttctttataaatatttgtacatttgttactccttgtatggtaaattcagaataataacgactctagagatgggagatttttcatatcctccttagtttactcatctttttagaaagytctttcttttctttcctcgtcttggtcttagggacattctgcacagagaacaatatttatctgccataattatagtggaaattcttgaaattagaagagattatrtttgaagaaaaccaacattgtacttttcaactattaatagcagcagctttcaaactttttgctttcaagacaactttatattcttaaattatcaaggacccaagagagcttttatttatgagattcatatcaactgatgtttatcatattagaaatttaaactgagaaaaaatttaaaacaagagttacacaaggatgcattccatgtatatagcctctagacaactctactgtacacttatgaaggaatgataccaaaagccagataacatttagtagtatgaaagtagtcttttcttcatgtgcctcctgaatgggtcatggccacccctggcatccttggaccaccctttgaggactgctgtattatggcaattcacttgtctaattgcgaacagaatcttctatatttttattccaataatgttaacsttgcttttgtgtttgtagactaataagtttttttttaataactgcacggtgtatcatattacccacttttctattaatgtctagacctagaatgtgctgaaacttactgccagcgttggcttggcagctgtaagacagagatgcttactcaaggagaagtcattttatttgtggatactcagtaaggtcattcctagttttgccctgtcaattttccccctaccccggctttcaagtcctctttatgatttgtgtrccttctaatacttcttctacggtgattcgcccaactctagaggtttggtcgtttaaaaaagtttcacaaaatgaagttgatgtgttattttgcaggattgagtaggcttcccctcaagtctttccttctctcctttgtgtgaccttcccctccacttgcctcaacctgatccctgatgctggcggtccttttctgagagtacagtctgctctctggcagatatttacttggccctggtgactcctgttctgttttactccctactctcttaccttggctgatactctgttaaattctttctgaggtctyagcgggacagtcagtctctagagtatctgacgacgctcttcaaattacattggtgctgggtcttccctgagggttctgggaatgcgttgtgtacctttcagctggatcggaataccaagatggctgctagttccgacacttgatttactgacagcttcatactgtttttactcgtagtgtttttattgtgtgatgatgtcatgcaagctggaatttgaggacttgatatcattatgagtgatcatctaaaaacatgaagctgatagaatgttgggtagtttttattttttaattctgtgtcctaaacgtagtcgggactcaagaaatgtttgctgagttaattttttttctcattagcgttggatagaactcttagctccaagaaccacattataatttaagtyggacatctctgtcttatagccaagggaaatacgctctcacactgttctgaaaaggtacatgtcactgtcttagcaaaacccttacctaatacttaatgaaggttgatagttcaaagtacaaaattcagacttcaaacaggatctgattctgcctctttaaagcacccctgtaagaattactacttttttgaaactttgtagaaatcatttttttagcacagtgtttatcaaacctaggcttgagatatagtaattatttttatcgtttttatctttgattcaataaagttgctatgaaataacaccctatcttatagcactgtttatgttaaacaaattggtttttaaatattcaaagcagccttcattgtttccagagctgtctttttcttcaactctcctgcctttgccttattttgaccatggcagtgcactaactgatctacagtttcttcttccctccaagctatcaacaactcccatagcttctggttttgtttttctaatatgcttttaataataccattgcttgtaaggaaacccaccagataaaggccagcttcttggcatggccttgattcaaagtccttggtcccagttgcatttccagcctaatctccactcccattggactaccacacttcctgtgtcacactcagctcttccttgcctttgagtgctatttctggaccctagaatggctgccattctcttctgcctggctagcccttactcattttttaaccatcactgactaccacctgcatgtgtacatatgaactaaaaacctggttacagcctatctgtgttcctagagcactttttacatatttcagtcattgcatttagcacagtatatactctctctcctttggcacagagactaaggaagaaaatcaccggcactgtgcactctcgggtcttatttactcactaggtgttattactctgtccttttcctgtcctgttcaggaaaacatacctgaatccaagtgagtgaaagtgtggttatcacccaagttatcttgaatttatttagtctgtttttttaaaagggaataatttgcaacctcttagaccttattaaattctgtacttaacactaaatacttacactaaatactctttagaactaatcatgacataccttatatctgatgatgacaaaccagcatgttatagatggagacacactgattttagcatatattgtgatttaagcattacagctgtttgttccaccagactatttatttcttgaaagccaggactattttattcacctttttccttttgttgttctagagtaatgatttaaacatttgcctactttagctactaaattaaattttgagagcattgccagggaagaatcaaacaccctctactggcattaatactttctcttttggcccatgcactggtaatgctaaaacatcaaatgtcatgctgatgtttttataacaagaccgagattgctttaccttgttttacttgtgttactcactattctaatgattttttttttccgtcttaagaatgtattcatcatgttgggaataagaaatttagtaaacatgctataatgtaattttccttacctgtaattttagtaagctatatgcagtatgcgtgaagtttgtgacttaaccaactaaaaccatgtatttttttttaaaaatgaaaattctagagataaatattgatggaaatattttttagtcttaacctgtgactgtgctacaaatctgaaagatacaaatagagctttaagttttacattcactacactgaaatatagtcaagaaagaattcgacctgaattctttaataagcacaatggaagggttgtttacttttgagaactaataactgccccattctttgtgattgtctgcttacataatttgttataaaagaatgcttctaggtaaaccctctctccagaatgctggtggtttgttctattctgcttgggaagggttaagaggagacaacatcctgtcaaagaccttgtttttaattttgcttctcacactggcacagatcctgctaagagcagcccagattagttcggaaaacctttgaagagatttaagatgtccttcagccagtttgaaggtttttgtcttgcaaatccagtacaagggcgcctgcaggcatctcgacccttgctgtgctgctgatgcagctcaaggtcacactaacccgccctgtgacattcaacaacaacaaaaaaattatgcggtgaaactgcctcagcgttcaaccaaccaacaacttcctttagtgaggaactgaggaagaagacttttttacccccctttttcttctttgggggggctctgtgaatttttgctgtaggaaataatcccargatttctggtgtgtgtgatgacaaggtcatctcttaattagaacacatgtaaagaacaaagctaaatggcttcaaaacagctttgtagttgatggagaggatttaaattatttaaagagatagtcacccatgtatgatggaagctgaattctaaaggcattaactccttcattcctatctatttgtcattgctttgaattccttatgtctgactttagagggttgcattctaaacttaagagaatttataaatgcccagtttttaaatgatgaaatataatttataaatcaaattctcagataaacttttcatggagaagttttctccccatgacatctatctcctagaaacattatcacatggctggacttaggaactaggagttacacacttttccctctggcaactgtgatttatttataatgtgttggaggtgggtgagtaaagtgcttctttattgcctcaccttctctcttcctcacttttatccatttgtgatttagaagtctagttaagcaattttctcctgcctctttagaaataacagcacgtatcattcaggtttctcaactttcaaagaactgatgtaggaagaccatcttttttctatggaaaaaaaattaatcttagttaaaaatggactttaagaaagttgtttctgaacatgcatgacattttaaggcacaatgaaaccatgtccatgaacactcggtagccatattggatctgctccccttggtggggcttgtttccccatgttcctccttcactgcctgcgaatgttaactaccaaataaattagttggacaaagtccaagtgcattggctttctgtgcttgagacttaatgtatatcacctctgcaggattggagcagaacaatctaagagagtaattttgtggttgatattttctttatgtgtattatgtatagaagcacacatggcagttatttttttatccacaaaatgacattgtgtagagaaagttaccttcaacattatgatattagcaaagcagttttctcagaatttatacccagttgctttttgactgaagtagaatcaggacaagtacaatattttaagtgtgatgatttaaactgatattttggattttgtgggcgacacttaagaaatttgtttgaggggataacatgttggactgtgtgaaaacaagttagaatgaactagacttattattctgaaggatttttctcctattgagaaacaattttgggggtccatgaaatgaaaaggtgtgtatattaagatacatatttttaggtatgggtattttaaagatctcaggtttgcaaaaagaaaatattggaggggaaatctatatgtgaggaaatggttagtgtgattcattgcatcctgcccttgcctggagtctggtgtgccctaaatgtcatgtatgacccaagctcacctgctagtaatttctaatttactgtcctaattcatcgatttgttatcactaattgttcttcatttacttctgtgtagtttccagtacctaaagggttgaaaggttgctgtaattggcacccgcagctgctctttcttttgacaggggataattttgcagcctatgctttgtgtgacagctgcctaattgggcattctccccttgtagcaagcctgcctcctccagcctccctgctgacaaatggtggtggattatagatgaggacacgctgacccgttcgaccttgctgagacagcggggaggggcctcctgctacttgagggaagctttaggtcatttagaggacaaggtcatgagccaggtggagaaatgacatgatataagatgacagtagcctgatgacatggtcagtgtgtcaaggacaaatgcatcagtatcgattaaacattattgcaatacttcattgagtccctagtatttcttaattgttcctactgattttttttaagaaatagaaaaagtgcaaaatgagacacatgtattttagcagtgttaaagcagttgtttacatgaaaacagaacggcttaggatgcctcctaataagtttcttcagttattttgagtattttgttcttaatttttgcctagtttgcagccccttaactatcaatacttttcaagagttatttgaaaattaaggcaggcaaattaaaatgtggcaatgtatgttgttaaaaaatatttaacaacttctgtcattcgcctactcaatgactggcataccttttcatattttgaataaaagaaaaataagccaagtgaaaatgtctaattgaaaagaacaccagaactctagatttataagattaaccataccaccgtgatgccataattatgaagtgttaaaggtgctttttaaataattgttgagacctgaaaatatttttcaaatagcttgggattattcataatgtaaatacttcaagatacatgaaaatcttttgtrtgtcttattactggtaatgcacatacttttcttggtaaagtagacttgagctattacaatatatttttaagtgtaaaatctgaagaatccatgcagagtctattaaccctatgttaatacctgaaatgataaattcatgtaaaactgcgctggatagtacaattaagaaaaatgcctagytttaaaaatggttaacagttgagtacaaagaagactgatcatgattctcgtttctggaaaaacaattgttgggcactgttgaatctaagtcctcagttcaacaggaggtaattttatgcccctgagattaaaaaaacgaggcatggtaaagtgtgatgaattagttcaccgaagtagacacatctgtattttcatggcacgtgtgtgtgcgtgggtgcgtgtgtgtgtgtgtgtttaattttgaccatgctgtgcatgtgtttagctgctctcaaaccctgactcaagcttggtggaggtttaatcctgtgcccttgtacacgtatacttgattagtagttgtggttatctcagcagaagacataccgccctcctccttgtattggtcgggacctgggcattagggagtcaaggcaaaggagaaagaaaagagattttacattagtattctatgaaagccttacggtctgcagaacaaattgattactccggtgtacctgtgcttggcaccactgctgtgagagaaaggtagggccgtaatctgttttattgtattgcatattgtgacactccaggaatattcaacatgcgctctttctagggcacgtgctgtaagtctaagtaaagaaaaaggaaataaatgaatggagagtatgtgagagcaatgggctacagctttgtttacttcagtccaagagagttcatttgaataagataattttactgaaagcgtcaccgggaacataacctgattgataatgaaaccctgtaaagtgttctgaggcactaaatctgcttccctgcttgaaacatgtgaggcagagatgaaattcaagctagtactgtaagattttaaccatcagatgggagcagtcatggaggtggttatggacatagtttagaaaattattttaaattatcttcagtacattatattcttaaagatcctatataacatggtgcaaaggaaagagattttcatgaaaaaaagaaaagaggtggccactacaccaccttgaactatattaagaaattaagaaatgtgttgtttactttattcttctgctagcttgatttgcataaacattatactgttttattcggttgtagaaaaggaaattgcatatttcttataattttttttaattctgtgattgttactcaaatagagacttgtagtgtacaatttgggwtatttgaggttacttaatatgaaaggaataaatgctttaagattttataaagtgattaaaatatctgtgataggrattagactcctgggcatttttaggcattcttaaaatgtggtcatagctgcactttttcggttgtgtataaatctgtactgcaaggggagaaaagaaattcctcttgtccaagcctcttgccacatgtgaactgcaggtgcccttttccctcttctgtccccatcctgatccttcgattacaatcagaacacttgatttaggagagagaggaagcaaaatacctcatactaatacactgatgaaatgaaagttgtttcctattgtttacttttgtattcttgaaactagtatatagctttacattttttagattacatttcacttccatttaaatgtgtgaataagtgttctgtatgtagtaattatacatcctgaagacattccggagatctgtataatcacaagctatagacattggtctagactggcttgcagatacttttatagaaaatgaccaagtgaagaagcatttttaagcacctgttaataataaatatatcactctgtgacataaaaacattgattaaaatgaactatttgaggtcatattgtctataaaggggatgttttcaaagaactttggaactcccttacaaaattcagactattaaattttgtttcaattggatataggcatcaaaattatttgtactgtatttttgtacacctagttttgtgggtttttctctattgaaaaaacatatcagaaattgtagaggaaaagtaaactatggaactaaaaatcagaatattttatttttcagaattaaacatgttctttaaactctttttacttacagtttttgattttgtaattactttacaaattttgaagattttagaatctttcactttctcaaaagaaatacatggcatgcacatggttaataattagccaagtaagatggggaagttaaaataggttaccaagtagagaaaattgatattttcctttttttttcttatttatttattttttgatggagtggaagattgttttaacaggaaaggactatattttgtttaccaaagtatccacagtgcttaacactgtacctggcatataataactgcttaataaacatttgttgaacacatgaataaggaatcctcaaccaccttcccctctcacccaccccgatacattcctttcttctctcttggctatttgtggtttcaatctgtgcagtgttcatggtagtgagtttttacatgagttgctcttttgaaagtactctaggtattgaagaaacaggaatctctctgaatggtgtttatggaattgttttccagtcagagtagttcaaatgactgagtcttaaagtgtacttcttccaaatgtgtgctttgagttcttcttcccttcaaattgcctctattctttcccctcatatgcagatctactgtgttgttgaattttgttaagctgtgaaatctaattcttagagtttcatcttgtcagtttaggtacattatgcttattaaccaatatcaacaaattattttaaacatccaagaaaatcaccagttaattttagtcagatatatctaggtacattaaactatagagaaaacaaacatttgacatgttattatggctattaatttaagccatgaaatggaagacattcatgagaacaactttatgtgggtgatacttccctaagttcagtaaatgagcatgcagtgttacttggtatccagtgttagctaggcttggactggagttcttgagcagtaggaaccttaggaattattataaagagttcgtttaactgatgagaacactgggctttaggcaagttcctacttagccactgttataaaactgcttaggacctgagccagggctaaaacacaaatcatctagcttttaaaaaagtgatttttttttttaacctggtatcaactctttgttcaattttatgcttctgaaataataattgttacgtttatattagccaaattttattcctgtagctgcagtaaagtttataaccaaatagaacataaatcaaagcaaactcatacacacagaattttcaattgctccctatggatgtggactcagtagacttccatgccaagaatgggkgacaacatatttagtattatgaagaaaggtattaaaatttgagaagaaaacttyacataaaattacagtggccaggcatagtggttcacccctgtaagcccagcagtttgggaggccgaggtaggaggattgcttgagcccaggagttcaagatcagtctgggcaccatagtaagaccctatcgctactaaaaattaaaaaattaactagctacttgggaggttgaggcgagaggattgcttgagcccaagagttcaaggttatggggagctgtgattgaattactgcactccagcctggacaacagagcacgagcctgcctctctctctctctttctacgagagttcacactggaataaacttgtgaatacagttgacccttggacaatgtggggattaggagtcccagccactgtgcagttaaaacatttgcatataacttttgactccctcaaaacttaactactgatagcctactgttgaccagaagcctcaccaataacattaaaacagttgattgacatgtattttatatgttataggtattatatactgtattcttawgataaagttagctagaggaaagatgtctgaagaaaactataaggaagagaaaatatattcactctttgctaagtggaagtagatcataataaaggttttatcctcatcatcttcacattaagtaggctaaggagttggtgttgctgtctcaggattggcagaaatggaagaaaatttgcttataagtggacccacacggtgcaagccagcgttgttcaagggtcaactgtagcacatcacaaacacgttatatagtctgttgacatttggtatctgtggcagtgttttctttaataatatagtcatggctttgcagaggaaggcagccaattgagtctcttgccatgtggggaccaccaaggggcaatgcttgcctccttcagtgataattaaatgctgacttttcaagaaattcaagaaatattctaattcagattgttcatggagagattagactcctgggattggagctgtggtttgcagataggtcccagcggtacatgtcagataaatattcaggttaaagactgagaaggtccatccaaaattcacatgcctagttcagggtgctgacagacttagctgtaggtgggtcaggccttcaaccacatgggctactcatgacttggttttatttccagtagagaaatgaacaaggaactagagaaatgatcagaaagccaaattgaccaaacacagagatactggagaagctgctagacagtagcagtgtggtttggagacgtggctgtctcatgctcaaaattaagtttataagcttacaagtcatagggatggtggtaaagtgtttctaaccctttccttccaattactggaaaataaatctccaggcctggttctttagttcaacagttgggcaaagtgtgcaagcaaattatttcacctctttacaccacagtttccccatctgcaaaatggggattattttagtgtcttcctctttaggttatgaggattaaatgagaagacaaatgtataatacctggagtatatacaaattatatataaattgtatatataaatatatttatgtgtatatatataaatataaaaatatattttttcatatatattcaaggataatataaatgatatatataatgattatttttgtgggtttgtgtgtctacgtgtaagattaccatgtcttctactgacgtatttttttatcctgctgttaataacagacgacttgactaggtaaccataatatgggagctgtatccaaccatttatgtctattttttacctattaatttattctcagtttttaacctagataatggtctgtcactttagtcatattttttcctctcccaaagtatatattctttgtcatgatcagttatgtgatttttatttgyaccgaatttattaaaatatgtatcaaaaactgcatacttgtcagtgatcacctttccacttaaaagtataatatgtctgaaggagctgtgaatctcagtttagaattacaataaatgatttggaaaatgagagttaagagcagaaaaggtaaaatttagtttgtttaaatcttaactaaacctttatctttcttcaaatatcactcatagtttccttttttctccctttaattgtaaaaatttattggcatttagagattttttgtagatctgtaggagactggggtgatctgactttaaaagtctgaatgccgaatgaagagcagttaacacagtgcttttctcaggaaggcaggaaagggagaaatatccgaaatgccttatgatttgatttgagtttaagtgaagttttattttttaactggatagtacttataatttttaataaagtgatttatttatctttatacaagtgtcttgaaaataaggatttttcaaaaattatatcatgtaagcatctttatttggtttataatttaaataattatatatatttatttattgttttcttgtgcgtatattatgctcccagttgtttctgaatattatgttagaagtggccagggagcaactaagagtaatgacgtgcatttattatatttagcaaaaattcggtatctcagatgtgcccatggtgaacagaataaaagtggtccttgttctcatggagcaatagttatagtctagtggtggaaaacaggacataaacaaatatttgaaaagcaaggaaagcaagcacaaaaaatgacagaatgagagaagtcctaagacaactgtgatctccgaggtgctctgctagggaataaaatggggagactgtttgcctaaagtcattgggaaagacgtatcttagcgggtgatatttaagctgagtttggggaaggaggcaaaggaggcagccataagaaagccagaaagaactttctcaaaagagagaaccactcacacagacgcccaaagaccggagagcactgttggtgttctgggatccagagaagtctgtrtagctrgagagctgtactgtccaatgaagaagctacgagccacaagccacatgcagctttccggaatggaggtagtctgtaggtgtaaaatacacaccaacttggaggaaggacttagtactacaaaaagaatgtgaagtatcttaagaattttatagtgatttcatattgataccatggtatgttttgttaaataaaatatactcaaattaattttactttttttcaactttgaaaaagtgtggctactacaaaatttaaagttgtattggtggctcccattacatttctgttggacatcgcctggctggagcgtaatgaatgagcaaaggactaaatgatgcgagataaggttggtcagatgcactggagccagttgatgcagagccttccaaaccayagaaaggaattcagactttattcttaagtgaaatagaaactattatgagtttttagccaagagatttaccttttacaaagagcattggctgtagtgtggaaaatgtgttggaggagggccagttaggaagtgagtacagtaatacacacacacacacacacacacgcacacacagctaaaccagttatcacaacagttgtcagacaaatttacattaaaaatagtctctctaatcaccagtgagtttctcagtcttatttgacagaatttcctaggctatagttttacatatataagaattctctttctttcatatttatgaaatattaaaattcttacaaaattaaatctctcactctcccagaacactgtaattcatgcaagtttaacacgactttaaaatcatttatagctttaaagattctgaagcgttttgacaaacctacatttcataatattttgtggttcaagtaactgatgatttattggaagctactgacaatctcagatcccataggcctacatgtgcatttctcagaaggccttgtatcccaggtttaagaaacctcctcatacagtccagcctgtaatcttcccaactattctctgcagtaggactccttctccctcttttgtaaatgaagaaactgagacttaattaaatgcaagctgccaaggttaatactggtagcaaatgacagtctctaggctaaaactcagatctttgacatatgtcttgtgatttctgcttatctagttactccttttatttagtatgtatgtggttgtctgtctgcatgaatgtgagttacattttccatttgttttatttggatcagaagctgtatttgcaataccatcatttaatgtgtatgaaattggaataattattaccctttgggtttttattgttacttatactactgagtgatggcaaaaggttttggatttattttgtagtactgataaaatacaaggcaggtgagtgtaggtttttgcttttacttcagagggaaaaataaaatttgtttgctctagaatacttgaacttgttgagtacttagaggatagcagacacaatgttaagtgctttcattttttttacagccctgttaaatagttaatattatccctagaatctcagaaaagttactgcctgaacctaagattcaaagcctggccacctgactttaaggctggttctcttagcttcagtgtgctgtctacttttttaaggtatctttgaaatgaaatgtcttcacaaaatgcctgttgtatatcgtttgcagttgacaacaatgtttttcactgtaaaaagcaaagttcatttgaaattccaatgaaaatttctatttttaaaaaattgtttcttgagtgaaattaaagttgatccatgtcatatcactcagaaggctgatccttttcagtaagctaatagttttattttctctagtcaaatgaaaataataaaaaagttagatagcactcaagaaaactctctgtatagcataaaaatcttgcaatttgcatgtaatcccagcattctgggaggctgaggtaggcggatcacttgaggtcaggcgttcgagaccagcctggccaacatggcgaaacctcgtctctactaaaaatacaaaaattagccaggcatggtggtgcacccctgtaatcccagctactcaagagtctgaggcatgagaatcacttgaactcgggaggcggaggttgcagtgagctgagatcgtaccactgcactccagcctgggcgatagagcaagactcagtctgcgcccccaccccacccccaaaaaaatcttgcaatttgcctttaatggatggttttataaacaataggatagaggmatcaatacgcttattgtgactaagcagtgtcatatgattgaaagtaccaaggcatagtaaaatatataaatacatgatccaactgtagatgtcagaatctgtcaggaattggaaataccagatacttggtatgagtattataccgaaaattgttcaagatacttgagtataaaaacattttcaaagtagtaagtaatacaaagaaggaaaaaggtgaattaacatttcttgaggacctcctgtgttggattggacgttgtatatacactgtcatttttttttttgagacatatctctctctgttgcccaggctggagcacagtggcatgatctcacctcactgcagcctcaacttcctgggatcaagcgatccttccgtgtcagcctcccaagaagctgggacaacaggcacgtgccaccacacccagctatttttttatttttatttttttagagatggggtctcgctgtgttgcccaggctgacgttgtcatctttaattttcataactgctccattaaatacattgttatacatgttaaactgaggctcagacacatttaagctggggttacagagcaaatggttgaccctcagtgttactgtttttaaggctcatggtatcttttagatatgaatatagaagggatatttgtataaatgaagatctttcagaagtgaactgtggaaaatctgactcgtacatttaaattgttgaggttgacaatttgtggattggagtggtatctagtcctctgagtaaccaatacagtaaaatagtttatgaagtcaagtataggaagcttctcagccctgatttttttttttttttggtcattactggtctcgattttagttggttatgtgtgatcatcttttatctccagactcaccactgataacacaaaggtataactacatagccatgcaaaatacaaggtttccctttgcaattgtagaagtgcctttcatgtcaacatttttttgataattaaaaactgattattgaacaggtattttaaggtttaaccatttttatcccttctctctcataagtttgctgagatttgacaagtatcagctatccaatgaccattttttattatatagttaaaagtagagatgcaaggtaaatttttatttagttgttctgatatttagattttaatgtttgtatgtgtatgtcttaatcttaccatttattcttccactttgctagttatgcaggactccacttaacccttttattctgaacatatgggacagccagttctacttcataatgtttatgttattgaataacatttttggaagaaatgtattgccaaatttagggacttttttttagtgcactgtagatgtttttagcatattgaaagaatattctttctttcacttgtgtcacttcctaggagtattcctacagtatacgtatttctggggggcagtgagcgggaggacatcttrcttggtaaatcagttttgctaattattttgtagcaaacccatctttatagttagactttttggggggtgaggggaatagtttaagttttttattttaaaagcttgaatagcattctcttatgtaaacggaatgtggacacttaactgttttcatcaatatgttatmaactacaaaactcactcagactgaattggtaagttacattgtttaagtgatatccttgcttctgtggtttatttcagatgtagactctgcaggggttggtggctcacaccgataatcccagcactttgggaggcctggtcgggggatcacttgagtccgggagttctagaccaacctgggcaacatttcgaraccccgtctctataaacaaacaaacaaacatgtaaaattagccaagcatggtggcacgcaactatagtccccgtctattccggaggctgaggtgggaggattgcttgagcccaggagtttcaggctgcagtgagtcatggtcacaccaccacactcaggcctgggcaacagagtgagacctgtctgaaagcatacaaaacaaaacargactgacttcctttgggctgtgtacaatatttagaatagaggagaaaatgttggtcagagaaaggggaaaaggaaaaaaaagatgaaaggaacgcagctttttaattctggatgaggtttcttgctatctcagatgtaaatagacaacatttttagtcatcttccaatttaatattaggaagtcttttgacaaatctttatcatatgcctgggtgttaataatattgtggggaaaatgaatggaacagtgaccttgcttccttttatttcttcctttctatacaagagtattttattccatttactttttgaaaatttgacattatttatgcaaataattttatttcctttttatggccatgatattctctaaaactcaatggcaaaaattctggagtgacacttacaagtctccctttttgtgggtaataggggaggtgaaataaggcatcttattctgtcaggagtggaaatgcatgcttctgcctgaaaggaacatcagtcctacaagatagagcagaggaagaaaggcagagtcatcatgtttagctgaactaacaacattctcaaaaaggcctttaaaataaggaggtaaaataactgaagcccaggaaaatgcagtagaatctcaaagaggatcttgttgagctttctttttttaaatgaatagagtgaggcacaaagagaaaataacacctagaacattttttcttctcctttatctcgtagccccagagttccaaaagttggtttgcatggacagattcagagcagtcccacagagcccaggtcctgttaataagaagaggcatgttacatgatacgcacaaagaaagtaagtgagaagtagttagaactacagcagtggaatcttttgcctctttttcttagccatcacaccatggaataattgttgttcctgactccttcctttaggcaattgttgtcaagacattttgggccagggctgtaatctaggaccaggagccatcagagtktatttaagaagaagtagagacatgcggcaacctaatagttgacagcagcaaatgaaacgagaagcacgtagagcccttaggtacaactggccttacctgacctagggtracccttcttcccactcaacttcactaatgaactttgcaggcagtgtgatggctacttattattagatgctatgtccatttattattataaatacaggcatatgatgctagaaatgatagaagttagctgtatcagggtccctttatctaatattttgccatctagccctctgagggagaaccatctggtctttgtttgctggccaacttcaacataaccatccacccagtctttgcattagagtttcactttaggaattcattttccatgtctgttcacacatatagcttgaacaccagcatctcttttaagatttcattacctcttggctgtttcttactgttgccctctggctcttaccttcttctagttaatagtcatagtacctaaattktgtattgggaaaagacattccctctacactgcctcattaattctcatccttactcaagtctcttcaaccttgctcaaggctcatcatctagggcttggacagccctagtctgacccaaacttgggcattagtatttgcattgcttaaaagtaacccaccccggccctccctagtacacagttcccagcataaggaatatggtggcattatatcagtatctgaatgccagcaatgttcatgagtaagacaggtagaaatacattcaaacttgagaaataaaagatggagaaaagaagaaaataaaccatgtaagaggaggggtggagggaggcaggaagagagaattgttgagagggaaagagtacatgctcaccttctggagcagctcttaggctagtggcgctagaatcgtgactgaacccacttgacggatgcacatctgattctagagtattcattaggaaatactcttccacttaatagtctagatttattgtcatatttacaaatttacaaagtaggagaagtggggaaaatgggcaagkaaataagctacctattctctttcatgtttctttttttttcatgattaataagaccagtattttagtttcattttcatgtgaaaatgacaagtttttgtttattttctagtggccctagtctaaatgaattgttctttttgaatatgaaacgtgtttcttgatatccaaaaatttcaggctcccctcctcctcacctccacacacacatagactatatatgttcatgtatattccatgactttggagtcagggaaactgcttggctaatatgaacataaagatttgtctacttttaattttaatggaatagagggaacatgataaagcaaattaaactgtaaagttcttcaacatcagttaagtttcacacagctgcagggataacttgaggaaaggacatgttcagccagatggcctatgctggcttccttcccattcctgtgaaagatatgttattcactcccagggtagctcagggaaggagctgattatggaattaaaacaaccaatgtccaattaacccctgttttggtcaacgtttcctacacagtttggataattggcatactttagtttcatcaagggaggcagttggtttattggttagtgcaggcccctcggaataagaaatatgaaattctgttgttggttccgcccctacaaactgtaagtatgaccttggacatcttatttacctctttgtgctgttagctttccccatttgaaattcagagccacatgttgctctttgaccatacgtgaggtaaaggcaccataggaaaagtgagaaaaaagagcgtttgcagagttcttcaggaccatggattaaaatgtgcagtttgtcttacataatgttactgcagtatcttaggggtggtgtgattacagggaacagaagcccctcaacaaagctcaggtacaggaggacttgttagargcatgcagcgaactcttcaggaacctggtgatcggagtactttgcccctcctgaagctggaaagccattcattcagcacctccctgctgtcccttccctctcctctcctctcctctcctcgttttgcctccctcatctctgcttctctctgtgtgcttacttcaatcttttctctcagaatactgactcctctaggcactaatctgaaatgtggcctcatgaagtccactccaaaatgaagctttctgtctccctctgaattccagatgtcaagagaggaaatgattggtccattagttaggttcccagtgttgttycattctcctgaggtctgtggtttgggtataggttcttaagaaaaaggtttaggtaaggaagaaattatatgcatcttttgtatatgaaattactttttgctttaagtaaacctgtcacacaaaattatgagtgaaagaattaattacctagattattaaattattttacagatccaaatgctttttctttagtttttcaggwtatatatatayayatacacacacacacacacacayatatatatactatctatctatattatctatctatctgtctgtctatctatctatctatctatctatctatctaaagacaaaagacaatcctaagcctcaaggagctttatatagggtgactagtaagtcaaaaaaaattttgtttgagaaagttctctgggctgaagctttgtctgtgaatagtaaaacaattaacattcattgagtgcttagaaaatgtgagatattatactgttttacatgtaccttttatttaatacaacagttttataaggtaaatactattattattccttttacagctgaaaaaactgagcctcggaacagttaagtaaatccaccaaagtgacccactactgaatagcagagtcaggaatccagagactgttcttttcaccacaatgctttgtggccttcctaataaaagcaagagactgacactggcagagacaagattttagagtgggaaaartaatccagaattctcagagtgctgcataaattttgctttacgaaaagttttcaaatccacatttgttacagtctgtggcaattgaatatgataggaaagactgtgttccagaagaccttgacgtggttttggatcaggcatttactggataattaaccaaccactcagttgttctgagctttagtgccctggtaacatgggaatgaggataaataatgtattaaccaaccccgtgaggagaatcaaagacaactctatcctagtatttcattcgaggaagggtgagtatggcttaaagcacctgtgataaagcagggcttttaaaatgtaaaatacactttgtaggaatcaacggtcagtgacaagagctcccaggaggttttatacactgttttggccagtcaagaatttgtaaagaattgcatctctgcagcacccaccacagactggccccaggaacatttgtcttcctttgattgccctttgctaagcccctgtcaacaatgggttttmactatcttatcttggccttaacaaggtgacagacctggtcagtggaacctggcagcaggtttctaatgtttgaaaggtaactgatggattagccttgttttttgtgtccccaaaaagaccaatagtcagactaaaactcaacagattatagctcagtgcaaggcagaatttcatactgttggagttacgcaaggaactcttactgagcagcgactctgtggctaggctatgtgagcattaccacatttgttcagcccaggggctctatgaaacaggtattagtgcttttgcacgtttaataatgataaactttcaagagtagccaactttcctatgatcaaagagttggtaaatggtagagccggaataarttgaacccagagccatccgtctccaaaagaccaccttggaagatagttcatggtcactagaggtttttagaaataagctagatatccagagatagcaaatgggttataaaggggattaagcatcagacaggatgattgattaggcagatgacttttcaactgcctcccaacctttaaattatgattytgtcatgtttggagaattactttacatgccatgctattatgaaaacagtagccagtggcaaaattattagaggaaaatagatttcacctcataaaaattagctgcccttccaattggatacaagttctttaaatttgtgtaatctggtattatgaaggataagatgtttgtaagtttagtttaagtcgttagttcaaatgaataaaatatatgccaaaaatctccgttttctaattatagacaaggaaatttgatttgatgtgtcatatatttaaaacaaatacctaaacaattgcctaaataaaagagtgtcttaactatgcattttagaacactaggtttctaaatcttacccattcacagcaaagtgagatcttttctggacccacatgactttttagccttctcagacctgagaaatgttattaaagtttaatattatgccataaggcgagagtggatctgaaactctttgaaagaggtcaaaggagtgatttgtcttgattttatgtttctactaatggtaacatgctaatatggtaaaaagttgaaagccgtggcaatgacacgtgagtcgtcttgcatcagtattcaagacttatttgggtaatggttgttgttgttgaattggtttttagtttttcaggtttcagttatttaaaagggaatttcactacttttttcataattaatcactttagttaagatactgtttttatttagccatattcattgaacattcatacttgaagctcttcaacaaatacagattcaaattaaaaagatcattccaagaatagctttgaccaatttgatttaatctttatcacacatttaaagggctcaaattctttggcatataattattatctgcttcaatgattgattttkaaaatgggcacagagaaatagtttaattgtggttgatactgtaaaaaaataaataaataaaaagcctttcttgcataaaggcttactttgcctatttcattgtaacttattttttagaatgaatgtctggttttagagactaaatcttttgatgtgatacttcatttcttaatatctccatcaaaagaaaatgtaacaaagtagtattttaatgttaactgggttttcatctttatctaggggaggtaatttgaaaaggaaaaatgatgaaaagcttgatggaactggtattttgaagcatatactcattcttgatataacctaaatccataccagatcttactaaccttgacatgggaaacagcaactaaaagaaaccaaattagtatgatcagttcttcataaacaagtggtaaaataaagatcatcttacaaaaactttaaaatactctaaaaatatgtatatttttaaaatactttgccaggcatggtggctcacactggtaattccagcactttggggggccgaggcgggtggatcacttgaggtcaggagtttaaaaccagatgatagatgatagatagctggcttaaatcttgtgggttttctaccataatattagtcacgcatgttttctaaacccacagaactctctgtaggataaaatacttttttattctttaattttgtgcctttttattaatttatattccagggaaaaagatatattggatctgaaaccatcattttaaataacattgtcatatcattttaattctcctatttccatagaattatgacagcccactccttattttgcagaccaaggctccaaaaggtttacttgctgtttacagcatgttctactaggaatgctgcctctgctaggtgctaagatgtaaagatgaaaaagacataattcttgcccataaggagtttatactctcatggggaaccaggccttaacgaaccaaaacacaagcatacctcagagatattgcaggttcaattccagacactgcagtgaaatgaatacctcagtaaagcaagcacattttttggtttttcagtccatataaaagttacgtttacactatactgtagtctgttaagtgtgccatagcattatgtctaaaaataatgtgcataccttaacttaaaaataccttatagctaaaaaaatactaatgatcctctgaaccttcagagaactataatctttcttctggtagaggccttgcctccatgttgatggctgccgaagaatcagggggaggttgctgaaggttggggtctctgtaatgatttcttaaaataagacaacaatgaaattcgccacrttgactgacatcctttcatggaatatttctctgtagcatgtgttgctgtttgatgatagcattttacccacaggagaacttctttcaaaaagagtcaatcctctcaaacctcctactgctttatctactaagtttatatttacagaatattctaaatcctttgttgttttttcaacagtgttcacagtctcttcaccagagtagattccatctcaagaaactgctttctttacacatgtgtaagaagcaactcctcaggctcggtgtagtggctcatgcctgtaatccctgcactttgggaggccgatgtgggaggatcacttgagctcaggagttgaaaaaaaaaaaaaaacccgcaacaactcctcattcatttatgttttattatgaggttacagaaatttacccacatctttaggctcacttctagttcttttgctttttctaccacatctgcagttgcttcttccactgaagtcttgaattcctcaaagtcatccatgaagttgcaaatgttgatatttgacctcccctcatgaatcatgaatgttcttaatgacatctagaatggtgaatccttttcagaagcttttcagttgactctgcccagatccaatcagaggaatcacttttgatgacagctaaagccttagaaaatgtgtttttccaataagatatgaagtcaaaattactctttgatccatgagctgcagaatggatgttgtgttagcaggcataaaaacaacattaatctccttgtacaactgcagcagagctcttagtgtacaggtacatggcctgtaatattttgaaaggartttttgtttttgtccagtaggtcccaacagcgggcttaaaatattcagcaaatcatggtgtaaacagatgtgctttcctccaggctttgttgttccatttatgtagcaaaggcagagtagatttatcgtcatttttaagggtttaggatttttggaatggtatatgagcattggcttcaacctcaagttccagcttcatcagcctttaccaagagagtcagtctttcctttgaagctttgaagccagatattgacctctctctagctrtgaaatttctagatggaatcttcttccaatttaaggctgtttkgtctctattgaaaatctgttgtttagtgtaaccaccttcatcatttatctcactcagctggatcttctggcttttcttgctgagcttttctgtcagcatttgctgcttccctttgcagttttattgttttctcccttaaatcgtatgagccacctctgccgcttcctcacctctctcagtcttcatagaattgaagagagttagggccttgctctggattaggctttggtttaagggaatgtaatagctggtttgatcttaaatccagaccacaaaagctttctgtatgtcagcaataaggttgttttgttttcttatcattcatgtgttcactggagtgacatttttaatttcctacaataattgttttttttttttgtatttgcaatttggttaactggtgcaagaggctgagcttttggcctgtcttggctttcaacatccttcctcactaagcttaatcatttctagcttttgatttaaagtgtgagacatgcaaaacacacagaggccattgtagggttattaattgatctaatttcaatattgttgtgtctcaggcaataaaaaggactgaggagagggagagagatgggaacagctaagtggtggagcaatcagaacatacatatttattaagtatgctgtgatatgggcacagttcatggcaccccaaaacaattataatagtaacaccaaagatcacacatcaccgtagcagatagaataataatgaaaaagcttgaaatattgtgagaaatacctaaatgagacatagagctacaaagtgggcacatgctgttggaaaagtggtaccaatagacttcctcaacagaattgccacaaatccttagattgtaaaaaaaaaaacaaaaaaaaaacaaaaaaaamccccacaataatggcaaagtacaatgaagcaaagcacaataaaatgacrtgtgaccgtacagttttgtaagcaagatgattgaaagatctactgagtgccgtggagtcacagagaggaacaactaccctcaggctatggagttcagtgaaggctgcctaaagagaggatgagttgtcagctgagacttacagaatgaaagaaatgtcctagttgtttagcttgactgtaaacaaatggggcttattacaggattctgtatgcatttttaagtctgatgtatttttcctcaaaagatgaggatggtaaggatgatatggggggaagggcactaagcagaaggttctttattcttcttactgccctgtttctcccctgctgtcttatttataacctcttgtttaatgacaagaatttctatagaacaaattatatattttatataaatgtgataattgaaatcaagggaaagaccaaaacacaaagcaaaatataaacagtgggaaattctgatgtaaagatttaagtaacttaagagttgaatgaactaggaccgagcatcgtggctcatgcctgtaatctcaacactttgggaggccaaggcaggaggatctcttgagcccaggagcttgagaccaccctgggcaatatggtaaaacccgtccctacaaaaatcaaaagttagtcaggcatggtggtgtgtgcctgtggtcccagctgctcaggatgctgaggtaggasgatcgcttgatcctggggagtcrgaggttgtgctgagctgagatggcgctgctgcattccaacctgggtgacagagcaagactctgtctcaaaaaaaaaaaaaaaaatcaaatgaactactaaatagtgaagagatcaatatagtatatatgtactmttccacacatcattctatctcaagacaaaaagcaacagaaaaatgatgagagattttcattaaagattttagttttcagtgttaaagtgatttaattttattaaatgatgctaatagtaggaagtaagtagttgtttttaatgttctttattgttaagagaaaagttgttctgaaacatttttggtccaacaattgaaatcacaaaagccctgacccacattccctagaccgctaatytgcctctgtctcctcagcacacyggagycatcctctaaagcctcctgagtctccccaacctgggtctgtatctgactatgagtggcaggtgccatgccaaggagcatgtgtcactgtccytgctgcacaggcagaacgtgccctaaacctggacaacagcagaactggttctcagattagcatttactggctattgttcctgagattagtacttcaaacacttggttgtatggatagatgggcaaataagagatcagggtaaagcacgcaccgcagtttcttcaataaaaataaataaaaccatttaaagtaagtaagtggcctgctgatggtgtgctggtagcttcattttccragttgacagacatactttaatgttacctgtgaaaatttaaagacatagaatttctgcaggtacattgtgcatgtagtatttttggttttgattccttaatcctgtaggatgggacctagtcagatttattgactcttcacaggtatcaccaccatgtctgggtgctcatgaattgtgtctgtagtgatatttctcttccacagcttgactggaaacttctatctagatatctttgtgtttggagcctgtaatgactagagtgatgtcatataagtcatttcaatagtatttaatttgataatttgacataatttttcttttttactttatttttgaaaaactagcaatctttytaggatagtaaattttgggttattttcatgcaaaggtatttaatttatcaaaaatatgaaaaaccactaattgagaacatttacatgtacatatagcataagtagtttgcaaattgtataaagctacagcaggtggtacttgatttagcaaggaaagcttttatagtgtaaatttaccccaacagctttatgcatccttcaaaatgatttcttgaccagaatgcttcagtaagaacattgatcacataactcttggtttcataaatgtaacttaaaataaatttaacatcttgtttaaacagctaaaacaaaaggcatgattttgttagataattgcatatatgtatgtatttattttatttttattttattttattttattttgatacggagtctcgctctgtcacccagctgragtgcaatagtgcgatcttggctcactgcaacctccgccttccaggtttaagcgattctcgtgcctcagcctcctgagtagctgggattacaggctcatgccactgtgtccacctaatttttgtatttttagtagagacaggatttcaccatgttggccaggctggtcttgaactcctcccgcctcagcctcccagagtgctgggattacaggttgagccaccacatctagcctgcactaatatatttaataatatattcctttaagaatcactttttgtttttgtcattgttgataactaaagtttcttttgatccctgtgatttgaaaattgttgtggaagactatggataaattataaaacttcttttgttgaagcagtgacttacaagttaagtctgtgtttttgggaacaagtgacccarggcattgcagarcatactactaatttcagtttcagatgggtcaaaagcttggaattrtgagagagcattatctattcagggaactgcaagttaagttaattttaaaattgtcacatggcaatgatcagttataacaagcaaacaaataaaagtgcaagcatatatatatacaggcacacaaacacataaaaattcacaattctggccgggtgcagtggctcacacctgtaatcccagcactttgggaggccaaggcaggtggatcacraggtcaggagttcaagacaagcctggccaagaaggtaaaaccccgtcgctattaaaaaaaacaaacatactggtttctcctcttattcttgatccaatgcaatatatttaacaaaacatactttataataagaagtgcatgaagatcttgacttcaaagatggggaacatttttaaaacagagtatatactatgtgggtaagtgcagagtgtctaagtgtactaaaaaccctaggagctttgatcaaaagccagctggttacatcagttctgttggtaatctttcttgctgatctgtgaccttgaccttgtgcttgtgtctgtatgtcaaatctattttagggatggggaaaccatagttgagtttagtaggattgatgctcccatctcaaaggatatccctgcatatatactataaacactcaagcaattccagaagaagaaagatccattttccattacatttcttattttgatagagattggaaaatattatgctcttgaaaactgatagaaagcaccagttactccaaagagctgttgagaaaggtgagaagcaaacactctctgttaattttgtatttacactcttttcttatacttatgtgctgccaaaataattkgttaatgattattttgtgttcattaagaaaaactattgtttctttgataacagtagaaggtagtgaatagacattagtactaatcataaataggtatgtactgtctgtcatgtaatagttttctggagctttaaaaattgtaggtaaaattaactttatttaacaattttccagtgtcastattttcaagacagagtgaagtacagcatccagaaatgtattgtgtttttgaaatagaaattgtttggcagtttagctctttctctagctcctttgtctagatctttgatttttaacttaaaatctccaactttttcatcttaattttgtttaaaaattaaatgtttttaagattaactatagaggcagtgtaaaatgaatagcaaatttattgaatccgattcatatacctaggcctkctgaggagaattcaaaacaaagaagcccttctttattttgccgtatcaattatggggtgtttctttctgtcaccagaacggttatttcatctgtctcttttatttgtgtcatcaaagatcttaaatctttgtgattatcctccattttattcagtatatagctgttatgagataagcaaaagttccaatttgaatataagctcatatttagcttttaaataaacatctgtttgcaattctgtgaccctacagaagaaagttgtgaacatagatamcttttggggcattaggtgggttgagtgtgtggctatttcaaaaccatttccttcccccggaatttattgaaaagacagtaaaacatattggtcagggctatttccacaactttatgacagcatatcatctttctcgttaaaatgcttgtcattttcatcagctataatttgacaaattacttggaatcataggaataaaattttagatttagaggggtcctcatatacatgtgtccttgcgttgaatgcttgagttactcccgcaggartgtctctaatgagtcttttttagttgggaatgtgaatgacactattttactcctatggaagcagctgacgagcaagttaaagccaatggacctagaagttaggagcaaatttggccttgggccaaaaaattaagtccttcaggttgcagtggagagcagcctsggcagctgttttcgtcaccggtgtctctggtgtccatgccacctgtctctgaggagtatctgcacctaaaatgagaacccctgggagagagcaagaaactcctcagttctcatttcaaatgttgaggccctcagttgagcaaaatgtatttagataattatttttggcatctgttaaattgtatgaccacacatctaccttttcataaagataatacttcaaagaaagttattatcttggaattcagattcccttaaaagacatatattaattttgattcatttttttcaagtaattagaaatatattttaagaaatgaaacttcaggcatattcttttattgtcttattattccctgctgtgaaatgtcaacactwgaatgtttcttttattcctttttaaatgttttttccartgacwttttaattgataatagaggattcactgttgtcttcttaaatgaaacttcgggacccatacctaaaatgttacttttcctttctttttatgtgaaattaagtgttgggttttacgtattttaacttttcattggcccttggtttggaaagctactttcatcccttcggataaaatgtttggagttacatcctgttggtaaattgtttttggcttagtgtttctcattcagcttttaaaacttcctttcaaagccctgctttggagaacaacgagagttctccgaatacctggatctgtattttttttaaataaaagagtcaataattaggactttggaatcttcttagtatgtacttagatatttttcttctaatgtttaatgaaacatattaatgtttttcttaccatttgtataaaaatacccctgaaattatccacagtggaatatagataataatattgtccattaggagttattcttgaatgacataattaagtagccctttgattacttacgcattttgaggaaccaggcaaagccaagtgtcctaatggtcaaagctgcattgtagaaatccctttaaattcagtactcaaataggtattacttgatattgcagaacaaattgggggagatctcatggwcacaattggaagtcatgaggtagtccttagatataatttaaatggcataccaagtgaactcgtagatgtttaatcatttaaatgtgtttttaatggagtatttaattgcaagtaagatactgaatccttaaaaacagctggagaaagaccgttgtcattatttctctattctcaaccaaaaatagtcctacatgtaagaattctgccagatgcattcttcatttaactaagtaaaattttatcacttggattttatcattttaaagtgtgtagaagttccacaaagtttccctttgtttaataaaccatttccaaacagaaaatgtaaaacatattgcaatgaaaatagtttagctattttagagaatcaatatagcacccatttgtgaactgttagtatgcacagtatttactactgtcttttatttaaaaagctctaaaaaaattacctatcacttagttctgtacttttcagatacttataaaaaaaagtaaatgtagctctttttaaaatatactgtgtaattcaagcattttattagatatttcattaaactagtttgtgttgaaacttagatctttccccaaatcaatctacgcatatggtgaagattccatggaattttttcatggtttagtttgattttattactttctaaaataattctttttcaccacaatgattttttccaccacatgatgtagatcagtaaaatcttaactttataaactttaaaggatttttatgcttataaacaattttaaattaataaaaggaagattctgtttataattttaacattgttaagtagttggacatgaattttattatcatgaaatacattaacctttggtatactatcagggttctttggactcagttttagttttcaaatgcttttttaaaaaatatatttgtaagtggtaggaaggataataccacatttttgaagttttaatgaatgtgtccttaatagactcaaacatagtaccttgctgttactatatatgtccattggaaccttttagaagtcaaaagtacatatggaatcttagtgatcttattttttctgtatctttaagtattttggcattttaccattttggcaatgaatttattatttattcccaactgtcctttaaaaaaaaggctaaaataataaaaagtaaaaataacggaagtgtctagaaggatgaggcaatactgaaatcatcactgttttaccgtcattctattcctcccctcccctccctttctttctttctctctctctctcccttccttccttcctttttttttttttttttaaagaaatagtgtcttattctgtcacgcaggctaraatgcggtgtacagtaactcagtcatagctcactgtaacctcaaactcctgggctccagtsrtcctcccacctcagccttccaaagtgctaggattacaggctagccaccgtacccagccccatcttcagttttcttagagcccattatactacattatctttcaagaatgtaaaaaaataaaaataaaacatctggagacactgtctttatagtctttcccttttgttttaagtttttattaaaaattgatgattcagtatttttctgtctgtaatgtcaaagaggaaagttgacaaacgaagatatttcacttagataaaccagaagatgaatggaaaaaaactgatgctaatactttacatgtgaatgattatggtgctattgattatataagcaataccactgactgttgtcttcagatacatcctagatgaatgtttccttccttccrtccattcgtccttcctgttctttctttccacagggtcttgctctgtcacccaggctaaagtgcacaggtgctatcatggcttactgcagccttgacttccccagactcaggtgatcctcccacctcagcctcccaagtagctgaaactgcaggctgataacatcacacccagctattttttttttaatgtttttgtaaagatggggtctcgccatgtygcccaggctggtctcgaactcctgggctcaagcattcatcctgcctcagcctctgaaagtgctgaagttacaggcatgagccactgcgcccagccaggtgaattttctcaaacacagggagcaatgagtaacaatatagttcaaaaatacagttctcaggacaaaaagtaagtatagtattttcatacagttagttattcattaggaaagactgcattgctcggtattcaacactcaagtgttttgtggcaaaaacttcaatggctctgttttyttcaaagggtgtgtgacagtattctttcatcttttatgatttttggaacaccaaatttatttgacamtgttcgtaagtggacagatrcttaaggcaggtgtttgatagaggagattgtaaagaaagagatgatacagaaatgaagtaattyattggattgatcattgtaattgctgttagtctaaaaatgaaatatattgggcaattacgaagcagaaatttctgtcatcttttcaacatcattatgagctattaaaattatcaaaagtaacacattttgaattcttcaagtacaagaagaagacccaagagtccttttaaacacatacctgaaatctggaatcaatatttataaatatttccaggttcatccatgaacctgttgatgagctgtcagtttcaaagcgccttgtccttttcagatatatactccttcaaaaccaggaaaacagggawtgaagaattgaattacaatgttatgtttaaattcttatgaaaaaaaatcagtgaagttgttttgtgtcatttctttattcttattgtgtaaattattcatgaattaacttaaatattaataaaatgtcttttggacccagatgataaatgatgatgactgtttttcttggtgtactgagggttaaaatgaactaaaattgtaaaagagccaggtgtggtggttcacgcctgtaatcccagcactttgagaggctaaggcaggaggaccacttgaggctaagagttcaagatgagccttggcaacattgtgagatccccatctccacaggaaaaaaaaaaaaaaaaaaatcagctctgcatggtggcacacacctgtattcccggctgcttgggagactgaggtgggagaatcccttgagtccaggaggctgaggctgcagtgagctgtgatctcaccactgcagtccagcctgggcaayagartgagaacttgtctcaaaaaaaaaaaaaaaattatgcgagctgattttcacttaagacgataatactgaaatcaaaatttagtacttcttggtatcctgaatgttatactaaattttttgttaaaattaaccattttttcctcaaaattttatggaaccactctataaaaatgacagccaagttgaaacaaacatcactgagttagcttttattctattattgtgtaggttttacttttttctcgttgtatatatgcatttttagtgttcataaaagatgtttcttcactttgcatgtcatatctaccaacctaatgtttaaaggcaggctagtaatataatctacttagtttgtaaactaagtttttccttctggcacctcatgagagttgcagaattyatgatgcctttatttgttcttagtatttttcccttttttttttctttttctgtccctttagtatttttacttcctttggttcttctcatccgccataagccaaattctagaaaagttctgttttctttacttagaagttatttaacaagtatataccatacaagtaaagtcyctcccttactgtgatgcaaatgtttaataactttaaatagacacatgcacaagctctaatgaaatcaccatcaaaattaagaaaataacaaaccagaggattcaatattttataaacaattccagtttcaaaatatacattaattgcaattctctgaagcaggggttcccaacccccaggccaagcctgttaggaactgggccacacagcaggcggtgagcagtgggccagcaagcattaccgcctgagctccgcctcctgtcacatcggtggcagcattagattctcatagaagtgcgaaccctagtgtaaactgcacatgtgagggatctaggttcyccactgtttataagaatctaatgcctgatgatctgaggtggaacagtttcatcttgaaaccatctccaccccgctactccatgcaaaaattatcttcyatgaaaccagtctctggtgccaaaaaggttggggactgctgctctaaagaaacctaattattaaatgtgtgttgacwtttaggtattggtaactaaatatactcaagaatacacctggcaacattcttaagttatatttatataaaaccaggcaagagaactatatgttggaatttcatgaataatgtggttgtctttcactaaaagaaaatgagttaagctaatattgaataacttaaaataacattttaaccttaaaacgtctatttattaggtagtggtcatattttaccttaataccctaaatccataggtcccaacaagctgtactatttagtatcgtgcctcattttctttttttgctatatttctcaattatattctatactatagaaatgaaaaggcaaggattgggaaaggtgagaaggattgttagtgatttctccctctctagtttaagagatagaaaaggaagatatctaaagaaatttggctcactctgctccctgaagagctttcaatagaaggagctaagtgcgttcaggccttaaggggtgtaagaattcctgctttcctaggatagacacttcattttctgctagaacagtggtaggtgttgctgctgtgtcacctgaggcagcctctccacgtgaccacaatctttgatttacagatttatctcatttaaaaaacaggtctccataagaaaatcctttttctccactacttcatgtaattggtacgttttataggatttttttcaaagaaattaatgaaaaataactgccttgacttagaatattttggaagcaattattcatcttccttttaaatstattctaaatgtgttactggtccacttctctagaagaaagtgtgaaagcttagtgcatacacatagtgacttttatccatactatggtaaccacattttctgaactaaaaatgtttgttttatagttttcatttaaaaatcttaaaacaatctttggaagatttttcatatcacattttttaatttttttgtgsttggtgatataagagtcatgtgaaaatgtgaaaagaagtagcatgaggagaagatatttttattattagagatgttctagaaacttaaaggtggatgttcaccttgcctgtttctctagatgttgtctatcacatccctttttaaaaatgaacataattcaccaatcctaagacagatctygaagcagattgggagttcagtaagaatatgttgtattgatttaaatgaaataaacaattgaatatttagaatgaccttctcctcgtgattccttcaagtgatgaactacagtgtgtggtttcaaatttgtgattcraattattttagtatctcatctatatattttttgagagtgagagaatgtgtgtgtttgaatgtcaaattcccttccttcctactgggaatttggtcattgaataacttaatgtatcccaaggttcagttatctgttgactgtgttgcactgtagtaattataattagcacagtcctcagacccaaggagcttaataaaattatttgtatatgtcattttcgttcttgaagttaaaaattgttttcatatgtaagaaatgattttcaacctgagaaagctgattgccaaaaaatggattattaagagatgattattmttaatatctgtcatctactttctctgtgaagataggaaataaatggtagagaggtaaataaatggtaaaatacagtgttagagctcctttacaaggaaactgtgataattcctttttaaatcaacttccaaatctgctttgtaaattcagaaatgtgtaaattcagtctttttaaagcaatgaataatactttgcaaattatatcatgcacagtaaaaagtagaaagcaataacaggagtaatatgaactcaaagatgctccttatttcattcttattcttaaataaagtatgttttatggctgtttacaaaccagttttcaaatgactggtatgattttgactttcttgagtctacccaagagcaaaaaggttggcagtggtgtggagagaaatacagtggacttgcatatcccattaaatggttgttaaatgtcttaactagttgagaattaattgtatattagcagttgttatttttgttttgyttgttttgagatagagtgtcattctgtcacccaggctggagtgcagtggcacgatctcggctcactgcaacctctgcctaccaggttcaagcaattcttctgcctcagcctcctgagtagctgggactacaggcgcatgccaccatacccggctaatttttgtatttttactagagatggggtttcaccattttggtcaggttggtctcaaactcctgacctcaggcgatccacccacctcggcctcctaaattgctgggattacaggtgtgagccaccgtacctggccatattaagttttttgagagaattagaaaactgggtttcctcaactccaagatgttatcagttgtaaaatgtacccgtatgttttataccactaagaaagaaaaataagcctccaattaagcaacatgccatcaattgtaaaatataaccagaggggggagaaaagtagtgtttagctgggatacctccctactccctgaaaaacaagtcagggttttattagtaaatgaaaatgggagaatggatatttggtggcagtcatgataaccatttcatttctatatcattattaacctcttaaaatatccatcttaagtacattatggcaaagctkcttaaaatggtggcattggaatctcaagaaagtctcttctcatcctactccttacacagttgaaattaattgttgctgcctcctttctgtatctttttctttggctatcatttcttatccttttaatcaataaattcaacaatttgatacaatcagataattatttcctaaagtttgacttagagttaagcattgtacttaaaaagctacagggtagtctttcaattaaaatttatcttttaaattccatagggaccaaggtatttgttgatagcttcaggtctgataacttaaacaaaatgttctggcatcttgaaaaacaaactgcatggaatttattccagcttctcttccaaaggtgtcatggccccccttccttaggtcaattttgacacttacctatcaagttttcagaaatgcaatgagttcttgcttcttctgttgtgtatgtgttagtgataggaaattttttggtctcttcttagataataaatatcattggaatatttttcaaactgtgactaaaatgtctttggcattctccattgtactttttatatatgtttatgccctccctgtcttctgtatctgtaaggaatggacctgacattaagacttctccatagagcacatgagtaaggatttactaacgaactacattaaacccttgatagccctgaacaagcatctaaagaatcactcctctctgtctttaataagtcatggtaaaaagtatgggtaggtaagtttatgactgtattttaatgtttatgaatatgattaagatggtcacactttgaacagactcacaaaataatcttcaacttgttagtggtttcatttttttgaaaacggaaattctaaaaattacttatggaatgtctggtgtttgggggatgatgtcagaaatgaatctgttctgttggcctcaaccccacatcagactcatcagagtctgcatctcttttcctttttctgcacatctacttttgtttcttcctaagtgcccagtaatgtaaggaagcaagttctagttcccctgtagagctataaagctataaaggagactgaacattcacattactttgcagaaaggtgcttatgaaaattcagagacttggcggctttggaagatggctatgtaacattaaagtatgttctcttctctaatgatttgatcattttaacagtatgcattaacccacaggatttccagtagacattttcaattgaataggaacggcaataaaacaaattactaaagtgactataatccatttatatgtctattatttatatgtaatatatatatacatttacagatgctatattattttgcttgtaggtatcataacgtgattctagttctgcctccttaactattcttatttttattttttttagaacactgatatttgcatttaatggggaacaaaagatgaagaaggaaaaggaatatattcactaaggattctatctgcttactgctacagacctatgtgttaaggaattcttctcctcctccttgcgtagaagttgatcagcactgtggtcagactgcatttatcttgtcattgccagaagaaatcttggacagaatgtaacagtacgtctctctctgattgcgatggaaggtgataaactgatactcctttattaaagttacatcgcactcaccacagaaaaccattctttaaagtgaatagaaaccaagcccttgtgaacacttctattgaacatgactcatggagaagagcttggctctgatgtgcaccaggattctattgttttaacttacctagaaggattactaatgcatcaggcagcagggggatcaggtactgccrttgacaaaaagtctgctgggcataatgaagaggatcagaactttaacatttctggcagtgcatttcccacctgtcaaagtaatggtccagttctcaatacacatacatatcagggrtctggcatgctgcacctcaaaaaagccagactgttgcagtcttctgaggactggaatgcagcaaagcggaagaggctgtctgattctatcatgaatttaaacgtaaagaaggaagctttgctagctggcatggttgacagtgtgcctaaaggcaaacaggatagcacattactggcctctttgcttcagtcattcagctctaggctgcagactgttgctctgtcacaacaaatcaggcagagcctcaaggagcaaggatatgccctcagtcatgattctttaaaagtggagaaggatttaaggtgctatggtgttgcatcaagtcacttaaaaactttgttgaagaaaagtaaagttaaagatcaaaagcctgatacgaatcttcctgatgtgactaaaaacctcatcagagataggtttgcagagtctcctcatcatgttggacaaagtggaacaaaggtcatgagtgaacygttgtcatgtgctgcaagattacaggctgttgcaagcatggtggaaaaaagggctagtcctgccacctcacctaaacctagtgttgcttgtagccagttagcattacttctgtcaagcgaagcccatttgcagcagtattctcgagaacacgctttaaaaacgcaaaatgcaaatcaagcagcaagtgaaagacttgctgctatggccagattgcaagaaaatggccagaaggatgttggcagttwccagctcccaaaaggaatgtcaagccatcttaatggtcaggcaagaacatcatcaagcaaactgatggctagcaaaagtagtgctacagtgtttcaaaatccaatgggtatcattccttcttcccctaaaaatgcaggttataagaactcactggaaagaaacaatataaaacaagctgctaacaatagtttgcttttacatcttcttaaaagccagactatacctaagccaatgaatggacacagtcacagtgagagaggaagcatttttgaggaaagtagtacacctacaactattgatgaatattcagataacaatcctagttttacagatgacagcagtggtgatgaaagttcttattccaactgtgttcccatagacttgtcttgcaaacacsgarctgaaaaatcagaatctgaccaacctgtttccctggataacttcactcaatccttgctaaacacttgggatccaaaagtcccagatgtagatatcaaagaagatcaagatacctcaaagaattctaagctaaactcacaccagaaagtaacacttcttcaattgctacttggccataagaatgaagaaaatgtagaaaaaaacaccagccctcagggagtacacaatgatgtgagcaagttcaatacacaaaattatgcaaggacttctgtgatagaaagccccagtacaaatcggactactccagtgagcactccacctttacttacatcaagcaaagcagggtctcccatcartctctctcaacactctctggtcatcaaatggaattccccaccatatgtctgcagtactcagtctgaaaagctaacaaatactgcatctaaccactcaatggaccttacaaaaagcaaagacccaccaggagagaaaccagcccaaaatgaaggtgcacagaactctgcaacgtttagtgccagtaagctgttacaaaatttagcacaatgtggaatgcagtcatccatgtcagtggaagagcagagacccagcaaacagctgttaactggaaacacagataaaccgataggtatgattgatagattaaatagccctttgctctcaaataaaacaaatgcagttgaagaaaataaagcatttagtagtcaaccaacaggtcctgaaccagggctttctggttctgaaatagaaaatctgcttgaaagacgtactgtcctccagttgctcctggggaaccccaacaaagggaagagtgaaaaaaaagagaaaactcccttaagagatgaaagtactcaggarcactcagagagagctttaagtgaacaaatactgatggtgaaaataaaatctgagccttgtgatgacttacaaattcctaacacaaatgtgcacttgagccatgatgctaagagtgccccattcttgggtatggctcctgctgtgcagagaagcgcacctgccttaccagtgtccgaagactttaaatcggagcctgtttcacctcaggatttytctttctccaagaatggtctgctaagtcgattgctaagacaaaatcaagatagttacctggcagatgattcagacaggagtcacagaaataatgaaatggcacttctagaatcaaagaatctttgcatggtccctaagaaaaggaagctttatactgagccattagaaaatccatttaaaaagatgaaaaacaacattgttgatgctgcaaacaatcacagtgccccagaagtactgtatgggtccttgcttaaccaggaagagctgaaatttagcagaaatgatcttgaatttaaatatcctgctggtcatggctcagccagcgaaagtgaacacaggagttgggccagagagagcaaaagctttaatgttctgaaacagctgcttctctcagaaaactgtgtgcgagatttgtccccrcacagaagtaactctgtggctgacagtaaaaagaaaggacacaaaaataatgtgaccaacagcaaacctgaatttagcatttcttctttaaatggactgatgtacagttccactcagcccagyagttgcatggataacaggacattttcatacccaggtgtagtaaaaactcctgtgagtcctactttccctgagcacttgggctgtgcaggktctagaccagaatctgggcttttgaatgggtgttccatgcccagtgagaaaggacccattaagtgggttatcactgatgcggagaagaatgagtatgaaaaagactctccaagattgaccaaaaccaacccaatactatattacatgcttcaaaaaggaggcaattctgttrccagtcgagaaacacaagacaaggacatttggagggaggcttcatctgctgaaagtgtctcacaggtcacagccaaagaagagttacttccyactgcagaaacgaaagcttctttctttaatttaagaagcccttacaatagccatatgggaaataatgcttctcgcccacacagcgcaaatggagaagttkatggacttctgggaagcgtgctaacgataaagaaagaatcagaataaaatgtacctgccatccagttttggatctttttaaaactaatgagtatgaacttgagatctgtataaataagagcatgatttgaaaaaaagcatggtataattgaaacttttttcattttgaaaagtattggttactggtgatgttgaaatatgcatactaatttttgcttaacattagatgtcatgaggaaactactgaactagcaattggttgtttaacacttctgtatgcrtcagataacaactgtgagtagcctatgaatgaaattcttttataaatattaggcataaattaaaatgtaaaactccattcatagtggattaatgcattttgctgcctttattagggtactttattttgcttttcagaagtcagcctacataacacatttttaaagtctaaactgttaaacaactctttaaaggataattatccaataaaaaaaaacctagtgctgattcacagcttattatccaattcaaaaataaattagaaaaatatatgcttacatttttcacttttgctaaaaaraaaaaaaaaggtgtttatttttaactcttggaagaggttttgtggttcccaatgtgtctgtcccaccctgatccttttcaatatatatttctttaaaccttgtgctacttagtaaaaattgattacaattgagggaagtttgatagatcctttaaaaaaaaggcagatttccattttttgtattttaactactttactaaattaatactcctccttttacagaattagaaaagttaacatttatctttaggtggtttcctgaaaagttgaatatttaagaaattgtttttaacagaagcaaaatggcttttctttggacagttttcaccatctcttgtaaaagttaattctcaccattcctgtggtacctgcgagtgttatgaccaggattccttaaacctgaactcagaccacttgcattagaaccatctggagcacttgttttaaaatgcagattcataggcagcatctcagatctacagaacaagaatctctgctaagtggacctggaatcytccatctgcatcttaacatgctctctaggtgtttcttgtgtttgagaaccatgacttatgactttcctcagaacatgagactgtaaaacaaaaacaaaaaactatgtgatgcctctattttccccaatacagtcacacatcagctcaaaatttgcaatattgtagttcatatattaccgttatgtctttggaaatcgggttcagaacmctttttatgacaaaaattgggtggaggggataactttcatatctggctcaacatctcaggaaaatctgtgattatttgtgtgttctaatgagtaacatctacttagttagccttagggatggaaaaacagggccacttaccaaactcaggtgattccaggatggtttggaaacttctcctgaatgcatccttaacctttattaaaaccattgtcctaagaacaatgccaacaaagcttacaacatttagtttaaacccaagaaggrcactaaactcagattgactaaataaaaagtacaaagggcacatatrcgtgacagaattgtacwcaatcactccattggatcttttactttaaagtagtgatgaaaagtacatrttgatactgtcttagaagaaattaatatattagtgaagccacatggggtttcagttgygaaacaggtctgtttttatgttcagtttgtacaatccacaattcattcaccagatattttgttcttaattgtgaaccaggttagcaaatgacctatcaaaaattattctataatcactactagttaggatattgatttaaaattgttctacttgaagtggtttctaagatttttatattaaaaataggtgtgatttcctaatatgatctaaaaccctaaatggttatttttcctcagaatgatttgtaaatagctactggaaatattatacagtaataggagtgggtattatgcaacatcatggagaagtgaaggcataggcttattctgacataaaattccactggccagttgaatatattctattccatgtccatactmtgacaatcttattgtcaacactatataaataagcttttaaacaagtcatttttcttgatcgttgtggaaggtttggagccttagaggtatgtcagaaaaaatatgttggtattctcccttgggtagggggaaatgacctttttacaagagagtgaaatttaggtcagggaaaagaccaagggccagcattgctacttttgtgtgtgtgtgtgtgggttttgttttgtttttttggttggctggttgttttcgttrttrttaacaaaggaatgagaatatgtaatacttaaataaacatgaccacraagaatgctgttctgatttactagagaatgttcccaatttgaatttarggtgattttaaagaacagtgagaaagggcatacatccacagattcactttgtttatgcatatgtagatacaaggatgcacatatacacattttcaaggactattttagatatctagacaatttcttctaataaagtcatttgtgaaagggtactacagcttattgacatcagtaaggtagcattcattacctgtttattctctgctgcatcttacagaagagtaaactggtgagagtatatattttawatatatatatatatatatataatatgtatatatatatatattgacttgttacatgaagatgttaaaatcggtttttaaaggtgatgtaaatagtgatttccttaatgaaaaatacatattttgtattgttctaatgcaacagaaaagccttttaatctctttggttcctgtatattccatgtataagtgtaaatataatcagacaggtttaaaagttgtgcatgtatgtatacagttgcaagtctggacaaatgtatagaataaaccttttatttaagttgtgattacctgctgcatgaaaagtgcatgggggaccctgtgcatctgtgcatttggcaaaatgtcttaacaaatcagatcagatgttcatcctaacatgacagtattccatttctggacatgacgtctgtggtttaagctttgtgaaagaatgtgctttgattcgaagggtcttaaagaatttttttaatcgtcaaccacttttaaacataaagaattcacacaactactttcatgaattttttaatcccattgcaaacattattccaagagtatcccagtattagcaatactggaatataggcacattaccattcatagtaagaattctggtgtttacacaaccaaatttgatgcgatctgctcagtaatataatttgccatttttattagaaatttaatttcttcatgtgatgtcatgaaactgtacatactgcagtgtgaatttttttgttttgttttttaatcttttagtgtttacttcctgcagtgaatttgaataaatgagaaaaaatgcattgtctctggtttgaaatgactgttattttgtgggctttctctggtttttaggttttccataaacgtaaaacacattgctatgaatataacagtgatcttcaaggatgttttgcccttcttagaaaaataaaggggacaaaaaagaaggtggctrgcaagttagtgcactagaaacagggtaattaaggcataactcaaagtgacaatcagcctatggcctttctcccatgattcagtgtgtaactagttgatcactgtaaatttttaaactagaaaatagtttgtgcagtattcaaaattaatgttgactatatgtatatacatacacacttcattttaggataagacttyatcagaaggcttttatccagtttttaatgggtgtggtttattttaaataaaagaaaaaggagtttaataattttccaaaaatgaatgtgtatgtatatacacgtgtttacatgtttaaatatatgctgtatgtgtataggtaatgagtaattgataagcaacatacatactcaataagtattagagaccagtggattccaagaaaaaaaaaaaaactttgtacccaggtaaacttaacagcttaggaatttttatttttacaaataatgataatttatgagaaagacattttcccaaagaggaattctgtttcctgggacccagataggtctattgtaatccatgcagcttctctcttaataggtttataaatgtctaaaaatgttcaagtaataaaaatacttcctgctgttctacattattaaaatgttgaaaaattgcatcttgctatttgtataataacagaatgagagatgcacaaccatgtcttcttttatttacatggtgaaaaaccctgacaagtgcatcaagtagtgaattgcccaggagggatttttatgaagagaagcaccagttagctattcttgattataaaatagtgcctgtgactttaatatggagggtctttaaaaatcaattcagattaaaatcacatactatataaggttctatttcaagcttgttagtgtggaaaatcatcaacaaaagtaattttgaaatttattttcctaccactggtatcactcaactatgacctgtttggctgtaggaaacaggttttaaatgttcattattaagcatactggtaatttttttgtttattccataaaacttgtatctaatactacctcaccttataagggttggtagaggaagcttttggcatcatttagcatcatttaatactccaattctctataagtggctggcacaacaatatctacaacatttttcagattccatcttcataaataagttaaagactctcactctaaaagccaaaatttatgtacttgagttggaggccgaataataggaaatagagtcccataaattccagtcctggggaggtgctgttgcacttttgatgtcctcttatgagtgtctaaaagtacgcatataaaccttttaatcagtaaaccaaattttgaaatagtatacctttgcagtcagaagagaatttttgagacattcaaaagtcktcttacagcctttatgttgacacaaagtcctagacaaccacctgctttccctctgttgcctttaccaaacttcattggtatgtgttccaaaccttaagaaaagctgcaatccttttggaatattcattttcctcacttyagctgagaaacattmacctctgagatcacatctggaaaagaaaatgacctaacgttttatagttgtcatagcccacatttttggaaagctatgtgaaygatgccacacaatagagccgcagtgcaggtacagtgcattgtctgagattgtattttcccttagctaattgataaaataattcaagaayagaaccatggggtaattttcttatcattggaaaactacrattttctctaaaggcctaagggttgcctctggcaaacattaatagctgatctttccacaagctagcttcaagtccttaaaagacttttagcaccaggttggatgtgctagctagcctcrttacattttacatcgtacctggccattttgcttctctgcccatgtcttctgagttttcttatgttcttgtttgattcacagtggtgtctttgagtatatagaaatgcttaggtaaactgggagagatcctgtttctctccccttcataattttgtagtcactttcaaaaaccaaagttgtaatacaaaccttcgccacttccgcaacttctaaatcatggctttctcctttcaattaccttacttttgggggggaaatgtccattagaaaagcacttagagtgctgatagcctaatgtggataaaaacgggctcaatccagtctgtgggagagactaaagtatgggaataataccagtgggttcaatgctgtaacacacactgatcaataagctttagatctctagcgaaggcctttctctcccttttccctgrttgctttcctataacaaataaatactttttctcacaagaccatacctttgagtttgctacctacttccattacatttccgaccccacttcaacagagaaagtgtttctttaaagctgcagtggcctttccctgtgtccataaaaatctgggcttttgtccatagagctctttgctcttttctgcttttctaaggrcagttgacaacaatgtcggggcaggggggaagcttccattccccacccccaacaacatccacaaagagatttttatctcctaagtggagtcaagaatggggacttacacatggctaaactctggggatagtctgaccagagagagggtagatgaatttagggcttagtgggctcaagcatgattacctgctcctacccacactttcacctccataataaaatctacctcactttacatagttctgtgctaataaagataatcatgataatctttccaaagtaagcagcagggatggtcttttagatccctttggaattgcttgcatcccagagaattttgtgcctttactactaaagtcaggtctacctgccaaagaatagacagccctctgaaggggagatttcctgcttgtagttcactctggaaaggcctgttctggggagactgagatgcttaagggtgaagttctggcctactttgactattatagatgatatataccaagagtgtagcaatcaaaaatcactcagaaaacaggcaggcctgagtcagaagcagcaactccttctacttgcatttctggcctgggcaagccattgacccatttttctctttggttttcacaacccagtgtctcctagttctcttcttaatgctaatttcatctggtctcataacagatttattttcccataactgccgatattctgccttacagctgtctcttccttcattacatcttgagcagaaacagccatccctatgtcttcaagcacctcatactgtattccaagttccttctaattgtctagttgtcttctgtttcctaccactcatgaatatccagcttgtcaacctattagctaaatttcaacatgccccaatcttgaattcagtatacagccattctccccagtttgttcttctatccctttgttgggaatttgcttatttctaaaaatgttggtcctcagcagattcttcttacgctagccactttttgaagactttcctaatctgtagcttacaacccatatcttttgccttaacccagagcgttatcatgtctcayctcagttattgctctagcatctacttgggcctgcttccccttcccagttgtgataatagccactattgctagagcaatcattctaaaatacaaatctgttaaatctgcctaaaatcctctggtgactttttattgctcatgaaattgcacactcacttgtctttaggggcctgggggagtagtaaagaatgtaaggcttctggtggaatactgtaggaaggggtggctctaccttaaatggaggaggtaaagttattctagttcaaatatttttaaaacaagaaaaatccatgtgttagccgaacaaaagtgatacaactactagtgtccagtgtgagcccatggggttaattctgtgtcctccaagctccttagacttctggctctgcctgcattttcaccttttcaactcgttctcctaccctctaacagcattctgtgcatcatcaccaatcattccatattcaaacattcccaaataagaactcactatttcctgagtgctcctgctttcttggcatcagtgccttcagtcacgtaacaytctctgcctaaaatacctccttcctttgctcattctgaacctagtaaactattcatctttaaaactttaacacatttacttcctcaaagaagccctccctccctaattcactattgtaggacggagtgtgtttctcagccctytgcaataccaaatgcttattgcacttattacaatggttaacaacatactttgtaactttgcattccttttaaagacaataaagtgtatcttcttaatcttacattcagtgagtgcccagtatatatctctttttttttttttttctttttgagaaagagwcttgctctgtcccctagsctggagtgcagtggtgcgatcttggctcactgcaacttccgcctcccgggttcaagcccgtctcctgcctcagcccctccagtagctgggattacaggcgtgcaccaccatgcccgtctctgacctcaagtgatctgcccacctcagcctcccaaagtgctagaattacaggcatgagccacctggttcatatcttgatacatagcagttactcaacaaatgtatgccaaatgagagaatgaatgaaaggtgatctcaaacaaaaaaatgaaaggctcccctccctgtctggaaggaaactaagtaatgtataatgtaggggcgcaaccacgtccctgaggcaagtcccagcctccctagtcacctctagcctagggctcatgatctatctgggccaggtcagacattctcccttctgccttctcaaatctcctgcagaaatatgatctctactaggaaagtcctgataagagaaactggttcttaaaacgagaatgggaactttgcagattttgccaataaaaacctaattacctgctgaaccataccttcctccaaacaatagcaagagcatctcagaagctttgcttttatcagggaagctgacgatagtactgcggtgagcctgggatcagaattcatggtctgtcctgaaaattagccaatgaatatatcatgtttcataggattgcattcttctgaactatccagaatcaatcatagcagagaatatactctcctgctgagtatggttcaactaattccttgctgataataccctcaccagcatagaagctggaattagcattaggctatttcagatccccaaggaaatccgggtccgtggcggtatggaaatgcaagaaaccagtgtcacttatgaacttggcacgtagcatgagtgcgccttcagtagagggctttgagggtggcaacttatctatgaagaccaaaccaccaggtttttggtgattcggtgggtgcttaataaaagtgtattaaattgatgtgaaaacaaaagcttatctcttatatcaactttgtatcactatttcctgagtgctcctgctttcttggcatcagtgacttcagtcatgtaacattctctgcctaaaatacttccttcctttgctcattgggaacctggtaaactcctgttcatctttcaaacctaacacatttacttcctcaaagaagccctccctccctaattcactattgtcggacagagtgtgtttctcagccctttgaaataccaaatgcttattgcacttattacaatggttaacaacatactttgtaactttgtattccttctgaaggcaagaaagtgcatcttcttaatcttacattcagtgagtgcctagtacatacattttttgtttttgtttttgtttttg

SEQ ID NO: 10040 - DNA, 20397 bp, Homo sapiens
acatccagagttcttaagcttgtaccctaacacacaaatttgacttctaaccctgaaatatcctatatatatttctaaaactgtttgtagttttcttgagaaaaagcactttataatttactcagttttcagtaataaaattaacactgacttgaatgtatttaaaaaaattctccacagttttgtcttcctcagattgtttttatccttattctctgaaattcctgttttattgtctaagacttaagagattcagctttatcaagttagagtacagtgtaattcaaattctccctcccttgggcatagttactgaagttcaaatttccttaagtattttttaaaaacctgattttagttttttttttcctgcagaatcttaacttttccattattctggatgacaaataaacatttattaaaatgtgttaraattagtatttactaggttcctaaattgtcagtataggtactttgatcacacatcaaaatggaatttctgcaacttaaagcattttgttacaaattgtagttgaaatagaattttatctatttgtctggatgaataggttgttgggaatgaaccagttatctgttcttttcttccaaatgcaaatggtgcagctagttgataatagtatattctcatcctactataaagtgcaaatttcaccttaattttgcatattttaaaatttttgtttaccctttgtagcatatttacattttagcatttgctaacattgatttaatgtgttaaagattmattttggatatagggttgacttgttggagatactagttcataattttaaaattcccaagagaagtgtctttgaagtggtaaacacagtgcactttaagccacttctcttcccacagagtccagctgaaggaggtaagggcatgctgcatgagagtaatgccgtgatgagtgtcttactctggtaaaatgccatttacaatgcctggagactgaacactgaacaaaacatagtgcccttagaatttcactggaaaaacatgtgaatcacataagttagttggcaaaaggaactgatgtgtatgtggtggggttgctttgaataaagtatttcctmacctattctggggagaacgctcaactgatcttagagaagtgtgaaatcagtttcatagacttagggaaaaatctgaagtgcttgcactgtgagggcagaggcctgcctcattagtctagctgtatgaacatgtcagtccacagaagcagtttttacctgtactcatctgcccttcagtcagctttgtgacagaagggcaaacatcttcacagaagaaaaagttcagaaggttggcattggtrgtttcattgctacagaataatagtgttacttgatagtatctgactaaaagagctctcattttctagtacttagtagtaaaaagaatgtggtggagtcctccagatgtctagtgtgggtggaggatatcaactggttatttcagtgatctacagccttaccttttgaatgctaartgtctggaaacttcaggcagggtcctacaaaacaaactgccatcaagattggtgtgtaccatgaaggcagttttagatagtttgactgttcatggctgcaagaaagacctaaaattcaagggcccgtgaacttcagatacgtaaaaggaatatcacttctgttctagaagagtactaattagacttgtttgtgaaatttgaaaatttggctttgagacactggtaacaaacatatctgagccctcctaagtttggtcagcacggagtagtagctctggcatcatgtggctgtgtagagctccagtgtgatttcaagccccctctaaaaactgccttagtctgcatgaagkagttaactctccaaagtgctttttgtctggcaaatcccttcacarttttcacctctcgtctaaaagcttccttaaaggaagccttccttgatcccttaggctaggttaggtttccagtctgtgttctcatagcactctgcactttttggttccttaaagcaactctgtgttattttttagaattttaatctgaatctcgtgtgtcacatacctaggtcagaaaatactggaacaatgaagttaagatttagtaattcaaattatgtaaaatgctcatatatatgtttttagattagcagctttatgatgccgatgctgaaggaacttttcaccccattcttacaagtctgctactgttttaagtgacatccttatagttgtagataagcaaatgtaaggttatatcaatgtgaagaagcccttagtatcacattttaaaatttatcatttagcaatatgacttttaaatttattgtttccgaatgagtgttgttgaggaatgttagcagtagtaaaatcttgtgttacaagatttttgcatttacatgaactttcactcatttttcagaatttgttcctagagacagagaacccaatacaaaagtgagaacatgtatgcataatcagaaggatgcagtgcagatgcctagtgaaactctgaaagcaaaaatggtacctgagaaagttccccgcagatgtgctactgttgctgcaaataaaataaagataatgagtaatctaaaagaaacgatctcaggaccagaaaatgtctggattaggaagagtagcagaaaactgccccatcgaaatgcttctgctgcggctaagaaaaaattactgaatgtttataaagaggatgatacaaccataaattctgaaagtgaaaaagagctagaagatattaatagaaaaatgctttttttaagggggttcagatcctggaaagaaaatgcacaatagtgactatgagaatgtagaagtggcatctgaaaacaattggtacacaagtaaactggcagttacattctgctcccagctctaaaattactcccttattggcatctttggaggaattttctaaaagccataatccagtgggttcctcccagtcagctcttgtacagacatgtgctctggggaattctgaggaggaaataaattgcagagtctgtaggtggagaggtggaaagaaaagacaaatggcctgctataagactactattcctttccagaatgcaaggccttgaagacatgattccttagaggaagaatataatgggaagtgtacaggstaggaagaacttgaagtgaacaaatttcaaaatcttaacctgatgctaattttcagggttctccattacagtgtaaaaattcagaccacgacaactatggtgtcatgaggaaaaaaaatcaggcatttttccaaaggaagtgctaatgggcctatttgacttctgagtgaagcaaaaactacccagatccattccctayaattcacatccccaaaggtcaaaaacaaactaggaggacctgggaatttcagctggagatactgattattgagttctgaagtagagtgttggaaataggcaattagagaaagtccattgatgtcattttgtttataatattgcagttcatactgaatgaccacttgatatgactaattcagggaatatatatttttctatgaaagctatgaatgttactatcacggcttttccttatttttacttgtatgtagcagcatttacagaaatgccaaaaatgtgcctcattaagaggcaggtcttaatcagttagataaaaataaaatgtatagcttaagatcaaaacagtcatatttttagatacagtgaaatcttttatgtttctctacagcaccttaaaaattagaacttgaatactttgagtaaacttactacaatctcatsccaacaaactttaatggtagcatgtttggcctatttcattgtggcctgtactaggattagaaaatttggtcgtggtataacaaagaagtgtatttacaataggatttaatttgttgttaatatgtatttgttgaaattaaaattgccagattaaatgaatatactgtcgcatctttttaacatagtaacgtgttactggaaaaattaagttgttgaaagtaagttgttttcccatttaaaaatatctgaatatatgatttgcatgtgtaaatctgaaaaactaaactacagaaacctagggttttctatttcttttttaagtcaaatgcatttttttttttttgttatacagatgaaccaagtgtctaaaatacttgagaaatttgtggttgcatgtctgttttaaaaaaaaggctttttgttttttagcataagccagaatattctaacctactaagtctgtgtcctttgctccytttgtagtatactttcatctaaattactgatccccaatatgttgatacacaggtgagaaagggaagaattcctaataaactgctattacttttaggtgcatggggtttgatttttgagctctaatgaaatgcttaaacttctttccagttcaaattttacacttaatttrtaatatttattgagtatattatgtcctcaacaagtaactataaaatgaaatacttaactcggtgaagactattttatgcaaagtttttttttttttttttttttttttttagcaatttcagkgtaatgaaaraatttaagctttgaatttataatttgctgkggkggggttaatttctgtcagtatttgarattgtattatcagtcttgcataatgaaatccttttttggctaagtatttaattcgaacatatttgcctttttaaaaagtgcttggcctaaacttattgtaactgcatgaaataagcatttgcttaaaacttaacattgtaaaattgttctctctgaaatgtgtgcaraatttaaatcatggccaaatgtattactattaccctatttacagtaatttgctttgcaraaaatatttcttcatcatggaactgtgaaatcaaattgaaratcttactggtaaaaatgacaaattaacaaaaggactaagacaagtggtgcccaaacaacctttttattctgcagttccatcatcataatagaccagttaacccaggagtcctaatgttttaaaacatcattgtggtgatcttgtttattctatctcactaaggatatccagtttcctaarctcttactggctagcaatttcgtcttaattttattgctaaatgttcaaattttgcttccaaactcactttatttttgcagatgtgtacatctgctaartactaattttatgtaaatgattttgttgattatctttccacatcttaaaatgtttctaacagctttgagattttatctcaacaggctctctctgaccccaaagtagtacttaccttcgtgactactgacaaagtcacaaaatgcaggcgatgtcatgtatttcggtacaactaaatctaggaaacggttttttcattgcattactgcatattttcattttcatttaaattatgtcccctttttctcttgcttgaaacagtgctcctcgaactttgtcttccagcacattttaaagagaaccaattaaagaacaatcacacattctgcttattaaaggctatttaaaaagaaacattttgtattagaaaatggccaactttaaaacactattttttacactcataaaaatgttttttaaatcgccttgacaatcatcagcttttgaaatgtgaattcctattgccagagtaaaggtctcgtttttataccaccacgaagcgctgtatttcttgctgcccttgcgtccgcccgtgcccgctgtctgagggcgcgcctggctacgggggccctcagtaccaccgcgccgccacctacctgggcagtcgaaatttggagcgggtgctcagtacactaatgctaccccagtctctcctaacgcagaaggaaaatggaaacggacgatgaggggacggccccacagctcccggacgccacggccagcggcgctggctccgcccctgcacccctggttccgctaccgccacgaacggaggccccgccctcctctcgccccctgcccctctagcccgcagtcctcccacctcctggcgcccgcagggctcaagctgcgaatgaaagcctttgggggccggacgcggtggctgaggcctgtaatccaagcactttgggaggtctaaggaggacgatcgctagagtcctggagttcgagaccagtctgggcaacatagcgagaccccctcccccaatctgtaatttaaaaacaaaaaagctgcggggactgctggcccagggcatgacagcgcgggcgggcggtgtagagggcgtggcygcgagctcagggtgtgcctgggagcgagycctgygcggggcgggacgtagcgcccgcgcggtgggggtgtggccgcgagcttgggctgtgcgcggagggcgtggcctgtgcggggcgggacttattgcccgcgcggtgagggagcgtggtctcgcgcaagccggcgtgcggtccsgcggcgctgcagttgtgtccagccggtcacggggcggctatggcggccacgttcttcggagaggtggtgaaggcgccgtgccgagctgggactgaggacgaagaggaggaggaggaggggcggagggagacgcccgaggacagggaggtgcgtcyscagctggcgcggaagaggtgaggcaccgggataasggcagcgcgctcaccgcagctggaaggtgcgcgggcctggcagccgcgacggcgcctaaggccggggctccgcggtcttccgagtggcccccgcrgttgccgccgctccttggctctgcttgggccctgggtctccgtgaagccgcggcgtccagcggcgccagccccaggtgtgtgtggttctcgcgtggatctgctggcgtttcgtggagtccagggtgaagccgctgtgggagggctgggttcaaatccgttctttaaaggctttctggagcgtttctggagcatttctggaggcttggtgtcttgcggactcgtgatcttcccgcttgtcacactgtcttgggccgcagcgctcccgcgggccccaccacgtttgtcgtggattgttcacggacacaccaattccctcgaaactttttaaacctgcacccaacacttcaattagcatgatgtgtcagtagccgatgaacacgctttaaaaaaattgtttccaaacacaaaaaagtgggagaaaatagtcaagtgagccctgacccctacacaaccgggtaaattcaacaggaagattttgccacgtttattttctctcccgccactcctaagcgaattccagtcatcatggcctttcacctctacatttttcagaatacatctcaaacgttttagggattttcttacatatgctattatcacccctaacaacactaatactaattttccagtatcattttgtagtccatgctcactcacgtttacctagttttttcaaacatgacattttacagtggtctgcgtgaatgakaatcctaacagggtccacaggttacatttagacgtgtcacttcatttagagcaacctcctcttacccctcctaagagacaggactgattgtcttgtccagtgcccccacactctgaatttgtctgatagcttcgttgtggtgtcacttaacgtttgtatcacctgcatgtccygtaaaatgaatgttcatttggaggcttggtcagattctcattcaaagttttgtcggcaagaatscttctactaagtggtgctttctgtttcttattgcaggctatccccagctgtctcacttttagggatgctaagattggttcttgggtcaggtggacagcctgatcactattttagagttctccgtaaacacgtatgcartagttttatctgttggttatcattgtccgagtccatcgttttctgaggatattagttatattctttataaaactaacgtgcattttatttattgtaaatcatacatatagtgcccttttgccatgatactgtttrtattgaagttgctttagtttcatcttgtttcttgtgttagggaagtgcggctccttcgaagacaaacaaaaacatctttggaagtttctttgctagaaaaatatccgtgctccaagtttataattgctataggaaataatgcagtaggtaagtgaaaatgcagaagacttagtcattttgttgaaagaatgaaatatacttattttcttccatcataaaagatttaaaatgtttagtactttaaaaagccacagtagagtgattgtatttctgagtaaaatctctctcctgttcctgttgcatcatttttttttgttttgtttttggtagagatggtttcttgctgtgttgccyaggctggtcttgcactcctgtcctcaagtgatcctcctgcctcagcttcccaaagagctgggattacaggtgtgagccacagcacctggtctgcactatctttttaataaactgaaaaaatcagatttaggctgggtgcagtggctcacatctgtaaccccagctctttgggaggccgaggcgggaggatcacttgaggccaggatttgagaccagcctgggcaacatagtgagaccgtatctctacaaaaaataaaaaaatgaagccaggcatggtggtgcttgcctgtagtcctggctactcaggagcctgagatgggaggattgcttgagcccaggattttgaggctgcagtgagccacgatcctcccactgatcgtgctccagcttgggtaacaaagcaagaccccaactcagagaaaagctttaaagaaaatgtttttagcttcaggaacttaaaactcaaggagctgtttctagtgtgttgaggtatccgggtttatgttaatgtttttgagttaatagactcctttgagaacacaaaactctaaagacagtaataattatcaacatgtttaagtacttaagttttaaggtccttgcatgtattaattctcttggtggattaaagtaaaaacagtgtagagtgcagctaggacaatgtacatttacaaatacacacatagacctttatatttttagggtgttcacaggttgtgatgagaacattcaggaaacccagttaagatcccttcctctgtaaggtwcccctagtggttgtagaacatagtaagtacatgatggcaagtaactatggactcatttatataaagttctgctggcctaaagtttttcagaagagtattaccccgtgagcatgtggtagaaagtctgtcaacaaacctgccttcttgatccctagctctaggattgtcttactcagggtgtgtggccttttacttcttgggggcctcagtttctttttctgtataatggtggtattaggtagacggtcttgaatggctctttcagctctcaaattctacagtaacttgagcttactttttattgaatagaaaatayagcttgcagagccaaacactaacttatgtgaattgttttttacagcatttctgtcatcatttgttatgaattcaggagtctgggaggaagttggttgtgcyaaactctggaatgaatggtgtagaacaacagacactacacatctgtcctccacagaggctttttgtgtgttttatcatctaaaatccaatccctcggtaggtgggacttgtatgtttgaaaagcagttatttaagtatcacttacatgttatttactggtagtatactttagtatggcaaatctttcagttgctctgtcagtgtgcactttttctgatactaatcaccagtagtggtttgrctgttaaattttaaagagaaataagtaggtcaatagtggagccaggaaaataagtattacctaagtgttgtcattcacatgttacatatatggtgatagtttgtggtgtgtataaaacttacytgacaaaaagcgtggaacttgacttttcaggtttttctctgtcagtgcagttgctatgttgcagaagatcaacagtatcagtggctggaaaaggtaagagagaaatgaaaacctgtgaatggttagtctacaggagttttcattttttaagggttcgatgtcttttaacttaaacttatgcagtcagatatttatttctttaaaatattgtgggaatttcttttggaatataaagaataaaagaacttgcttatttaacgtgaccaaccagttgtgttttatacttctgtgtcctcccgtcctcaatgctgaggtacagaagtataaaacacagttggtcctcagcattgaggayggtaggtcacagaagtataaaacacaattggattcctcccgcccatctttctttgtttacatcactttagatcttattaaaaggtaaaagggttcttagaaatctatcaaatccagactcttctacttatagaagaggacatttagaaccacagtgattgaagcttacctataagtgtagtaattccaaaaatgaatttcatgagagttatttttaaggtgtcagtggtaggtgggagagggaatgaatgtcaggtgtgtacctgtgactttttttctctggacggcagacctgtagtcgctattctggcactctgacttcatttactccacatcgcaggccccttaagtaggtagtgctggcattacgtgttcatctattcttgtgttgctataaagaatacctgaggctgggtaatttataaagaacagaggtttaagtgattgacagttctgcaggctgtataggaagcatggtgctggcatctgcttggcttctgctgaggcctcaggagcctccaatcatggtggaaggtgaagggggagcaggcagatcacatggcgagagcatgagagaggggaggagccagcctcttttgaactaccagctctagcatgaactgagcgagaagtgagaagtcacgtatcaccaacagggtggtgctaggccattcatgagggatctacccccatatccagtcacctcccaccaagtccggcctccaacattgggaatcacattttaacatgagatttggaggggacaggcatctaaactatatcaccttagttcactaatgaggagagtgacttggaaaaattgcccacctagaaagcagaaccaagatcaaacccaggttgtgacagcaggtgtgttctgtttctccaaggcacactcccacccctgctaggcatgctattattgtctgtggtgttaggtgaatacctagaggaatgtttccattctgtaacaaarttatatgttttttttaatttgaaataaattttatgttaggtttttggctcttgtccaaggaagaacatgcagataactrttctcacrtgtcgacatgttaccgattataaaacctcagaatccaccggcagccttccttctcctttcctgagagccctaaaaacacagaatttcaaagactcggcgtgttgtccattgctagaacaaccgaatatagtacacgaccttcctgcagcaggtggtattaaaatttgtaacatttacattctatcttattgctttattgatactacttttcaccattagaggtctttttgaggtagtttattaatgatgattgataccaatatattgctgttagtcctcaatatctgtagttacaagtgcagtatatttagtttgagttttcagattttccagacacagttatttgaggagctcatgtttcttaactgttgggcttcagacatgctgtgtttctttttggtctttgattattcagaatgcaagccagtgttaaatataaattattggtgcatcaaaagttgataaagtacattttaattatcaaaacagaagttttgaatattgaatcttgatagttgctttaatttttttattaccrtcacwcacatctgccatcatatgacaaagagactgccatttacttttcagtgggtaatatattacataattgttatttattatatgaactgtattaaaatagggtttggttggggtttctttttgctttcaatgtttactagaatgagaagtggctaaatatttcactttatgcattttgtayttatttgttatttatatgctttattatagtcagtagaattttaatctttcagctacttaaatcatctcagctgtattttcaggaaatataaaattaatatttgcaaaagaagagattattaggaaaataaattgactttgaaagaaaatcttcattataattggttcaaaattgcagtaaataccttgattgaaagaggcagctgagataactacttttaacaacagcctttattatttaaaggtgtttaatttaaaagtaacataatagaaaacttacatcgtttttttttcttgtgtattcatagttctaagctactgtcaagtatggaaaatcccrgcaattctgtacttgtgttatactgatgtgatgaaattagacctaatcacagtggaagcttttaagcctatactttctaccagaagcttgaagggtttggttaaggtaaggttttaactcatttaaattaatagctgcattgttataatcagcttagtaacaaacataaatgtatastgtcattttaaaccctaagcaatgcttggagatccattcttctcaaagcgaagctttctagtctggcagtttgaatttgattgtcatcatctcttctgtatacgtctgtaacttgacgaatgctttgttcttgtatgatagattaatgcagtgcaattaaatcccaaatgtctatgtggacagatggttttactgttcaataagcttctataactactttgcaaggttttttaaaaaatttttatttaatttttgagacggttatttttgagtatagtgtggatcaaattattataatatttatttacccaattttacagagaactgtatatgtgaagatgagagaattacataatgaacctcttccttacccttggtttatacctttggkctcattttctaaaaaaattggaacacgtacatgaaaatgtttkccygtaatctcaggtagtttagggattccattgttttctcttaagagacttttttggaagtccacagcctctggtttaagcatggtttctttaaaggaaagaggttgtaacaacattgtccctcagcccggttttattctggaatggccattagttttaagacttttgtggtaagttgttggaagtagctcatttcccaggtctcataaattagtttgttactagattgtcagctccttgtggtaatggaccacgatttttaattttggtatcccaagtttaccacatacctggcatgttgaataaagccatcaataaccatttgttgaagagtacagctgtaaaactctgatttagtatactgcaagcttatcttgcaaattagctagaatccagggtaatctttctgacacatggagttaatttatttttagcatctctttcaaagtatatgctgatcgtcttgtttgtttaaatagccaattgcctcatcccacttaactcagagatgagttcccatgggcaggggctgggctgttttgtttactgctgtaggactgtgtgtagcacacaggtgtgtcataaacrcttggacttgttcagagacttggaaatcatctgtcatatggggcttaaggaaactcagcttttatgaatatactttcaaggggaaatttaactcagcattttcatttttgctttggagataatgattagcaggagggtaagatggtggttctgcagggtgctgttttcttaatgaccaawtacatcagcctgagtcagttcgttgtttctgaccttttaaaagtggtattttcaataaggtggaattattttgagttcttcctgtgtggcagtttagttggatttgaaagatggatgaatcttgggtagaagtgtgcagagggaagcagtgtgagcagagtgggaaagtgtgaggagagccgtgaggagtgtggtgttggtggagaggggaggaaracatcttgtggggaaggtcgggcgggttagagcatagacttcctccagaggccaggagaccatcggaggccaggagatcatcggcgagtgtggcagggaaagggcctgttgaactgactttcccacttgccttttcgttgagaaggagagtaaaggccacgcctgtcccatggctgtttttaagtctcgagtgtggagattgttggtcgtggagggaggggtgttgcctctgcctgaatccctggggtctcactgtattcacttttttctctcctttcagaatattccccaaagcactgagatactaaagaaattsatgacaacaaatgagattcagagtaacatttatacatgatcttaaacattgttttgtagtgtatattacttgtccattcctttaaggggagcagcctgcactcttttgtagattacttttgggggatatattttgagaatgatgaaacggaataaaattgtaaaaaaytaattgtagttttaattccttatttatggtggtattattcacaaccaaaataagccargcattttccttttatccaytaggtgggagtattgttgtatttgaatattttaaggtactatagttaaatttttatcttatttatttatttatttattttttgaggctgggtcttgctctgttgcccaggctgaagtgcagtgtgctatcatggttcactgcatcctcgacctcctgggctcaagcatttcccccgcctcggcctcccaaaatgctgggattacaggtgtgagccactgtgcccaamtttagttaaatttttcaaagctacagatatcagcagatggtattcatgtggcaaagtgtagttaattaggtgtaactaytcattgacctgttggtgattcttaatatgtggaaagtttctggatattttaggagtcctgcagttttttttatcttgtgggtaaaaattgatgacaaagtaacaaaattatatatttactaaaaatgaaacagaaatgtgtatgtcctcactttttagtaatatctgacagatagcctcttcacccagactttcccagggctctctttcaaggctggctctgcgcgtgtcagcagttctcttacagtcatgtgttatcattaggagtgtgaatggaatcatgaaccyggagtagccacacaacttcacaggaccacaaactgaactgcattcatgaaaataaattttaaaatggtggagttaaatgcttcttatctcttctgctttctttttcacctttttagttattgaatcatttacatactatagatttagmgtacttacccatttatattttctagttccagttcatttactgtttttggtaatgattagaagtatggtaaggagatactgtgttctaactccttcttgagtaaacttggtttcctttacataatcaagaattggaagtcttgtgcatagtatgcttatgaatatatcccgaaggcagaaatctaagcatttcccttgttgcaaaaaaagttttcattcattcagaaatgtgcctgcagagccctgaggtaacatcatatgacctggaatctggtcctagctggagctaatcctcttcttgtgctgagggtcagtgtggtaagtaaggaagagtgatcttggaaaagcagactatgttcaatcccaggccagcccttacaggccaggtgactttgggcagatgccttgaagcttcctgagcaacagttttctcagctgtaaactacagataatactggtgacagtactccctgggtggttatctacttcccttggggtccaggttttcatctgcttaatgaaggaaattctctgcttgctttgctgaattgtgagaataatgatataagaatgcttttgaagaactgtaaggtggtatttccatgttgacacacctttgtgtgccccacctcaaagatgctgacggtgatgtggtaagaaaggagtggggagctgctctgggggcagctggagctgtcagtcttcattccttcttgtacttcctcttgctaacttgagaaccacagagcttggcagtgtcaaatggctaagagtggaagtagttgggggacaagttttgcatcggcagtaatcctgggagaaccctagaagcagataactctgggcattgtagtttttaataattttggtaaggaaagaatcataattgcttcagactgtccaggagtaaaccycttcttgtgataagaagcaggcagcaggtgcaggaggttggctgtcagtgcagcagagccacgttagggccagataccaagccaggcacagcggtgcttatccgtagtcccagctacctgggatgctggggcaggaggatcgcttgagcccaggagttcgagtctagccggagcagacatcaggcctgggtaggtttcccattcaaaggagagtagctgaagaaaacaagcaatacgaaggatagaaacagcattaaaaatgcagaagaagagcattctgttgaaaaacatgactgtaggaaacagctattttttaaaagtcaggaacccctgctttttccaaaagcaaataatgagatgtatgagaagcagcagctagctgaaaggaaatttaaaaaatttcatggaaaagattttaacagaagcaaaacttcaactttaaaatctgtattatataaaataacaacaaatagtatgtgatctaagttgtatatatattacatatatataaaatagggtataatacaaagccattatgtggaggactaacttgagttggtgtcctaagatgcaggacagaaatagagaagtaacagatgacacagacaagacagtatatgcccagtatattagagcagtccagagagaaccagtaggatgtgtatagtcatgcaccacataaggacataccactggcggaccgcatgtagacaggggtccataagatcgtatggaactgaaaaattcctatcgcctaggctgtggtagccatcctaaggtcagacctcatgtgttacttgtgtttgtggtgttgctggtgaaaacacgcctactgtgctgccagtttaaaggtccagcacatacaactatgaacagtacataatacttacaataaatgactatgctactggtttatgtacatcctattttttgctattttagagtgtattccttctactcgtaacaaaaaagcgaactgtaaaacagtctcaggcaggcccttccagaggtatccagaagcagacattgtcatcacaggagatgacagttccatgtgtgttactgtccctgaagaccttctagcgggacaagatatggaggcggaagacagtgagatattgatgattctgaccctgtgtaggcctaggctaatrtgtgtgctgtgtctcagtttttaacaaaaagcaaaaaacaaaacttttgaatggaaaaaagcttatggaataaggatataaagaaaaaatatttstgtacagctgtacagtgtatttgtgttttaagctaagttattagaaaagagtcaaaaagttaaaaaaataaaagtttagaaagcagaaaagttacaggaagctgagattgacaycagcagaggcagcagcctgagcagctacaggctgtgctctctcccacctgccctgaggtctctcccttctttctcttcctccaccaccttttctcctccttctcgttgcctttctgcccacccctgttgttccacccctgccccaccctgcctgctctcctttttccctgagttgcctcctgcctggagttcttggttttcatccccactggccaaagacttgaccactccaagtccagctccccatagccctgcttgatatggacactggtatgattgaaattggattaaatgtcattctcaccacctggctacttatgcatggaaaggargttggcagtatcatcagaaagaggagaatcagttaagatgcatgaggagagtggtgcatgtatcagcatctcagaagggagttgttctgagagaattatcatcttggctggacccactagcgccatcttcaaagcaagattggaagaggrtatcagtagctctgtgaccactagcacagctgccagtggaccccctggtcaccctgatgctggtggtccctgctagtcactgtggctcattggaaaaggtggttgcaagatcaaggcaatacgagagagtacagggctcaggtccaggtggcaggggatatgctccccaacgctgctgactgagccatcactatcgctgggattccgcagtccatcattgagtgtgttggacargtctgtgtggtgttggagtcttcccccaaacgcatggccatcccatactggtccaagctgtccaattctccggtgatctttgcaggtgatcaggacaggtacagcacaggcagcgacagtgtgagcttgctttctccacaccacttcgtccatgtgcctcaactgtgacctggagggaccacttctagagttgaccaagctgcaccagttgacaatgcaacaatctagttttcctacagkagatagcaacgctgggrttcagtgcaggtttggatgcatctgctcagaccacttctcataaacaccattccaaatgatactggctgcataatcaggtgtcaaggcaccagaataaatgagrtctatcagatgtctgcagcgtagatcaaaattgtgaacccagtggaaggatctattgataggcaggttaccatcactggatctgctgccagcattagcctggctcaatggctaatcaatgtccggctcaccttaggatgagtggcatggggaacagctagaacaatgcagattcacgtactataacccctttctgctgttcaccaccacccatcatccatctgtagtttctgaacaagcagccatgtcaggttttaaatagttttaaatttttggtttttaacactcatccattcctttattttttattttttaaaaaaatgagatggaatctcacttcattgcccaggctggtcttgaactcctgagctcaaatgatcctcccacttcggcctcccaaagtgttgggattacaggcgtgagccactgtgccagcctgtcatccaccyttttttttttaattaaggtgttttaattcctttctctgttccagtgttgacgctgagattgtatttagcaatrtaagtttccccctgtttttgtagttgtttgttttttgagaaagggtcttgctctgtcgcccrggctggagtacagtggggcaaacatggctcactgcagccttgaccgctcaggctcaagcagtcctctcacctcagacccccaagtagctgggaccacaggtgcatgccacsacacccggctaatttttgtatttttcagagagacaggatttcattatgttgtccaggctggtcttaaactcctgagctgaagcgatccacctacctcagcctttcgaagtgccggtattacaggcatgaaccactgtgaccagcactccctgttkttgttttttggcttatgaatttttctgtttattatgaaaatgtaagagtgagatgttaatacatttcaatttagttctgtaatatcaggaatttttcaaaaaattaaaaggtgcattggagctttttctttgtgggtagaaactggatgccacagtgaacaacaaaaaaaggatgcgaagattaatttattattggagagcaaatttttaaaaaataaatttagtgtagcctgtgtacagtgttgataaagtctaccgtagtggacagtaataacctaggccttcacgttcgctcactgactcaccctgagtgacttctagtcctgcaagctgcatttatggtaagtgccctatataggtgtgccggtttttgtcttttataccttatgtttactgtatctttttaatgataagatatgtttaaatatgcaaatattcaccattgtgttacagttgcctacaatattcagtacagtaacatgctgtacatgtttatagactaggtgtgtagtaggctatagaatctaggtttgtgtaagtacactatgatgtttatgcaatgacagactcatctagcgatacatttttcaggctggtaagcaaaacatgattgtatatctatatagataccagggaaattggcttacttgattatggaggctgaaaagtcccacaacaggctstctgcaagctggagaccctgggatgctggtagtatggcccagtgcaagtccagaagcctcagaaccagggaagctgatggtgtaagtctcaatcctaggccaaaggcctgagggcctggggtaaytggggaggggcactggtgtcagtcttggagtccaaaggctggagagcctggagttgtgatgtcctgttcaagggcagaagaagggtgacccagctccaggagagagagagaattcaccatttcttcatctttttctacctgggcccccagtggatggatggttcctgctgacattgag

SEQ ID NO: 10041 - DNA, 38449 bp, Homo sapiens
  misc_feature (26588)..(26588): n is a, c, g, or t
acaaattaaaatgttttgttagacatttccatatttttaagggcctccttggagctgccaggctgggagtgaggtttctctccctttctaaaccctgtgcccatcttgtcaccctcctggagctgccagcagacttcagattcttctccgatctacagagcagaaaaattcagccagcccttccttgtcttcctatccacagctgcctgcccagactcatgaaacctgacaaaatgcaaggtcttatcattacctgaaccttggacctgttcaaaaatactagttcctgagaataaatatccctggtgtcttcctgcccttcctgcacacctccagtggcttatcaaaatatttgtttcatgcgcacactgggctctcatttaagaggaatttgggagaatgttattttctaatctgcatttcacaccaggctccccctccttcctggggtgctagtgtcagcagaacctgatggggaagtgaggtctgggaggcagaggaggaaggaatgaggggaaaggggaagtttgggaggaaggcttctgagaagactggtgggagagaaggagagcctgcagacagaggcctccagcttggtctgtctccccacctctaccagcatctgctgagctatgagccaaaccagggatttacagggtagggagggtgggataggcagcrgcattagatcrgaggaatgagatggacagacctgggctgtgggctaggagggcagtcagctggcctagggtagcccgggctggtgtcagggtaaggagaggaagggagggatgagggctgattaatttttttcaccccacaggaggaaaagctttcrgactgctgaaggcccagcaggaagagaggctggatgagatcaacaaggtagaaggaagaactaagggggcagagccagggggatggggcgtggatggggagggcctaccctggctcttattttcccctccatagcaattcctagacgatcccaaatatagcagtgatgaggatctgccctccaaactggaaggcttcaaaggtgagggggaaactgtaggcggtggagacagggctgggggtaggagggttaggatttccacaagaacaaggcaggaacagcagagataaaaagtttacttttgtggtagcaaaaggggaacctgcctttattgccctcctgccacactgcggtccctttcccgggcctgcctctctcagcatcccctctagctccttacamcctagcggggcccctcaactccccaaccccacttcctctgcctgcccctcctcctccttccacgttgtctcctccacctagcagttggttggcaaccccttcctcagtcccckgctgaaaaccctcsagtcagcgcttatcccttctgctctctcccctcacccagagaaatacatggagtttgaccttaatggaaatggcgatattggtgagaaaygggtgatttgcgggggcagggtggtgtgcaggcctaagaagacagaggtctctcctacatgctccattcctcatgatttgggagggggcccacctaccacagtgggaggaaggagaatggggatgcggaagtgggagaggagagagagggtctccccaccttytccccatccccatcctctgcccccagatatcatgtccctgaaacgaatgctggagaaacttggagtccccaagactcacctagagctaaagaaattaattggagaggtgtccagtggctccggggagacgttcagctaccctgactttctcaggatgatgctgggcaagagatctgccatcctaaaaatgtgagtgtcaatttccaacctcccctgtacttacctgttttctcctcccccatccctacccttgtccacaggctcaacatttctacacgttgcccatcatcccttcttccatccttagagggacccttccaaggtcccgaccccatccctatccatagtcctggtccccagaaactccaacccctgcccttcctcttcccccttccaccctcacatccccatccccttctagcctttcctagcaccctatgatttattcccttgagaggagtgttccctgatccctgtgcctcttcccatctcaaccaggatcctgatgtatgaggaaaaagcgagagaaaaggaaaagccaacaggccccccagccaagaaagctatctctgagttgccctgatttgaagggaaaagggatgatgggattgaaggggcttctaatgacccagatayggaaacagaagacaaaattgtaagccagagtcaacaaattaaataaattaccccctcctccagatcaagtcagcttagtttttatttgggtgatttttttcctgggtttgggaaggagagacaggtcttgagggaaaggtggcaaggatttggccatatgaacaatccatcaacaacgctatagtgtgtccactacagcagatggtttcacgcaccaagggggattccagctgtgtaagacagccttaacctcaaagaatgcaggcaggwcaaaaacacatgtccaaacaaggtactcaggcccatgacagatttcatgaagagcaaggaataccatgaaccaacattctccaycactataagctttgtcactttgacaaatcactcagcctctgtgaggcttttttctaaaaatggggataaagtgacctatgctattgtgcctgacatatcataagccctcaataatgtttaaaacttgaatgagcyggggccgatggcttatgcctgtaatcccagcactttgggaggatggggtgggcagatcacctgaggtcaggagttcgagaccagcctgacgaacatgaagaaaccccgtctctactaaaaatacaaaattagcctggtgtggtggcgcatgcctgtaatcccagctacttgggaagctgaggcaggagaatctcttgaacccaggaggtggaggttgtggtgatccgagatcgcatcattgcactccagcctgggcaactaaaaagcgaactccgtctcaaaaaaaaaaaaaccgaacatacaaacaaacaaaaaacacttgaatgggtagatgaatgaaagaactggtgctattaaataaagcaaagaatttacagctgggcgtggtggctcacgcctgtaatcycagcacttcaggaggccgaagcgggcagattacctgaaatcaggagttggagaccagcctggccaacrtggtgaaaccccatctctactaaaatacaaaaaattagctgggcatggtggcaggtgcctgtaatcccagctactcgggagrctgaggcaggagratcgcttgaacccgggaggtggaggttgcggtgmgccgagatcacgccatggcactccagcctgggtgacaagagtgagactctgtctcaaaaaaaaaaaaaaaaaaaaaaaaagactggaaggagaaactcattggagacaatgactatggacatcccttttaagaattttgctgcaaagggtaacaaaacggtatgtgtggtagccggccggggagaagggagaagagaatcattttggaagtttgaaaacagaagtcatcttaaatcttactgagcctctgactaaaattctcatctgatttcygcaaacttttctgccttcacttttcataatgaataagccgcctcctttatttagccatatcagcctaggcacaggcccccaaactcatgcctccactaatctgttctctgcacctgagatgtacaccttcttctgaaacttgggtaagttctaactcgttcttcatatctatttatttatatatttttgacagatatctactccgatcattcttcatatcatttttttttttttttcctgagatggagtctcatgttggccaggctggtctccaactcctgacctcaggtgacccacccaccttggcctctcaaagtgctgggattacaggcgwgagccactgctcccgctcccggccctttttttyttctttttcttttttttttttttttgagacgtagtctcactctgtcgctaggctggagtgcagtggcgtgatctcagctcactgcaacctccgtctcccaggttcaagcgattctcctgcctcagcctcccaagtagctgaractacaggcacgcgccaccagtccagctaatttttgtatttttagtagagacggggttttgccatgttggccaggatggtctccatttcttgaccttgtgatctgcccgcctcagcctcccaaagtgccaggactacargcataagccaccacgcccrgcctcatatctcttaataagagtttttctagaaacatttctcaatcaccccaggcataatcatattttatttctctacttctttcttttttttttttttttgagatagagtttcgctcttgttgcccaggctggagtgcaatggcacgatcttgsctcaccacaacctccgcctcccaggttcaagcgattctcccgactcagcctcccgagtagctgggatcataggcatgcgccaccacgcctgggtaattgtatttttagtagagacggggtttctccatgttggtcaggctggtctcgaactcgtgacctcaggtgayccgcccgcctgagcctcccaaagtgctgggattacaggcgtgagccaccgcgcccatccttctytttttttttttttttttttttttgagacgtagtcttgctctgtcacccaggctggagtgcaacctccgcctccctggttcaaggaattctctgcctcagcttcccgagtagttgggattacaggcgcccgccaccacgtagggcaaatttttgtatttttagtaraaatggggtttcatcatgttggccaggctggtcttgaactcctgatctcgtgatccacctgcctaggcctcccaaagtgctgggattacagscgtgagccaccgcgccaggccttatttctctacttctataatatcctgtgcattatctccagcgccttcaaatcatagtcattgaatgatctgttgaatgggtataactctgatgggagcagagagttctagaatcgggtagtaagagacaaasgagggtaacagtactgcatttcacaaaatgaaacccattgttaagaaattacaaattcccaataatttcaaatataaaaatttattcatgaaaattataggttataaaattaaatgtccgtcttagtcgatggttgcccatattttgatgaacgagtcattcctagcctatctttgttcaaatgatttgcatacattatgcaaataggtagaactgcccgaagaatgcctacgctgcgtggtgcggacgaaacgcttcccggggcctttggattggtctgtctagccacctcatttgcatgacgtaatwtaataactggaaggccccgcccctctggtgcatttccccgctccaaccacctcctcaaactcacggcraagggatgcgagagctggaactcttaccaggcctgcggaaactcagccctccggcagctaatcccgcccgccascccccgtcctctctctctttctccctagctgaaggcgccacgggccgtgtgtcgttgccttccacttttggcgtcccaacgtctctccgctcccatctttctactaacgtccgacgcacgctccgcctctttctcccamattcgtcgtgtaaattctgcgtcccaaccgcccagccgacctgcaccgcattcccgccccctcaacacggctcaacggccgacgctgggggcccgcctccttagccaatcggggtcctagtgcccttaagtccctcctctttatgcaaataacctccgcatgctccgcgcgcccggcccttttttttttttttttaaactaaagacagccctggaagtagagggttagggtakaaagtgccccgccctttatgcaaattaaggggcgtgtctaggcgcggagggaggtgggaggtgggagggggtgctcccgggggcggcggttgcccggatgggccgttagtcggggctcagccgcggagtgagcgagggagacgggaggagccgaacccggcgccatccgccgccatcctcccccgccccaccgccatcccgtcccggggagcccctaggcccgggtcccggatccccgcgcacccggccagktgagtctgggtgaaccgtkcsctgacgcccttttccggcgcgggagaggtggtggcggtggcggtggcggcggcggcggcgktggtgggccggggggaggagaagctgccattagccgccgccattttgtcctcctgctgccgggcctgcttgcccctccccctccggtacctctactccgggacccgcacctccggcagttcattcaggatccgtagtctgcccctaaccacccaccgtcttggcttcagggggtgacccctgcgcctgggtccgtaactccctaccctccgctgcgctcctggcttttcacccccatttgtgggccccctccccggctgccgccccgtggtgggccgcgcccgacggttctctcggaagggcgcttttcctccatattggaccccctcctatcatccagcgctgtgttcccccctctggacgcccctcttcgtgtcgagccactcccactctagaatcctgcttttatcccagcatctttgctttctatgttgctcagtcgccctatgtctgctttttcatttttcctkktcctcgtctcctttctcccccaaccccgtttttcttcttgggcctctgcccccttacttcgttgtctacatcstttttttttttgccattcctgtttccatatattttccacctgctttcgtattcattattttctgttagttttggtctattcgctacatgactcttgtattcgttttcccttcatatatttatcttcacagattggcctcctcaaacacctacgaagcaacatccatcttatctctagcttgtcataaagttctttctccccaattttagctttcattctgggcctgtctggatttccctgctttcttccccactatttctcatctctttacactgttcccgtccataaacgaatgcctggtcactctggaatggactgagagacctgtcgtccggcttgcttagggagctggaggtatcgagtaaagaaacactggtgatggacatttttaatgaggataggaaaacgragrtggctctggccttggccctctgttttctggcccatggttacagggtgctaaggtggctycataatgctttttctcagttcttcatatggtaaaacagtatttcatctggaggcgattttttccaggagccaatacaggagcaagtttaggaaaagatgggatatttcaaatacttgaggttcctatagcctgggagtatgtacagccctagttgttctatgaggatttctctggtaccaacccccattccggctgagcaagctcataaaatccttaaactcccagcataccttcctgcaaaccttcccagatggacacgaggctgctgggctgggagcctggggtacagggccctgggggcatgattagggagcttgtgtccaataaacagggaatctaaagtgttgtttcttcttctctgatggaattgtatgcttcttttttagttttctcttgcttgaatttgtcctgttgtaagtctctgaaacgattttggtggagagagaagagattattacttgtagggaattactctttgtagacaggcacaaagggcagagtgtttatactaggaggatgctggatttttacttagatttccttgacaaagktgtctgggggaaaggagggaacatggcatttgagctatgagggagctaagtagatcatggttgcttragaagagtgggcagtttacatagactggaggaaaagacaccagagggcctcatatctgagtccctaatgataatgcaatggagtttttaagtttctgttatggtctgtacaggggacagagactgagacacttgmtgtctggcccacaggctctggcacgttttgggggaggtgcctgcaggacccaacatactcaatgagcttccagcgcaatgtccgatcgctcggggccgactgccaagggaaaggatggaaagaagtattcctcgctcaacctgtttgatacgtataagggcaagtccttagagatccaraaacccgctggtgagagtcctgcaaagatgcttctgatggttgaaagctaggcatgcatggggcatacgttttagagytctttaaagggaagtggctgtagtagaaataccaaaagactagaggagatttcccaactttacactgggtcctttaaagggggtgtgggctctgggtgaacaccagttatcctcctacaaaggcgtgtctgtggttccctgtctttggacaygtaagaattggaggaaaataaakgtggatttgggaaactttgaggccagcttgcttcttgcaggctcatgatcaaccaatctcacataaaagtattgaatgttacatatctcagccttcttgatagggatttcatagattttttttttttttttttttttttkagaccaagtttagctcctgttgcccaggctggagtgcaatggtgtgatcttgacttaccacaacctccacctcctgggtttaagcgattatcctgcctcagcctcctgagtagctgggattacaggcatgcgccaccacacccggctaattttgtrtttttagtagagacagggtttctccattttggtcaagctggtcttgaactcctgacctcaggtgatccgcctgcctcggcctgccaaagtgctgggattgcaaagtgtgagccaccacaatcagcgcgatttcagagattattaagggcaggggaaggaatcccttctaagagaagtttggaggaagtaggtaataaaatattcaacatgtataaatgtgtcccaggataggaggccatcagatctcccacatgaggcattttcgaccctctctccgtcttgttctccagttgcccctcgccatggcctgcagagtctcgggaaagttgccattgcccggcgtatgcsacctccagccaaccttccaagcctgaaagccgagaacaaaggcaatgaccccaatgtctcactagtgccaaaagwcggaacaggatgggcaagcaaacaggagcagtccgaccccaagaggtagacagaggcttgggggacctagagtgatgggtattttaacttgaacttcagggagcattggggcttggtttagtccagccacgtctgagccrgagacgaagaggtccctttcttacctrttgcaggttccttgttaaatgactaaggaatggtactaaactttagctttttgtcttggagagagagcatgaaaaaatagacaacagcctacaaaggatgacaaaattawtttgtccttrtatttgtaaatggtagcaatgggcatgatttcagtcctgagtctccaccagttggagaagtcagggaggcatctcaggtgtgaataaccttcccattctgtcccctcagttccgatgcctcaaccgctcagccgcyggaatcgcagccactgccggcttcacagacgcctgcctccaaccagccgaaacgacccccagcagcccccgaggtacctggagaactggaggggtggggaggaagaatggttcatagctgccccacccacatcatttatcatctttctgaacacttccccagaacactcctttggttccaagcggggtaaagtcctgggcacaagccagcgtcacccatggagcacatggagatggtgagtgcagcacttaattggggagctgtgtctgggcaccatgggatgcatgaaccctgcactgtattttcagccaagtgaccttggtcctctttggctaaatcaaggaccacccatattcagtttcatggaggcacatgagcaagtttaagtctcagtcttatatgatggagtgtagtggtgccagaactgacctccttggggaataagcagttattctgtagsggggtgagtttgaaggcgggaaacctgatggtctggtacctgtcagagccttccactttttttttttttgagacggagtctcattctgtcacccaggctggagtgcagtggygcaatctcggctcactgcaacctctgcctcctgggttcaagcrattttcctgcctcagcctccagagtagcgggactacaggcacacgccaacacacccagctaattttttgtgtgtttttagtagagatggggtttcacatgttggccaggatggtctcgatctcttgacctcgtgatccgcycgcctcagcctcccagagtgctgggattacaggcgtgagccaccgcgcccagccagagtcttccacttttatagcatgtcctcaggaaatgtcttctgtctcctgttctgcatccccatcctaataggtggaagggcatcaagcctactgtcacgattctctcgagaggaatttccgaccctgcaggcggctggcgaccaggacaaggctgccaaggaaagggagtctgccgaacagtcgtctgggcccggaccaagcctccgcccccaaagtgagtggctgccttttggccaagacattacctattgcatctcagagctaggtgctggcttattcaccttcctccccatcactttcagctgtgttcacttgtcctccaatcattgatacctctctctaccttttccaaaatacagattctacaacttggagggacggaggtggkcgtggccctgatgagctggagggcccggactccaaacttcatcatggtcatgatccccggggtgggctacagccttcaggcccaccccagttccctccctaccgcggaatgatgccgcctttcgtgagtcttggtgtcttgtcttggaacgattacactggaagctggagagctaggaatcaggacttagtctttgacctatgagatagargggagggtgggaggatgattgatagcaggcttaaggagctagaagggtatatgactgtccctctgagcagctactgttggacccttttacagatgtatcccccatatctcccgttccctccgccctatggaccccaggggccttaccgataccccactcctgatgggcccaggtgagcaatccaggtctgggtttgtggctgggggcaggggaagcttattgggggaggagatggttttctagccaggaggctcagtctaggatcagtctcgcatgtggttatacaacatgccatatttcattttcttttttgtgtacagccgttttccccgtgtggcgggcccccgaggctcagggccaccaatgcrcttagtagagcctgtgggtcgtccctctattctcaaagaggataatctcaaagagtttgatcagttggatcaggagaatgatgatggttgggcaggtaagtggatattaagggtcaagaatttggatcttgaaaggcaaaacctaatgaggaaaaaaaaatacagggttatgtgggtgaaaggcagacattgaagtgtaggaagaccaggcccaatggctcacatctgtaatcccagtgctttgggagtgttaggtgagaggatcgcttgaagccaggagttcaagaccagcctgggcaacacagcaagaccccccacctctacaaaaaaaaaaaawttttttagttgggtgtggactgtgcatctgtggtcccagctactctggaggttgtggtgggaggatcagttgagcccaggagttggaggtcacagtgagctatgatcgtgccactgaactccatcctgggcaacagagcgagacttttaaaaggaaaaaaaaaaaaragtaggggaggatggatggggaataccaagtccttgcaaagtggtgagaggagtaagaatgacaagacttcattggtggatctagacttcggagggaaggatattggcattggtagtccatcttgttacatagttccagactacctcccaagattggagggcagaatgcttgggttactaatactcatatttcccctcaggggcccatgaagaggttgactacactgaaaagctcaagttcagcgatgaggaagatgggcgagactctgatgaggagggwgctgagggccagtgagttagggccatcaggggagaagaggagggggtcttggtttgtattttggtaatatactcttagaggagtatattagttgcagctgattttaatttcactgttgatctgctcacagcagggattcccaatcagcttctggtgaggaacggccccctgaagcagatggcaaaaagggcaactcccccaacagcgaaccgcccactcctaagacggcctgggcagaaacctctcggcctccagagacagagccgggacctcctgccccaaagcctcccctacccccacctcaccggggccccgccrggaactggggcccccctggggactacccagtgagtgtctccaataagggattgagagggtcagctgtgggaaattggtgtcagctgagtaattgaagcggttgtgatatagaggaaggggggtgctaaaaatgggctgtgtgaagtgccaggctgcagaacatcctgggaagcttttaaatatctttggtaataggggagtctgggtaagaagtgagaaactgggatgctaatgaggaaagaagaaaaaggagccctgggtgtttgggtttcggaaggagagagggaacagaaaaataaaaagactagggtggctagatagctggatctgttagtatgcatcagtagtccaagctactcagcaggctgaagcagaaggatcacttgagcccaagttcaagaccagcctgggcaacatagcaagacgtggtctcaaagaagaccaggataatgagtttgtcaccacccagagagatcaaccccaaagcctgggtcgttgcatcctgcaagtagcgacagttgatttgtygtaaaagagatgrtagaaagcatagtaactgattcccctggccctgctgggtcttgccaattgacaggatcgtgggggtcctccctgcaagcccccagcacctgaagatgaggatgaggcatggcggcagcgacgaaagcagtcgtcatctgagatttccctggcagtggagcgggcccggcgacggcgagaagaagaggagcggcgcatgcaagaagagcgccgggcagcctgtgctgagaagctcaagcgactcgatgaaaagtttggggcacctgacaagcggctcaaagcagagcctgctgccccacctgctgccccttctaccccagcyccaccacctgcagtccctaaagaactccctgcacctccagctccacctccagcatcagccccaacaccagagamagaacctgaagagccagcacaggcccctcctgcccaatctactcctactccaggtgtggctgcggctcccactctggtgagtggtggtggcagtaccagtagcaccagcagtggcagcttcgaagccagcccaggtatggagatggggataggtactaccagatgtcagatcactgcttcaaggtgcttaaaggtgcagggtggtaaggctggggataaatgaagtagaaggcagttgttttggtttattggactrtcagtgatagtgttctatcatttgtatatctgaaggagggaaggttttgtctggaatcttaggttgtagyctaataccatttcttggcagagtactgtagctcacgcctataatcccaacacttagggaggcttggggtggaggatcgcttgagcctagggagtttgagmccagcctgggcaacaaagcaagaccctgtcggccaggcatggtggctcacacttgtaatcccagcactctgggaggccgaggcgggcagaacatgaggtcaggagttcaagatcagcctggccaacatagtgaaacccgtctctactaaaaatacaaaaattagccaagtgtggtggcwtgtgcttgtagycccagctgcttgggaggctgaggtagtagaaycsctttaacccgggaggcagagattyctgtgagccaagaccatgccattgcactccagcctgggtgacagagcaagactctgtctcaaaaaaaaatcctgtctcacaagaaatacataaataaaaatgaaaactatttcctatrggcyaagactgaagaaagtactgttgttctaatggtttcatagaaagttaatgccaccaccataggctcatgagaggccatgaagtgctttaatgggtcttaaatgggaggggcttcartagaatagatgttgaatagaatattttagtcttaagggagctagagatgagacgtgagattcctggggtgttcatggagtgtctattgttggactagatcactctgttgtgttttttccgatgcagtggaaccacaactgccctcaaaagagggtcctgaaccaccagaagaggttcctcctcctaccacacccccagttccaaaggtggaacccaagggtgatgggattggtcccacccgccagccccctagtcagggcttgggctaccccaaatatcagaagtcgttgcctcctcgtttccagcggcagcagcaggtgaaatcaagttgtttaccctctaagggctgcttttcttcctggcttcggtccctaattctcttcataagttaccttctgggtccctttgcttctttgtccagttgtctccattgtcacgccaatttcccctagtccaagttttttctttgctgattcctttgtccatgtgtgctttgagcctctctcatcttgyctttcctcctttcctaggagcagctcctgaagcagcagcagcagcaccagtggcagcagcatcaacagggctctgcccctcctaccccagtgcccccatcaccaccacagcctgtgaccctgggggctgtgccagctccamaggctccacccccgccccccaaggccctgtacccaggtgctctgggccggcccccacccatgcccccaatgaactttgatccccgatggatgatgattcctccttatgtggacccccggctcctccagggtcgtccccctctagasttctaccctcctggtgtgcatccctctggtaagggggcatgggaggagtgagaaacaggaaagtcccctcagtcttaggcattggatattagggtcttactgtgaytctggtaygataggttttgcccatcatagtgatgagggaagggcatatgcttrgcactgctgagatagctctgttgcaaaaatgggcttagttaagaaataagcagtggttggccaggcattgtggctcacgcctgtaatcccagcacttagggaggccgaggtgggcagatcarctgagttcaggagttcgagaccaccatggctaacgtggtraaaccccatttctactaaaaatacaaaaaagtagccggcgtggtggcgctcgcctgtagtcccagctactcgggagactgaggcaggagaaacgcttgaacccaggaggtkgaggttgtagwgagccgagattgtgccatcgcactccagcttaggcaacgagcgaaactccgtctcaaaaatgaatgaatgaatagcacaactccatctcaaaaatgaatgaatgaatgaaagaagcagtggtccttcatttgccaggatttatttggggtgggttgattctcttgtagggaatctgagtggataaccttgttatataagagcaggcaaggcccggacctactgggaacaagagatggaagagctgacttgaccgcraggggagatgctttttgggctggagggcttgtgacatgaataggattawttttctttttctttggtttcttcaggcctagttccccgagagcgttcagacagtsggggctcaagctcagagccatttgaccgtcatgcacctgctatgttacgggaacggggcactccaccggtggatccaaagttggcctgggtrggagatgtcttcaccgccacacccgctgaaccccgcccacttacctcacctctgcgccaggctgcggatgaggatgacaaggggatgaggtgagtcttggtcatgagaaatgggtgagttcacagtgaaaggatctaggcctgggagaaaggtactttgggttagtggtagggatagggatgaacgggaaaggagaggctggatggagtggctcatgcctgtaatcccagcattttgggaggctgaggcaagaagattgcttgagcccagcagttcgagactagcctcggcaactggatgccrtctctgccaaaacaaacagaaaaatagtaaaagagagtctgcatcataataaagtgttcttttcccacctagttctggttttcctgagatacttatttccattctttctgtctktctcttcaggagcgagactcctccagtacctcccccaccaccctatctggccagttatccaggctttcctgagaatgrrrcccctgggcccccaatctctcgctttcctctggaggaaccagggccccgtccactcccctggcccccaggcagtgatgaagtggccaagatacaaactccaccacccaagaaggagccccctaaggaggagactgcacagctgacggggccagaagcaggccgaaagcctgcccgcggagtcgggagtggaggccagggccccccmccaccacgcagagagagtcgcacagagacccgctggggccctcgtccagggagcagtcgtcgtggaatscctccagaggagccaggggccccaccccgccgggctgggcctataaagaaacctccaccacctacaaaagtagaagagctgcctcccaagcccctcgaacagggggatgaaacccccaaacccccaaagccagacccactcaagataaccaaggggaagctagggggccccaaggagaccccacccaatggaaatctttcccctgccccaaggcttcggagggactattcgtatgaaagagtgggtcctacctcttgccggggtcggggccgaggcgagtattttgccagagggaggggttttcgggggacctatgggggacgagggcggggrgsccgaagccgggaattccgcagttaccgagagtttcgaggagatgatgggcgtggaggtgggacagggggaccaaaccaccctcctgctccccgaggccgcactgccagcgagacacggagcgagggttcagagtatgaggaaatccccaagcggygccggcagcggggctcagaaacaggcagcgagacccatgagagtgatctggctccttcagacaaggaggctcccacacccaaggagggaacactcacccaggtccctctcgctcccccaccaccaggagccccaccttcaccagcsccagcccgcttcactgcccggggtsggcgagtcttcactcccagaggggtgccatctcgccggggccgaggaggagggaggccccctcctcaagtttgcccaggctggagccctccagccaagtctctggctcccaagaaacctcccacaggccctttgccaccaagtaaggagcctttgaaagagaagttgatcccagggcctctgtcccctgtggcgcgcggaggcagcaatggaggtagcaatgtgggcatggaagatggggagcgaccccgaaggaggcgacatgggagggctcagcagcaggataaaccgcctcgtttccggaggctgaagcaggaacgggagaatgccgcaagggggtctgagggcaagccctccctaacccttccagcctccrctcctgsacctgaggaggccctcacaacagtcacagtggccccagcacctcgccgggcagctgccaagtctcctgatctgtcaaaccagaactcagaccaagccaatgaggaatgggagactgcatcagagagcagtgacttcaccagtgagcgccgaggggacaaagaggcacccccaccagtactgctgacacccaaggctgtgggaactcctgggggaggtggaggtggagccgtaccaggtatttcagccatgtcccgyggagatctgagccagagagccaaggatttgagtaaacggagcttctcaagtcagcggccaggcatggaacggcagaatcggcgccctggcccagggggcaaggctggcarcagtggcagcagcagtggaggagscrgtgggggtcctggaggaaggaccgggccaggacgaggcgacaagaggagctggccctctcccaagaaccgaaggtgggtaggaacaaacaaatttattgtggtttaaaaattggaggagggggrraaagcctgagggaaagataagtttgggtgkagtggagattgtggcctgaggggccatgggctctagaatgtcagtaggatttccatgtctggctaaggcaactggaaagcggytggtagggtgttagagtcaagaacacccacctatgtattcattgctggttctttgctttccagtctgtgcatctgtaygcataggaayccttagaaggactcaaaaacacctggactttaatagggaagagrataggttgtaagcagaagttgggaaacataacttgtgggaaaaartaacgatttagtggatactggagctaatgctctgttttctccagtcgtcctccagaggagcgtcccccggggcttcccctgcctcccccacctcccagcagttctgctgtcttccgcctggaccaagttatccacagcaaccctgctggcatccaacaggctctggcccagcttagtagccgtcaagggagtgtaactgcaccagggggtcatccaaggcacaagcctgggcytccccaagcccctcagggcccctctcctaggcccccaacccgatacgagccccagagggtcaacagcggcctcagttctggtaagctggaggggttatgggtgggaatatctccatccccagagaaggtcaagtgctggagggagcgggtggagaacctggcctagggrccctgcygctgggtgcgtttctgcagggagcaagggtagaagaattgggaggtggagtagagaggaaaagttagggtcagtggcagagccaggcagatgctgaccctttttctctttcccagacccccactttgaggagccggggccaatggtgagaggggtggrtgggactcctcgggactctgccggggttagtccctttccccctaaacgtcgggagcrgcctcccagaaaaccagagctgctacaggaggtaagggatgggtttgagattgtgcttcactgcactcttactcgtgaaawttcttctgggttatgttttctctgttytctttcctgtttctttcactgtgtttttactccagaattctcagtattagtctcccatgtgtctcccttgttgtccccacaccctgtgtcaccccactctgtcctggcttcctataattcccaattcccacccaattcatgttttgcttctggcccttctcatctgtaggaatctttgccacctcctcatagctctggattcttgggctctaagcctgagggcccaggccctcaggcagagtccagagatacaggcacagaggccctgacccctcacatctggaaccgtttacatactggtgagtaaagctgagtgaaaggactatggtagaagggttaagaatgagaggggcttctgaactgtcatctcctcacttctcttctggttggtgctcccttctccagccactagccgaaagagttaccggcccagctccatggagccttggatggagcccctgagtccttttgaggatgtggctggcacagaagtgagtgagggtgggagggtgtgtctgagctgggacttttttgagcactggtcataccccccacctgctctggkttgagtctggagctgttytctcacttggctgtcccctttctgcagtttgtatgtgtgcatcagtcaggtattggggtgctytctaccctgacttaactagctccttctccactcctctcagatgagtcagtctgacagtggggtggacctgagtggggattctcaggtgtcatcaggtccctgcagccagcgaagttcccctgatggaggactcaagggggcagcagagggaccccccaagaggcctggaggctcctcacccctgaatgctgttccttgtgagggtccacctggctctgaacctcctaggagaccaccacctgccccccacgatggggacagaaaggtaaaagaccaaaaaaggataaggggaatgtttccaggaatctgactttggccctacctttttctgctttttctctctgcgtgtgtgttctgggcattccaatttggatttccctttccctcccccaatgcactttactgtgtgcccaatccaggagctgccccgggagcagcctctrccccctggccccattggcacagaacgatcacagcrtacagaccgagscacagagcctggccccattcggccatcccatcgacctggtcccccagtccagtttggcactagtgrcaaggtctgtgtgggctggatctgggtatcctgagttgggtggagagaagggaaggactaaaggtgggacatagaggacacatgtctgtcacgggacaatgtctcctgccttcttgtgatcacaggactcagacttacgcctartggtaggagacagcttgaaagcagagaaggagctaacagcatcagtcactgagrtaagtgggagtaagagtttggtggaaaggcccaagatttctggggaagattgctgggagtgaccagggcgtccaggatgccagacatccctctccacgaggcctctccttcccaggccattcctgtatcacgagactgggagctgcttcccagtgctgctgcctctgctgagccacaatccaagaacctggattctgggcactgtgtcccggagcccagctcctcaggccagcgcctgtatcctgaggttttctatggcagtgctgggccttccagttctcaggtaggccccgcttcccattgcatgaccccttcagtgaataataatttttttctgcctggtatgtrtttataatcaagcctttctacgttgcagagttgtgagataccactttgtcacatcatttttctccctactttttgcttctatgggtgggatggtgatcttttttcttgaccacagatactaaagctgtttcaaccgtgctcctctcctgcagatctctgggggagccatggactctcarttacatccaaacagtggaggcttccgccctgggacaccctcactgcacccttacaggtaagactcgatgcctgtggatcacagaagtacttggagatgtgtttcggggagagggaaggggaagacacagttctagggtactagaagctagtggacttaaggcattgctaggactctggcttcctaacagcttttctccccacaatttattttcagatcacagcccctatacctacccccsrgcccagcccctccctcagcactgctctctgggktagctctcaagggccagtttctggatttctccacaatgcaagctacagagctggggaagttgccggctggaggagttctctaccctccaccttccttcctctactctccggctttctgccccagtcctttgcctgacacatcgttgcttcaggtaagaggggggcaggtattagatattgggggatagggtagggagaatgattttgtgggggttgatatatttctccctgtttcccgacaggtacgccaggatctgccatccccttcggatttttattctactcctctgcagcctggtggccaaagtggmtttctcccttcaggggctcctgcccagcaggtatattgtatcktcacacttccccttcatttgatttctctgtccagttgctggctttgattttccctggttttctgacattcctccctgcccccaacatgcacacccaaatttcttgttacagatgcttctacccatggtagactcacagctgcctgtggtgaactttggctccctgccgccagcaccacctcctgccccacctyccctttctctgttacctgtgggccctgcyctgcagccccccagcctggctgtgcggcccccacctgctcctgctactcgggtgctgccttcacctgccaggcccttccccgctagcttggggcgagcagaggtaaggtacaggaactgaggggctagggagcgccaagacttgggagtagggattctgtatttcaaggtaggcagctcatgatttttttcccctcagctgcatccagtggaactaaagccrttccaggattatcaaaaactgagcagcaaccttgggggacctggatcatcayggactcccccaactggaaggtgaaacggaatagggatgtggactttccaagtgcttccttactttggaaccagggtctggatcctaggcttgccttagacgcccttcttcccttaggtcctyctctggcctcaattcccgtctsaaggccacgccttccacctacagtggagtcttccgcacccagcgcgtcgacctttaccagcaggtgaaggagaaacccttgtggccccaactctaaattygagttgccacytgatttcctgtccttccrtctcatcgctgacctctcactgtgactcactstttaacacatgcctgtcccctaggcctccccaccagatgccctgcgctggatacctaagccttgggagcggacagggcygccacctcgagaagggccctcccgacgggcagaggagcctgggtcccgaggggacaaggagcctgggttgcccccaccccgctgagggagttcctcttgccccctacccccggggcttgtatatagattataaatatataagggggaaaggggtgggcggggaggggttsyggggctggggcctcacttcccctcctcccccttcccctggtcccctgtccctggggctgtttgttaaaaaagagtaataaaaggatttaaaaaaaaaaacttctacaatgatttgggggatgagttgtttgcattgtcttaaagcatggtgctgagtgatctgtagtttcagtcagggaaatattcattacttattccagtgagctgttgaaactaaaaacatgaccatcgtattggatctttaaatttttgtgagtctggaatttgggctgagctcagctggataaatctgcttttttgtgccagtgagcgaggtcaactggttatcagtctgcagctgacacctgggctggtcccaatatggcttcctttgcatatctagggccttggtgrgacatctgtaacattactgggttatcaaccagtgtcttcacatggactctccagcaggcctgttaaatgtccgtgagctcatgttccaagaggtctagctggaattttctaagcttatgccatgcttagttgatagagcactaaactagccaaggtaggggatgggggggtttagaagggacttcaactgcatctcaaagggactagcaaagaatttgcagccatgggacttcagttctttatgatgaactaaggggaaatctctgttaaggcctcaatgttggagcacacttaaggggctctttgaattggatagaccaattccagcattgtcaaactaagtgggatttcacatggtaacgctgcatgctagttatgctaaagactatacttaggtctgcagctgctcagaaactttttttgatgggtaatttgagagctctatgctagtgtgcacctggaatatgctcccaactcaaaatacaggttttttatttatatataaagtgctttcgcacaaaaaatacaaacaycaggctgggcgcggtrgcccasgcctgtaattccagcactttgggaggccaaggcgggtggatcacaaggtcaggagttcgagaccagcctggccaatatggtgaaaccctgtctctactaaaaatacaaaaattagccgggcgtsgtggcggacgcctgtagtcccagctactcaggaggctgaggcatgagtgagaatcacttgaacccgggaggtggaggttgtagtgagccgagctcgagatcgggccactgcactccagcctgggagacagcaatactctgtctcaaaaaaaaaaaaaaacaaacatcaaaactggcttgtacaatttagcgtgctgagtagaacacaacagtgttccaaggaagtattaatttwaaaaagttcacacaagattaagggacacactacctaatggagacaatgtagagagaaagcagccagaaaaatccgacttttatttcttaaatactgtgaaggaagaggggggaaacggtcccctgatgaggaagggccatagagcaaagagctaaggatcatcagcaaaggcccgctggscattggggaagcgctggggactgtagttggggtcttcctgyagtcgtttttgtatatcagaccggagctaaagagaaaaagyaagcaggttggagaaasgctggccaagtcccyatgatcccagcaagcacacaaggccatccctcagaagctaacatttccccccccaagcacrctgtcaaatagcccggggtggcactgtcaagccttcccagatgccaaaggggaaaacaaatggtagcaccaggctgaccagttcatcgctgaagggatccagggaagagggaccctagcccaacccctcccactagaccatccctattctgcttcaaggtggcacctgctgcctgtagctctcctgaacctctggtgcctccaggtcccggctcaggctctcggggctcgtcaggggccgagctccggctgccttagctgcccggctcacagcctctgagagaagcagctgggggccctcaccctgcatcgtctgggggacagggggttgggagggaaaagaggatcaacgtcagatccagtgccaccatccggctcaccctttccatgagtcaaccactccactgagtctccatgctagtggagagaggggaaattaagagtccaggatgtggtttttacagcagaaatgccttcctaattctctttggcactagccaaaactaaagtgaatgtgcttgaacgtgctcttcaaaacgaaaggcagaaggggtcaagccatccgggattcagagctaggtaatccacaagaggaaacccaccttaaaggaaaatgggatctaagcacatggggattaggcagctgagcaactaatacaggactgctagcaaacagactaaggtcaagtcctgtatggttatgcaacaaccaagagcaagtctgaatcccagaaaaagtttcctcattaaacgaggggaggggagactgaataacaagagctcccaccatctctacatagtttgattccaggcatgacggggaaacctggayagagagagaggcttagggaagaggaaaaccaaccttgcgtctcttggcaggcataccactgaggtaggcatcactcagagggggctgcggtttcaccttccgctggctctgaatgtcctgctggataatagggacccattcctggggaggaaaagagaaaatagtaatgtccttgactttcagctgccatgacccactggattacttcctgacacttactggggggactgcagctgcccaaggttctgtctcagctgaagctccatcctgttcatcccgggagcccccctcaggagcaggaggtggacctcgggacatggcctcttctgctgttgttccaggggctggggaagcattctcccgctgggtgtcagatggcgggaagagccaggcttcagaatttttagcctccaaacctttctcccccagccctccactccacattatctggcccctcaacctccccctctctagagtacctgaggctcaggggaagctctttctgctccctgaacttccattggctcctcaggaagyggctgtgaaattaaagaacaccatacttcctctcagatctctccagttctctcaagtaccctgaccccatcgcccaacaggtcccttacctgggggggatcaccaaccctgcgaacgtatctgagaatggcatcagggcctacaggcatgtgctccagtaccacctgaagcctcagtcccatcatagtggtcagccagctcaccaaggagggattcaccccacgagacatacgacgctgagggacagaaagcagatttagaacacaaaaccctcaaccacctttagaaatagattagatccaggttacagaatgtcagtttagaaaagaaaaatgaaaactgcagagaatggaaacctcaggaaacaaaaggctaaggatctggggctaggtggtgcttacaattcggccattgataacagcagcaagctccatctgctgtccccccaagcagtgcaggtttagggccaggcattcaaacaggccttggttacacaactccagcaaccgggccccaaatccactatctgtgggcaaaatacaaggagggaatgctggcacgtggcagccctgcacatgcaacaggccccncttgcccccgcctggccagcccctgacctgtgcaatgcagcacatgcgcagcaatgctattaaactgctcttggagaaattccaggtttgtccggatgatgtccacacctggctgaacctgcaccaaggactgagagacaagataacacaaagatcccaaaatcaagaatcataagactgggagtggaggaggcagctgcctygaccagacccaggagaggaaaggaatagagaagggttactcacaaaactctcccgcacatactcttctagccccgtgatcaatgtgtgggttgccatctgtggaggaaacagaacaggtttagttcaaagcctcagtcctcccaagacttccacctcgaccccaacaagtccagggcttgtgtgggggcaattggagctttacctggcagagaagcagtcagaaataaggaataaaatgtgcaaaagaggagagttctggggcccctggccttcatttacccggatgttactgggtgtgggctcctgaccacccaggtagtgctggtggaagaaggatcgcagctggggctggagccgttgtagtggctggaaatgcccatggagaagcatcactacgtccaccatagagaagttctggcacagaagagaaagcaaggccccaaagaatcctgggggacaagggcagatgttagcaatggcctttaccacctggcctgcccacccacaaccagatcatcaacctcatcccaccttggcaayacccctaaaccaaggccatctacattcctctggctgccccttcctggagcaagccaaagcatcctttttgctcaccaagggccccatcagctccaggctcaaagatgttgctggatccactgaggcgttgtatgaaggcagcaatactttcactgctgccagcccgagcccccagggagcccagcagggagctgagcacaccctgcaccactgaggtaaaaaactccggtgacaggctctcaagacccaggcctccaggactccctgcgccaccagaaggggagcctggtgggggcatggtctgctgctctggggcaggtggtgggggtggaggaggtgggggtggtggaggggctgtctgtgttgcctggcaaataaagaacaaagaacagaaagtgaggtgagaatgaagacacacggaaataatacggcatcaagagggcacaaaccaacgggtctgggaagatggggagttacattctgatcttcactgcttaaagcagaagtatggtaggtatttaacagagtcaggcagcacaacttacctacctcttcctctgaacaggytgtcagaaagcagtgacactaattactatactttctttttctaaacctcattttcttcatctttaaaatgaaaggttcagagtcaatgaattccyagggccccttcccctaacatgtcactaggggctcttacccagtggttatrtaatggcaagaaggtaccactgcctggctgggccgggggacaggaagatgaggtgaatggcaagccagccactcacctgcaagaagtcagtcatgccttggagaaaggcagggacaccaggcatcgccacagtgatggtgggagaagccacaccagrccctccagcccctggccctgcaggccctagcaggttccccagaagctgagagaactgaagatcagccatggagggttgaggggtgggtggaggctgggcaggccccccaggagcggggccagctgtggtagctgtgttggtggtgccagcactggcagaagcagtggcaggggctggcggtggagccatacctggggtcccctgagctgtaagaaaccaaaaaaagaaagctgggctgagcatggtggctcttggctgtaatcctagcaactttgggaggccaaggcatgagaactgcttgagcccaggagtctaggccacatagcaagaccccatctctaccagaaaaaaaaaaagacaattactagccaggagmtagtactgctagctactcaggaggctgaggtgggagaactgtttgagcccaggagttcaaggttacagtgagctttaactcactggattgcaccaytgcactccagtctgggtgacagagcaagactctgtaacttaaaaaaaaaagaaaaaagctggccgggcacgatggctcaagcctgtaatcccagcacyttgggaggccaaggtgggtggatcacaaggtcaagagttcgagaccatcctggccaacatggtgaaacccccttctctactaaaaacataaaaaattagctgggcgtggtggcgtgcacctgtagtcccagctactcaggaggctgaggcaggagaatcacttgaacccgggaggcagaggttgcagtgagccaagattgtacactgcactccagcctagcaacagagtgagactccatytcaaaaaaaaaaaaaaaaaaaaaaaaaaaagctgaaacctgaagacacaagacactacagcagccccattccaggaaagcaggaaccaasaaaatatggaaagaactggaaagtgccagtgagcaractaggaaaggagtttaaactctgagtggggaagaatgaaaactcacccacaaggactggctgcataagaagctgccccacaaggccgctcaccatctgggccaacgaggcattggtacccagaccrgcgccctgctggatagagagcaagggagaayttcagacctgcccttccatgcaccaccacaggagtctctccctagactgttacgcactagaamtccccgacccttgctcaccagtgtcccagagactgggggccctccaggatgggaaggccgagcctgtggaggagtgggccgggcaatcaccacccgggttggagctgttgggaagcctggcacctgctgtcctgtgggtggcagaagagacagaccgaagagggctgagggccaggcccttgccagccagctgccaccatggactgtgccctacctcccaagcctccccttccaggtcattacctgcggccgcggaggcaacagctgccaccatggcctgatgagtgatctggtgggcgacggcgtgcatgaactcagggggcagggagggcagctggatgagggtggagcctggggggcgggtctgatgtaaccttgaacctggaccccttcaacccacccacwcagcccttccctttctctacccagagctcagcctgccctgatgccctcactcttacccagggtttggccatgaccagggggtcccagggggccagtgggagcactcggaacaccaccaggctgtgtgccagaatctgggcagggagacagagacagtggccctgaggtaggtagggccaaggcctaactatatccttctgagatcaggcatacttcaggcccataatcccccaatcagaaagcctgcctttccctccatctaaacagggagaggtactcccttcaccacacaaacacacctccaaagacaaaccaacccccacaccccccwcatctgtctacttaagcttctgctctggtccccaggctaccaccaccagcatgtgcctctcccttccccaccctgttccctcacacctcagcatgaacctccctcatcatgctgatcctgctcttctcgccagcaactattctcaccttgaatgttcatgtgcatcatgaccacgggttccacactctggtgggaaatccggatgaccctygggtggctggtggctggcgggggagctggacctggcgggggagccccctcagctgaggactcgacattggtagaagacggagccacggatgaggcctgcccaggaccagggggaggtgcctctgcattgggagttggggggggccgagtcccatttcctgtcatggtcacagtggttcccacattgatctgaaaaagacagatggacaggcagatgtgagaaaaatacaagagcctaaccaagaaaacctcatgataaacctctaaagtatctccagccttcatcaccatgtttccagtctcctcctttcctaacctccttcaggcccagtagctaccctgggtcactctatcaacacccctcactctccctcaggccagactccccctaacccacctgtatgggaatggctgcctgctggagcaccatgggggtggtgtagtgagacataggccggaccacatgcaggtgtcgtgggggcgtgcaggccagattgcagcgcaggtcagacagtgcaacaaaggtgttgcccagcagtcgcaggctctcccctaccaagttgatcaaccgctgatcctcctcccggccctcgtgctgcgcacaaccagccaaacacaaaaaggcagaaaatatcaagctggagtccatctcactaataaaagcaataatgcctactgagaataccatgtcctccaaaactttcagttatatccttggaagtttacatgtagaccaaatctttgcaaataaattatatcttattcacataaggaacatcctattaaaacactactatgaatcagtaagtcatcatatactgatctcctgtactttacattttctaaattcattcaggggcacaaggggtacgatacgaggacagtgcttacagcaaagattatcaccttctctgtaagggaggacaaaatcacttacaggtttagagagaaaytgttttgttgcaatgtgtgtttttttgttttgttttgttttttgagacagtctcgctctgtcacccaggctagagtgcagtagtgcaatctcggctcactgcaaccccctcctcccgagttctagcgattctcctgcctcagcctcctgagtagctgggattacaggtgtgcaccactacatccagctaatgtttatattttcagtagagatggggttgcaccatgttggccaggctggtctcaaactcccratctcagatgatccgcccaccttggcctcccaaagtgctgggattacaggcgtgagccactgcacctggccctgttgcaatgtttttccagggagggaaagagttatctgyatttcagcctgttctgttttgggagtactggggctgaggagaaagggcagggccatcaaagggctcacattgttattgtagtccgtggtggcagcagcacccagaacctcgtagtagcgctgcaagaagggctggaggcgactctccagccgctgtagctcctggagcacctcgacatactccgcaggggaaggatggctgtggacaaacccaaggggcaatgagccaaagccttcctcagattcccaccctcacagtcaacagggaccacatgtgccctctttctccctggtctcccagagccctggcccaatccttctctggaccagcagagcttctattctcttcaacctccgcctcccaggttcaaacgattctcctgcctctgcctcccaagtagctgggattaagttgcctgccaccacacccggctaatttttgkttttttttkttttttttttttttgagacagagtctcgctctatcacccaggctggagtgcagtggtgcgacctcagctcactgcaagctccgtctcctgggttcacaccattctcstgactcagcctcccgagtagctgggactacaggtgcccgccaccatgcccagctaattttttgtatttttagtagagacggggtttcatcatgttagccaggatagtctcgatctcttgacctcatgatccacccgcctcggcctcccaaagtgctgggattacaggcgtgagccactgtgcccggcctgtattttttagtagagacagggtttcaccatgttggccaggctggtctcgaactcctgacctcaggtgatctgcccgcctctgcctcccaaagtgctgagattacaggcatgagccactgcacccagccaaagcttctattctttactcccacccatgagaggatagggagaagaaaatgaactgctcccaccctccccaccacaatcctgcacctacaatggtgaaagactaattctaagaaagagagcaggccttcgtgaactcagaggagaattccgatcaggctcaggagataccatttggatttccttgccrtagggagagcagcagttcttctcagctgcctgtcctagcgtcatttacctataccgagagagcccctcctcgcccctcaatgctaacccttcaactaagacctccaagtaatcctttccctcccttgccatggttcatttccttctccccatacttcacttaggattccccacccactaaagattccctccatctctcacttgggtgcatttgtttccggggcaggtgttgggcccgctggggctgggccakgagtgagctccgggttctgggctggggcacgctcctccacttcttctgcctccatgggctcccggggaggtgcttcactttcaactggttctgaygtttgagagctcaaggctactggctccggggtcacagccggtggctgcgggggcggctgactgtgctgcggttggggccctcctcgacactgaaggtaggggagagtcaggataccaaaggcagggtaagactgctgcagaggattactctacaggagactgaacagagaaagtatcctaactagactccctgaaggcatggctctgcaattttatctccgactcgctagcaactagcataagactgacacaaattagatgcataataagcatctgtaatttttttttttttttttgagacagagtctcgctctgttgcccaggctggagtgcagtggcatgatctcagctcactgtaacctccgcctcccaggttcaagaaattctcttgcctcagccttctaagtagccaggcctacaggcgcgtgccaccacacccaactaatttttgtacttgtagtagagacagggtttcaccatgttggccaggctggattggaactcctgaccacacgttatccccctgccatggcgacccaaagtgctgggattacaggcaggagccaccacacccggccacagcatctgtaatatttgtaaataaatttctaacaaagagtagagattgtggtttcctttcctccacaagttggtttcccagcctccacaagttaagagagtagaatcctttaattgaaaagagatgccatgagactaagtctgaaacaaactccccagataccaggcaccaagaggattggcagaaatgagagagcctcacaaagatactttttctgcccaaaagaatgaatactgcagagaagactagattatgaaggccaaaccctgtgratgtggccagtgaagccctaactcccaggctgagagaaaagggagagggagggtggagagagaccctagccagccttgcccacttacctccatccgggatagtaaggtctgtatatccctgatcatgtgctgagccatcaccagccgtacccggggctcactctacaatgagagaaggtttatcagggtaggttrcagatgaagccatgagttctaccacctactaaatcaggtcccagccatctctcagccaggtccaccccacctcccagcctccttctcccagatccccttccctgaccctcggaggcccctcaatacctgaatcggggcctgttccatgttgatgtgaacatccacagcagagccgtcactctggggaaagggtaagggaagttgttctgggagaagccaacactaaggcctccacacctccaattcattccctggagccctacctccttttctccttaaagactgagaccaatagcacaccacagggccccctgaacccaatctaaagatggaagcatctatcttattaattccctggtgctaccacaaccaaagctacccacaaaagccctcccctgtggaacataagcttacaggaagattgaaggttccaaccatgacatagctgttggcattccggtcatgaacagaggccccaggcccccgagtaccagggggggatcccccaccatgagtggctgaggcagaccccgtcccagaagatgccccagaagggaggtgagtctgaggaggagcccgttccaccaggtggataacctttcccccaacatctgcagaaaaatagacacacaccaaaacatagtatgaacaggtaaacccatggcctcagttcatccctccagacagtagccccaacctctgaactgcctccccagcccccttactgtattcctgaagcttcttatcatcttgcagaactcgtccctggtaaatgagccgttgtttttcagatgggatgctgacagaggcagcaatgtgctccttaaactcttttacattcatctgaaaagaagaggcatgcacaggaatggaaagaatggaggaaagaggaagaacaaagacagacaaccgagttgtggaggtgaggggtaaaaaccaccacagaatcactacccgtttgtcttgaccgtgagatcattactgtgcaaacccttaaactaaagtaacagctgtcaaaatacagacaataaatttggcttggcgcggtggctcacacctgtaatcccagcactttgggaggccaaggcaggcagatcacattaggtcaggagttcgagaccagcctggccaacatggtaaaaccccttttttaccaaaaatacaaaaaaataagccaggcatggtggtcgcctgtaatcccagctactagggaggctgaagcaagagaatcacttgaattcgggaggcggaggttgcagtgagccgagatcgcatcactacactctagcctgggtgacagagagggactccatctcaaaaaattaaataaataaacttaatgaagctcaggttatagatccaggaaaaataacacggatgaaaaacaaaaaaaaamcacatggacattatattatctgtctggcatccaagggagtatgtgtctagagacatcagtgacccctttccaaacacaagatgataccagtttatttaccagactctcctgtgatttccaagattaaaaaatggcaaagaagatggggtctggtatcaggttamtgaagaaagactaagaagataagaaagcaaaaaaggtcccagcacagtggctcacacctgtaatcccagcactttgggaggccgaggcaggtggatcacctgaggtcaggagttcaagaccagcctggccaacacggtaaaaccctgtctctactaaaaatacaaaaattagccgggcgtggtagtaggcgtcgtctgtaatcccagatactcaggaggctgaggcaggaaaattgcttgaacccaggaggcagaggttgcagtgagctgagattgcgccccagccctccatcctgggcaacaagagcaaaactccatctcaaaaaaaaaaaaaaaagcaaaaagagaaatatttttcctaactacaaactgactcttgggaagtaccagagtatttatatacatctaatcacaagtctatatatggctttcttatatccaggtartatcacattttagaaaaccatggaccaccccacatgcaatttgtctccaagtattacaggagtaaagacacagatagctatgtccaaggctttaagctcaagagactcaagctatgccataaaaattagtaatttcactcaacagtctatcaaggmcctatctccattatgggttctgatttctaccctttaaraacacagcatagacctgaccaatgtctatcagtaagacacacttgcttagggttcctgtgctgtttcccttcccaaaggccagagccatgcctgtccctttgggttggggtccacccatgatgatgacacacagattcttccttcctctgtatttccctctgcattaagttctatccatgtggaggacagaacaaaatcagcctcactcacaaaacatcagaaaacgttctactggaatacraacaaagggatcaataaaaakaaaatctgaggccaggtgcggtggctcatgcctgtaataccagcactttgggaggccgaggagggcacatcacctgaggtaaggagttcgagaccagcctgaccaacatggtgaaaccccgtctctactaaaaatacaaaaatcagctgggtatagtggcacacgcctataatcccagctactcaggaggctgagataggaaaatcgcttgaacccaagaggtggaagtttcagtgartcgagatcgcgccactgcactccagcctggaagacagggcgtgactccatctcaaaaaaaagaaaaaaaaagaaaatctggtgaccagaaaatcaagctcatctctcaggctaaggggcctaaacgaggaaaagctaaaggtgtcttccagaactagtgaggtgtctcacctgggcccccacaataaaggtacgagtttgagagtccaaggtcttcaccaacacctccaagctgtcaggctcctccacagcggtactggtactatcattaggctccatggccgacaggtctctaaagaagaacgaaggaaggarggcccgctgttgcccagaccagagtgtacccgaaagactccctagcattaatccctgccccaatacctaaaaagtwtctcctgcacacacacacattcacacctgtccccatcccccttctgattccggggcacagggagagaaacacaaagggcaggagatcgacggcttagggagctggaggacgagaggtgggaggggctccacgacgccaatcacaataagcagggagccagtcagattaggaaggaagcacgagaccagagactagtgtcatcaccggtcacggcaggacaagcgccccagaggtcggaaaatcctgggacaacgcgaaagcggtggtcgccccacactctgcggagaaagtggtttcgcgcacgcgcgccacgcccatcgaaccctcctaactcactatagacccgaaacggcactcacggggcgacrgacctgctagctgactgcccgcgtctactgccttcccacggtgttccagcagaacggcacaactaacccacagccaaacacacacacacacacacacacacacacacacacacmcmcacmcaccaccccgcggctccgcccccgacttccccacggaccgtcacttccggtctcccccaaacctgccaccgacggccacttccgtttccccgatagtatttggggatctcgaagcgatacttccggctccccccaggtccccaagctttacttttgtggggcacgacgagaaagtccgcagccccaaacagtgagtttctgagggcgagtcgggccggggccggcctakgtgggagggagccgagcaccccgaggagccgccaccgctgtcgcccgggggaccgtactacgcctgcgtgcgtcgcactacggatgcgtggacacttaagcatcgccccaccccctyccccctctggcggcgttcacgtctgtgcgcgcgctkgagcgctagaagattgaggtggctaccgtaaatgcctgaaaaacagtcaccagctgggactctaccactgcctcgagaggggctatggacggtcgtatggaccttggactttggagatgggggattatgccacattcatctatgtttaaatcttggcaggctgataatttcaggcggcactgtcctagccagctaaaactcttctccaccctattgccctcgctgcgccctttcttctgtgcctccggaagttactctttcagtaggcgtttgggggcggcactggtcaattttgttctcggttgcttggttgggctagatttcggttctgccgggtgggcgttttaagggctgtgggcgtcacattcgtcggtgtgtggccaaggggacatgacacgttttaggaaaag

SEQ ID NO: 10042 - DNA, 41658 bp, Homo sapiens
cccagaagtaccttgtcctccactgaaggagaattatcattaattatcagcctttttaatggtgcaatttgatttagtaataaccctttccatcgacatttgaacatgaaagagttcccgggtgtttttgatttttttgttttttgttttgtttttggatgttaagaggacacgttttagttgaattctcatgagcactgatgcattaagtatagtaacccctwcttggctttggaaaactggtcattttccattacagaatgtgtttgccactgacttccctcagaaatgacaatccttgtgactacttcatccacagtcattggaagacaaactattttagccatcttgtcctcttctcagacctcagaagaaattgctgggtgctcaagtgaaggcgctgtctatagttgatggttgtttgcaaagcaaccatcaacaggcactgccactgctgctctttgctgcctttgttatgtgaattgataagtcagtagtcaaaagggacatattccagttaagggaggaaaagttcattgtgtgggattgcctttatttcagtgagttttgccacagtgaattaagttatacacaactaaatcagaactggccaggttatgcttagtaatagatgatcctcaagtctcagaggctgatgacaatataggttcatttcttctttatagtacatgtccatataggtcagcagtgactctcaacatwgttttcactctggaacttgagttgatagagaagcctccctttgtatcattgctgatcctgtgacaaaggaaaaagaaaattgcaagccacatactggctcttagtggctgctgggtaaagacacatgtcacttctgttcatatttcattgttaatgtgtatcacatgaccaagcctggcttcaagggtgctgagaaaatcttcttgcagggagggacaacagataatgggtaaacagtaatttcagtctgctatagtctgtttagctctagtgagaggatatgttttttcattgtatttattggagtataatgagcacatagggacatttcttaatatccaacttactattttttcagtgactaggttcacagggcctgcctggtttatgcctgatctatgtctgtttgaagaaacagatcattgctctatccatgaatattttaaaaataagtgacaaagtgatatatgcctgttcaaaaaacaacacttgtggctgacagtccctcaagccccagtgattttagccctgcrggaaggatgccttattcaygaaatttacatatgtagagatttgcattcttctctagtcaataataatgataatgataagagccaatactctaaagcacttactatattctaagcatacactattctaggagctttgcaaatgttaacttacttcatctttaaacagtgctatgaagaagatactattatctttattttgtaggagaggaaactgaggcacagagatcaaaaccatgcctagtaacagagctaataagtggaagagtaactactgcccctctcatctaattagaactaatgactggcttcttttataatttcttcttatgttttccttcatatagcagtgaygtgtagacaggagcarataggaaaaaaaaacctagcawtgaattcgtcttgttccattgttaggcactcttccgtttgtcttcatcttactacaactgtttaacttaggtattgttacttccctcattttataaatgaaggaacttgtttataaaataataggcacatttcccctacctcagacatacagcagtgatactagagctgagaattggccttaggttttcctggctttaaacaaagctgkgcactaactctgcaccatgaaactactctttcagtcaaagcaaaggatggtcaaaggaaacaaaaattcatggttatttttgccaacacagtatattcttccacatctctgaattgrttgataatgttgtatttactcacatgacgggagctaagtacaggatccatggaatatgtcagaacggcagcatccgtagagtaacsctgcagttagactgactctcagtaagatgtcattctacatgatgagcttgtgatatcagtttattagaaaagactggaatattgctgccaaatatcccagtatactttgaggtacagcctggttattacttatttttctcaaaatgaatacttaagagagaaattctgttttatgtcacwactatcttcattcytttttgttgaaaggaagttctattraaatttttttaaatggttgtctttttctcttaatatatctttttaktgaaaartagaacaatgtgacctctagtaccaaacattttaaatgtcaggaacttgcagttttagttgatataaaaatgctagtgtcttgcttttacctagggttacattttttttgtctcagtttttgttgtccttaaaactgaaaattaaatgattcctcacttttccatcttacctgtctcctatattcaaaaagtattttaaaatgtctgaatgcttagtgttatgctgggcattttggggttattggaagcaagcaatctctctttggtgtccaagaaaagcttcactctcatgtaggtaggtcattagctgcactctgatgagatgccatggccattcatttttgtgtgttgagttcactgaaagtattcactgagttctgttcttttgacctaggacactggggacaaagaaataaatgagccacttcccatkgatggcaatacttattttagttttgacatttttatttctagagttttgaagttctttttagagtactaaacacatacacacacacatatatatacacacatatatatatwtttttcaaaatgtcaaataatcccaaaatgcctagtgaattaaaaatgacaatttctaacttttgccctctttctccttaccagtagtttgcatatatatatttgtggagttttttcttaggaaaatagaaacagtcatacataccctcaaatttttacattttgagaaaataggccttattgtcctgtcgattacttttgtcacctaacaacacataataaatacctcttcayagtagtacctctagttccattgttaggcacagatttttcacgcctttctgtcaatcaattcagttccattggcttgctgtgcctasaatttttttcagtttttagtttkttgctgttaccctttcttgatttttatcataattttttgatatatatttttttgtctggggatctattttgagttacaagaatgtgtttaatctactgtctttaaatggaagttagttwtaaatttgtattggtttgaattctcctcatttattatttgrgaatattttaraaatcatgtcactaccacatgtgatgaaaatttgtatcatagttcaaaaaattttcagtttctcctctgggtgttagttggtattttttaaayaaatgctttctctttaaataagtaatttaatttgacctcgccccaaaaccctttaaaaaaattagaattgatccaaagaaaatctagccaaaaaacaatgaaaataaattgcaatttcataatcctaggaccttttggggatgtttagtgactgacaatgcatgttttgaattattttaaatatggtagcaaaatgaaaaatagaacatggagcgtagaatcagacccgagtttgaatcctgactctagagcttaaaactgagagcagtggaggttttcagcaacccagggaatcaycttaagactgcagagccttttctttacctcataatgttttgagaatcgcgggaaaggatatgtgaaaggctttataatamaagtttcaatacataataaggatttattcttactgcatttgctcctatcatctgaaagaaaacacgtagtaaaggagtaatgctatttttaggaaaagtggatgagatcattgtaatatactttctgtgaaggatcttagcaggttgatacaatagctgtgagggtgaagytccctcctctacttctaccccaaaataaaaagtcagcctctaaccaaaatatttggaagactcagaaaaaacctctctactgttgagtcataaaggcccagtgaacagagccaactgaagggggaatgtgagttcagcrtaaacacctaatgcgatttctctcttattttcagtgtatttgaatgaagcagggttcaactttgtgagaaaatgcattcaagctgtggaaacaagaggtcagtgttgcctgatyggtacagcatccctgtcatgtgtctcattcttacatggaaaactctcagagtagataaatcaktgaagatgtatttggtcattaacrtggattaattttaagagtaatataaatgtatgtatcrgtatacaaatagctataccttgagcttcagtttactaaaaatcatgctttrggcatacttcttttttagatttttttctaatacagcctcactatacttcttattgagaagccctgcattatttattactgcaagcacctctttgatttttttttttccaagcattaaggaggtaagattcttaaggagcttgtcttcactcccttccttmcttataktctttcttttactgatttgtcactgccacagttttggtacctttcttcrttttaatcatgacctctgtcttgaagtccactccagttaaackttaaactcacttcyaggaaaatttggctaaagcaaaattcatattgggtttkggagttccataaacttatatttaaattttaagtgctgccacttcaacattctgagaagtagtttccttgaattctctgaatctgtttcctcatctctaaaatgaagatataaatgccataggacttttcaacatgcaggaggactccatgactctgaagaaatagaatatgagtaatatcgatcatcccttcccatctccattgcttttttatattcaaataatggtgaataggcagctacactttgctactttgaagatcttcaaagactttcaaatcactgttcagtgtctgctctgagaaatagaagtctgatgggtatttccaggatagctttgctaaagttagactgtgaaattggataagtagctttcaaattttgtyaggcatatgtctgagtttttaacattctgtacttgccaagctgtatctcaagccgttttcttgtgattttccttcctattaggtatcaccattttaggactctaccgaataggaggagtgaactccaaagttcaaaaactcatgaataccacattttgtaagttttggatgaagcaacttacataatttttgtgttcttataggtaatctaaagtatggacttctttgactagtgcttgtctttgaatattttcaaataatatttaaagttcatatatgtattcagtttttaatgttcatttataatagatgaacgatgagaatttgagggggcatttttataatactgtattttttttccccaagtgtcctttggtaagctagagatacaataagatgcatggatgctagctggagtcatttggaatcctagctcagccacttacaggttttgtgaccttgagtaatttgcttaacgtctttgtgtctcagcctcctcatttataaaaatagggataataatggtacctgcctcttaagagttgtgaggattgactatgttaatctccgtaaagcacttagaagcatgctaggcacatggtaagtgctctgtcatgttaacaattagcaataatttcatttgggagacttatttcataagatatatctttgaggtttagtgtcagctttttatcaattcacgcaaacaacagtactaatgttaactcttggcattctaagaaatgaatacctctctcttttgacctacttacgtttgtgcccatttttcataattgcataagaaatattttgaactgcacaatttaaacaccttgttttattctttccagctcctaaatcccctcctgatattgatattgatattgaactgtgggacaayaagacgataacaagtgggctgaaaaactacctcaggtgaggagggtttaactcctggtactctggatgtaatctctgactcaccccttgagtagtaaccacgtgatttcttggagcctgtgtccagaagcttcactcagtagctcagttcccttacataaggtgaaatagcatgacatggtaacatttacatttagtgttctggaacttgtacttgattttttcaataataatttaaaaggctatataatattttgagtactgaattagtatttgttgtcccatatgtatatgggatttttatgtacttttttaaataacaaattggaatggaaagttgtgttgtttttgttttgttttttaactattgttcccatatttgttcctctggtaaggtaattctgatattgggagactcccagtctcccctcttaatacagtcatggaaagaagtacattggtgtcttcgaggtctgcgtttcaggtctctctgtggccccactactggaactttatcatactgccaaatcacccaattcttttatttacttatttatgtgttattttatttttaattgatgaataacagtcacctrattcttaaagaaacacttaacgtttaggggagaataaaagattctactattctaacatgtgtttcctttctctgttgtaggtgccttgcagaaccactgatgacttacaagttgcacaaagattttatcattgctgttagtaagtatacttgcatcatatacacattataattgatgtagttttatgctgccatacttaggcatatattactagtatcagctagtgaagatttttttcaagtattgcttaaaaagttgttaatctgggccgggtgcggtggctcaaacctgtaattccagcactttgggaggccaaggctggcggatcacctgaggtcgggagttcgagaccagcctgaccaacatggagaaaccctgtctctactaaaaatacaaaattagctgggcatggtggcacatgcctgtaatcccagctgctcgggaagctgaggcaggaggatcacttgaacccaggaggcrgaggttatggtgagtcgagatcgcgccattgcactccagcctgggcaacaagagcgaaactccatctcaaattaaaaaaaagaaaaaagttgttaatctgatatttagtaatttataatgtgttttagaagccaataagaaattgcagaattaactgaaatattttgacacttagtgagacctcattgggtaagtgtggtgattataaagaaccatgaggaattattattctaatttcattttatttgaatgacaaataccagtttcttttaagagcaactaagcaggactctaaatacgtacagacgattatgtccctgcacatgctcatgtgctgtattcctcartctggagatgagtcaaatatttttggcagacagcaggtgcttccatcaatcccctctccctcatattttatttgcaatgatcacatttatgtcatttgtttagatctgtgattgccgtcatatgatatgaatagatagatcaatttaaaatattagcaggaagagttgacatatgttatctgagaagttagtaacgtgtatttgtaaaccattgagactgaagtgccaggtaccatctgagcccatcacaacaacctgtaacaattaagagctggcatttcattgttaagatgtatgaggtgtgactacaaccagattatttttcacaatccaagaaataaattagttgctttagtttatttgcacacattgtartgtcacaggaaatgtgtgctgataaaagtgtcagataaagttgaatgacctcggttttcaatccagcatttatgactaaccacatgatctcatataaatctacactattyagttttctcttgaagctctccactctacctcctcttcatagaaatctttgtaagacatacaggaccagaaaaaatatataatctgacctctcattctatgaactaggaaatcaggacacaaagtgggcaagtaacatgtacaatgaccctaataaattcatggcaaaatcagggctgcaagcctgttttttgttctttttactcttaacccagaaccctttcttacagaaattttgctttataacaaaagaaatttgagctacttggctaaaatggctcaatgagcttattgttttagtcaagcttttggtcacaagttttttctccatttgcttctgtggcaaatgatgattatattattataataatattcatgactatgatatttaaaatatcttatatatcttatatataagaactcatcttttgtctggacctaacatagccatatttactagatgtgaagttaagaaaattaggttatttggtttcaagcagcaaaagtccagctcagtataaaggggaagttattcagatcctaagagatatttcagtgaattccttggcagaacagaggtcagggtttccatgagcctgcaaccaggaactgccaagttgggatttgacatttctctactcactctttctggaggatctctcatctttgttctctactgtatttctatcattctcactttccttcccagtcagattttcttggagtagatttggtcacttcagccctgattttacattatctgccttttcacatatgcggaaagatcagatttttgatgtctccattccaattgctaggttagacctcatgtttascctgagccaggctctttcctcactccatgtctaaataactgcgcccagatgaaatggtagtcccataatgtgaatcctatgagtcaaggtactttctggagaaagaatttggtatagtgggcaatcatcccagaatttatttgctgcagtaagagaatgttaagtgaagctttcttgttctgaaatgttagacatttctccagcagacatgtcaacatcttagctttgacttggcagacgacacttgccataaatgagttcttacattttacatttaccgttgtcattatgggctaaaaatctgttgggcttgtgtttatgtaataatgctaacatttcagaacagcccttctgtattgtctttatatttgtaagataaggagaggaatctggggcttcatctggtcacactgggttgaatctctaggagctctctrtgggtgtattgccacactgctatgaagaaatatccaagactcagtratttataagaaaaagaggtttaattgactcacagttccgcagggctgggaaggactcgggaaacttacaatcatggtggaaggtgcctcctcacatggcagcaggagagagaagtgctgaggaaagggggaaaagccccgtataaaaccatcagatcttgtgagaactcactcactatcaagagaacagcatagggtaaccgcccaatgattccattacctcacctcccactgggtccctcccacaacacttggggattatgggaactacaattcragatgagatttgggtggggacacagccaaaccatatcaatgggctaatacgtactctaatgactggcacattaggcagtctatagcaattgctgtgatcattcacatttctaaaggtttgattctgtcttcaggtagtaaaacccaagcaggtgatgagttttggctgtatcaaagtatacagttcagtggctaagagcatctgtgtggaatcagtagaactgggcttctttggcttctctacttcctaacttcatgaccatgggcaagttactcaacttctgcaagccatagggaatgataatgacagtactacatgaagcaatgcctatgaggcatgaggggtaggagtggtaattgtgattagattactaatgtttacatacccaattgaatggaattaaaacttgagcatttgcaatcttttttatgtaacagaatctgatgatcaaaactacagggtggaggctgtacatgcattggtgcacaaattgccggagaaaaacagagagatgctggacatcttaataaagcatctggtcaagtaattctctaacttacattgttcatttaacttattgttcattgttaagtttgttcatgtctttttaaagtgtgtgatgatgttataacattggtattataattagagtccattgaatttgcttaaaaaatagtatggcagtttgtttttaagatatttctatgtaagtgtgtgtacctgtatatgtttatttgcatataattatgcaaataattatatcctttgcaattgttaaactaatgatgaaacaattagatgtgtcaacttaaaaatgaaggagtatatagttttttttcctcccaattcttttaggtgcattataagcaatgagtttgaagaccagtgctctatactactaaagtcaacaggttcccctaggtcaaactaacacttaactgttagattccctccatgtattcatgatttcacttgatctctggagatttttctaactttgctgctagtttattcatatatttaccatctctctttgtagataaatactgtattagccagagctatctgcagaaacaaaagcaatagtgtgtgtgtacatatatttaatatatatataaagagatagagattggttgattttaaggaattggttcacttgattatggaagctaataagtctgaaatctgcagggcaggctggcagggaagagttgatgttgaagcttgaatccaaaggcaatcttgagacagaattccttcttactctgggaactcagttttttttcttttaagatcttcaactgattggatgaggcccacctacattttggagggtaatctactctacttaaagactactcatttaaatgatgatgtcatctgaacaaaataccttaatagaaacatctaggataatcttcaaccaaatatctgggtatcatagcctagccaagttgacatgtaaaattaatcattataaatattatatctatctactatctatctttctataatttgaaagctacagagagagagacaaacacatatttaagcccgaagtgagtttgctatggtgctggaaacaaatgtctaaatccagttttaaacttacttaagaattycctgtagcattatttagtatttaatagggatatttcccattttaatgagtaccatggtttacaataaaatgattaatccttcattgttcataattagtaataacccaatttatgcttatttgagccatatacatttgaaatataacttactttgctcatccttccccagcattcctggcttctttctgaacttacaaaaggtcaagccctgctcaccraatgtgcattcagatcaccacaaatttacttataaaaacagcaaacagctaataacactcttgatccctggcaacctttcatggctgaaaaaaaattaggacagtctacctagattgggattccaaagactaaagactgattccaaatttccattaattaactctgagtaacagtataaatcattgctttcttcctaagagtccttttgtttgctatctgtggtgttttctttgattctcaactaaatttaaatatttaaaagtgttattaaattacaaaaaatatatattgtgggtggacttatgtattcattaggagatataacattttagaaaattattatggaatttcttttgaatataaaggaaaaartgaaagttgatttctcctaaacgaaaaccttttgattttacacatggatatttgctagtggtattaaatttgccaatcgatgtttttaattcaataatattcaggtgaccaataatccttactcagtacaaatgtgaaactaaacaaaactcttggttctctgtttggaaagcccacttaggagcacatgactttgcttcatgtatttgggtactctgttattagctatatatatatgtttataattgttatatattcctgttagactgacccttttcttttttttgagacagagtctcgctctgtcgccaggctggagtgcagtggcgcgatctgggcctactgcaacctccatctcctgggttcaagtgattctcctgcctcagcctcctgagtagctggtactagaggcatgtgacaccacgcccagctaattttagctaaattttgcatttttagtagagacggggtttcaccacgttggccaggatggtctcgctctcttgacctcgtgatgcacccgcctcaacatcccaaagtactgggattacaggcatgagccaccacacctggccagattgatccttttgtcattatattttatctttatctctaatagcatttctttgttttaaaatctattttgtatgatattggtacagttcttctggctttcatttggttactgtttgcatgatacatcttctatccttttactttcaacctgtttgtatttctgagtctaatgtatatctactgtagaaagcatatagttggatcttactgttttttaattcactttgataatctctgacttgattatattgtttaatccattcacatttaatgttattattgatgtggttggacctatatctaccatttttctttttgttttctatatgtttcatgttgtctttgctattcagttccaattttactgctttcttgtcctaatagattttctagggcttatcatatacatcttatcagaatgtacttaacttaattcatgtgagcatagaaacattatttttacataattctgtttcctctttctcctttttgtgctatcattaataaacatgttatatctatatatgttatatcccaacaatccattgttataattatttatgtaatttaatgcttcttaatgaagttgagggaaaaggagtaagtacatttatagagtttgatacatttattaaccttcttacttaccattttttaaccttttcatttgttcctgtgaatttgagttaccatctggtattattttcttactccagtacagctttgctttatgcttttcatttgggctgttactgtcaaatatatcacatttttaaatgttataggcccaacaatataattattaatacatacatattattaaaattgcattttaaaatcaagaaaaggaaggagaagaaatatatatttctactcttttaattacataattacctacactgggtgttttttkkttttttttgtgtgtttgtttgtttttacatgtgcatttgaattacagtctaaggtcacttgccttcagcctgaagaacatcttttagtatttattgtgatgcagatctgctagcaataagttctctcaatttttgttttcctgaaaatgcctttatttcaccttcctttttgcaggttagttttgctggatagaagattcttagttgrcagactttttttttctttaagcattttgaatatkccatccctctgccttctagcctttattgtttctattgmgaaataagcttattggggttccttgtagaccccagtaagactttttctcttgatgctttcagaattttctttttgtctttggcttcagcacttttactgtgatgtgtcttgctgtggatatctttgcaattattctacttggagtttgttgagcttcttggatatatagattaatgttttaaattaaatttggaaaattttcagccactatatctttgagtatttttttctacttctctctttcatctgctactggtactcccattatgcatttatgagtgtgcttaatgtcacagatttttttctgatgatctatctttctttatttttttctttctctccattcctcagattgcatagtctctattgatacttttcatttcagctattgtgcttttcaacttcaatttacatttggttcttatttttaaaataacctctctctcattattcacattctctatttgatgaaacattgccaccacacctctgtactttcctttatctttagacatggttttcttgaggactttggatatatttrtgacttctttgaagtctttttctgtttaaatctgatgtttgggtctgctcacaggcagtttttattatctactttttgcctggtgtatgagtcacactttgctgtttctttgcattgtcatactttttggttgaagacatggcattttagctactgttttgtagcaacgaatactgatactagtactgattctctctagcttttattgttgtttgcttgtttgtttagtgtcttttttttttgttgagacagagtctcactctgtcacccaggctggagtgcagtggtacaatctcggctcactgcaacctctgcctctcgggttcaagtgattctcctgcctcagcctcccaggtagctggaattacaggcactcaccaccacacccggctaattttgtattttcggtagggatgaagtttcaccatgttggttgggctggtcttgaactcctgatcctcaggtgatccacccgccttggcctccaaaagtggtgggattacaggtttgggtcaccgtgcccagactaattyagtatctttagtgaactattttaatgaagtctatttccccctctgtgtgaagcctcttctattatctcttcagagaatgcagcctgggacatgaccacagwcacccagggataacaatagtttcaggagagttctgtttatttccttaggtgatctataaatatgtctgcttcatttggtatcacatccagcttgttagttttcactaactgctagtagattgctctgttgtttttgacaacaccctggagcatatccagttaaattccagctccttgccaggtcacttaaaaaaaaaacaaacagtctttgagatttgttatgatgctaaaaaggctctttctgtctctttccctagttatttcttatgatttagcgagagagtcagagttttctgttcttatggactctaccccctctgggtaaaatctttgacccattgctcttggcactggctgagggaggtagtcctgaaacgagggagattttggcaccaatattcttggcctgctgcacctcaggtaaagccatccaccctagatgtctggctagttggaggcaaagaattctctgggtttcagaggctgaattcccagtgagtgccttttgagttgcattcgctgggaattcagcctctgcaacccagagatagagggcctgagatatgctcacagcctgccaaccccatgagatactgcatcacttgacttggggytgagaagagagggagccctgtcttcttggccacatttgcccagagtgaagttttagtcatattgagctgagggtggaagaaagagggagccagttgtacctcaaaagccacagactctcggcttttcttactgataattagtagatttgcttraacaaatatttctttattctttaagttttttttatagagactttaactgtttttggttatggttttaaataataatttttatcctttatgattttttctctgtttattggatccrtggggctccttatgttctaccatttccataagtagaactcttaagtatataatgttggtttctttatttgtaaactcctagatttgaaacaatacaagttgacagatcctgatatacatttcctcttttaataaaagaaagagagatgttccaggagacagcagttgagtatcagctccctacatgaattggggaaataagtagtagaacctgctgaaatggtgagtggtgggagtctgtatctattgagtagcccagcagaaagaaaattcaataaaaagaaaatcagtcattaaaataatccatcytctgtgcaatgtagtcattaacccacctttcaaaaccaagtttttgagattcccaagtttactcctaatgagcttaatattaactatattccactttatttacattatgggaaccatgacattttagcaagagtgcctaaagctaatttaatttcagggataatattatcttgagatcatatacaatttattattttatttagttctcacaacaacctaacatgggttgttatatatataatttacagataaggaaaccgaaacctagagatattaaataacataaatgagcttacccaacttccaagagatggatccaagctctgaatctagataggcttactacatttacatactactttcctgagtagattttctaatacatattaagcaattaatatatagtatttgattatattaaaaggaaacttggaatgaaactcttcttacttgaagtaaatgctttcttagctagtgctctctacggcataaggaaaacgtcagtcagcgtggcagctttctcttcctgttttgtgacaggagttgcatggatagtctaaaatcctggatttcccataaaatcttacttttggttgtagaatgcagtttgtgacrcatggtcagtccgacataaacataatcttgtgttatactaataacctgacttggagtaagatagaaaagtgagtggttaaactaaaagataagtcaaacaaatgaggtatcctctaaagaatgtatctaatttccagaatagattagtgaactagtcaaagtcgttcttgagagttgctaggattacttcactcaggtcagtgatatcagaggtttttgatttgattgtcaagccagcaatgatgctaccacatctccttgtctcactgtttgcctagcacagcacccaatactagggaggtactcagggaagttttggatggatggatggatggatggatggatggaaagaggaaagagaaagaaaagaaacatgttggccaatgatctatcccaggagctcaaggaacccactgacttgcagtcaggagacctgaattgaaacagccacctctgtcctgaatttgttgtgacctcaaaatacacgtttctttaggagcctctgaggtttttaaaatttgtacgataggaatatctgacttactgggaagactaaatacaataatatgtaggaaaattcctggcaatagattctcaataatatgtttggtgactctgaatataattgccaccagtctattcttaactgtttgttccaaaagaaatatagtagcattgaaaataccaaacagctgatcatctttctagggtaattgtacttgatttaggaaattaggggtttttttctttaatagattttgttttgcctgtaattatgttttacgtgagttaatgttatctgtttacatctttttaggccatactccaaatgccaattggaagtggctaaaagtaggacaatttccctataatggcatattttacattttttgcaccacaaatttgatagaagagactatttcataattttgaaacatataacttaagatatttttgttgctttttatttgcagagtatcactacacagccaacaaaatctcatgactgtctcaaatcttggtgtcatatttggcccaactctaatgagagcacaggaagaaactgtggctgctatgatgaatattaaatttcagaatattgtgrtagaaattctgatagagcactatgaaaaggtaggcggaattttcatgtggaagtgtcaagttttatatcttggttttataaaggaattttgcatttgatctgtgagctcatgagttttgtataaattacttcttaatggggacttcagttttctttccttgttgtttttaagtgcttctcaaaatccttcagttaggtggttttctttccttctacataatagacttcaaaaggttttcttctttacattgtatggtaagtttattgctcctgtgcagagaacattttaaaatcactttgtggttggttctattttaaccttctctttgtatccctttgaaatcaaactcttaattatatagaggtaatgttctaactaaacaaaagaaaaaaatataggcaacagtcttgaagtcttctctatatctagtccctaagaaggatttcttgaaaaaagtgagatcttagaataactatgaaaatgggaaattttgaaagctgaattagttggagtattaagcaaattgaaccatttaaggtctaacaatttgtaatccttttatctctgatctggtccttgtgagagaatgattaaggccttctcctcccctgggtcccttcccagcacccacagaagcatgcccttagtgtctatctaagggcacaagctctctcacaatgcaagagcacatggctgtgtcctgtagctctgcacataccttaacctgcagctagccacactccttggcagctcagagccaacagcatggcagcatcttctcctgagaagcaaggagccattcagtgggagaaatgatatagagtgagcctcagctcttctcaggttatgttttttcagagtatgaaggtggaaagagagtattacaataaaaaccatcaatatgtcttgttcatatttggaaggtttcttaaagttattgaaagatcttctagattttacttttgggaaatgggagagaataaaaaagaaaaccccgtgaaagaatactccagataaatggaaaagttacaattgctctaggatacttatattttgcagctgattaagtagcatatggttcaaagcttattttataatgaaagtggcaatatcacccttttattgaccttggtccatttttcttatacgtagatttttcatactgctccagacccaagcattcctcttcctcagcctcagtctcgatctggatcccgaaggacacgagcaatctgcctctctacagggtctaggaagcccagagggaggtatactccatgcctggccgaacctgatagtaagtgcacccggccttagggagatgctttcttcattctttggttcagatgtatttcactgtattggtaattaggtagaaatagaagatgttctcactgatgctctttccccaacacctcctcttttatcatttgtatattctctgtcaatagttgtacagttgcttgggtaagcaaattcattattgatacaaaaaggaaaaaaagaaaaaagggctcaaggcccttttttctgcaactgtgattaagtacattgggtgctcctttgtagcaggttctgtcctattgtcaaagtggtaaagaagaaagcaagacaaagtctgactgaagctgtcattttcttccttcctttcacattatgttcttaaagcattatctcttgggtatcagtgtctgaaagagaaaagataaaaagaaacarcacacattatcatcaacttacaattctgagccaagccctaaggtgatgtgggtggcaycttgacaccatggcacacattaaactgtggctgttctcattttattttataccccccaccccaattttttgctcacagtcaatatttaatagaaaatagtcaattatatattttaaaataactaaaagaatgtaattggattgtttgtaactcaaaggacaactgcctgaggagacggatactccattaccatgatgtgcttatttcaagttgcacacctgtatcaaaatatcctatgttctccacaaatatgcatacctattatgtacccagaaaaatttaaaaaaatagtttactaatttttaatttagatatatgtgaatgcattattatgctttatctgatttttcttataacttgcttttaggaacattaggaaataaaaccagcaaaatagccagtttcttacatttctatattcttagcaggaaaggaaaaaagcctttgaaaattgaggtacttgtaatttactactgacatttaatggtgcctttgaatgaaagaaggctgagtactttgtaacttggaatcaatcacctatgatcagaaaagtaaaagaaagcagaaatatgtttttactataccccctttcattgattccttgtaatatcatgaaggaatcttatttctcttacttctgaatcctgtttcataaacaaattttgtgggaattcaagtcaacccacttatrcttcaagaagtaaagttattatctaaaggcaggtagttcataggtacatacataaacttcctaaaatagcattgaaaaatacgtttggcaagttcaaatgcatattttaaagcctttctccagtactgaggacagttctccgtactaggtaggggcctaccactttaatggggtcaggtggccgcagaacacatggtaagttggagaacagaagggttttggtgatgctgttatcaatagatagttacagttgctttcatctctctccctcctactccttaggtgactcctatagcagcagcccagacagcacacctatggggagcattgagtcactctcttctcattcctctgaacaaaatagcactacaaagtcagcttcctgccagcccagggagaaatctggagggattccttggattgcaaccccrtcatcttccaatggacagaaaagccttggtctgtggacaactagtcctgaatcaagttccagagaagatgcaaccaagacagatgcagaatcagactgccagagtgttgcttcrgtcactagcccaggagacrtttccccacccatagacctagtcaagaaagagccttatgggctttcaggactgaaaagagcttctgcttcttctctcagatccatctctgcagctgaaggtaaggcagagtggaacttgtgcaagatgtcattgtctcagtgtcacttgtgctggattattcagcatggttaagcagggataaagttaatggtggagaaactaatgatgcttatctacttttttcctgtgcttggattttacaacctaggcactgtgacatttttcctgaatcwttccatgtctgtgaagtgatgtctttgtaattattgtagattttgatctccccaagtgatgggttgctgtactcaaagaacattctgtaccttcccatttgggctcagagaaaaatgcttmcttttgttatgcacatgtaygtgttattgctattaygttgtctaatagcaccttgcctattttcttgggctttctttttaggaaacaagagctacagtggatctattcaaagcttaacttctgtaggttccaaggagacacccaaagcttcaccaaacccagacctgcctccgaaaatgtgcaggagattaagactagacactgcctcaagcaatggctatcagcggcctggctcagtgtaagtgagcgtttgtatatttgctgtgtctcccagggatacagagrggagttgagtgtttcagaagaactcttgggaatcccacaagttgaatacattgggaatactttatctgtagagtgggtacgtccacttctgtaagactctattcttttctatgagtgatgtggaagtcttyggatatggacagaatctctctcacagggcagcacttcaagcactttcctttgaagcagagctatgacttaatttgaggaaatgaaaactgatgtataatacagtagttataagctttggaactaaaagtgttcycattaaaagctaaacatccatctctccgctgaagagactgccacgcattgactataagccaggtccctgctctcctcactgttttaaagcagcttctttctcacttccatcctacgcccgcatacctgagtcctcactgatttaaacaagctagtagagaatgaggaatatgcaaggcaaaagtgggtacttctcatcaaaggaaatgatgcagaactgtaaaggctggtaggagaagggtacatagacatgagtagaaagtgggtgaagaagaacaatggaaacctggctaaacaagtaagcaaaaaagagagataaaaagtttctctccctttcattttgttttcctgacatttgctgagaatttcctaatgctctctgagccattactggatgtctttacatgagttatctcttttaaggtctgcagtgtcctttggaaatgggtagtataaaccamattttagagatgacgagaactgatgcttttctaccgtttccaacctagggttctctgactacaattctgtgctccttctgttttaccttctccatttttaatatgatggcattcttcctgacattttaattattcattaaaagtccagtaagacattttactaagcctgtttctataggaactgtgtcataaattcattagttcatccttttctctgacaggaaccttttggttgcagagcatgttcaatgtaccttatctcttttggttagaaatccagttacagtggtataggcaaatatatttgtcagtgtgtctactccccactgtgtgtagttctgcccattaagggaaagaaatgttaagccaatgtattagggaagatgagagaatataaactccattcttggtggaggaaagagaagagtttctcttttgtgattgtacccataaagwagaaattcaaatgakkaaagtgtgtgttctatattaggtgtaaaatgatctttgagataatcaaatggcttggctctgggagaagagtttgtcaattaaagaaataagatagattttttaaaaatctagcttagaacatcaaggaattttatagagtcttccagtaaatatagaaactctttcaattctttttagtcatacctgatagtcttacctgttcaattagaacatatcctctctgccttgccctccatgatttgaaacaagatgtaaatctacagatttgtttattggccatattttcagagtttgcccttttcactttacagacatatgttcacatattaaaaaaatacatcaatagtattataattagtgttttcttagctaaaagaatgaacaacagttcttttgtcatgttgatttgattctttgcatcttcactcgtggctccacaggagtcaatagccgtgctgctgggagcagagtagagagaaaatgttccttttactgctcccatggttttctgagataaaaaggatgargatagtaagatccccagaggaagtagctattggttaattacagcctggtactctgtaarctggaggttagatctaaaaatctcattgacattaaaggttaaaacaattaaaattcccttctaattttggcaatggttctcaaccattttttgtcttgtttaactggcaatcatgaatttcactttgagcagaactgmatgtgattgacttcatgaaacttgcattttaaatcatttttcagagtggcagcaaaagctcaactgtttgaaaatgttggttcacctaaaccagtttcttctgggcggtaagttctccaaacccttaaatgcatctaaaaaaaagtggtgacattgttgctttgtattgacatgacactctctgtgacagctccgcctctccattatgcagatggtcaaatttaagtccactggcccttcacaggaagtcatgtctgtaaacagcatatatcatctcacattgttatagtgatgtctcatttgctgaaatcttcacagtagaagggctctaaacaaacacatttcctagaagataaaaattgctataatcctttatacatctttgatgacagtcattttrggaccacttttcaaaagcatgttcttgatttttaaaagttatataactttttctgkaggaatcatcrtgaatatccatggaaaaatatggttatccttaaggatctcagagatgttgtagagttaattrcccaaagcgactctgtttttagagtacataatttcattaggggttctcagattttacattccattccattattaaaaggatatgagttgttacatcttgcttctactaatgtgcttgcttctaaagttcctrctttactcttcttgctttcaaatttattcttgatctacagtgggcttcggtttttaatttgaataatggaatttcataaagtcagaggcttttcattatttttttttttttactatcagctgctagtacaggtaggagacactcaatgcctattgttgaaagagcatataaatgtgagaacttgaataacaaaccttgatttttcctttagatgtacgaacacatttttgagcatccaatgtctggctaattgaggctgtgaaggaaaggaatcacagatactgttgtatagttgttgtatagttcctctaaaagttatttaaccaaataatttttatcaacctgtaaaagtatatggactttttcagcaaacatttataaagtacctagacagtactgggcatgtgatagttattaagaataacaataacaataaccttcaaactctctttggttttgttcaaagyccagtaagggccctcatgtattaggtttttttaactgcagagagtagagccactttggtatcttcctagaataatggtcagtgcctagcatttaaatagctgagccaagagcatgtgaaccttacctctgtcagcagtgtctttatcttccttttgaccgaagcatggtgaaaactaagccccatgcatgtcayagcaaacatcatttctctgagattgtcttgatttttaggctttagtgtaagggatttaaccttgctacttcttctgccatgctacgtagttgaattgctcactagatggagcccttttattaggaagctctaaaaagtcagcctgttaagtaaaaactcaggtaatcataatcaaagaggtaatccccgtagagctttaagaaaacaagctatggatgaagtaaatcagaaagctatcatataataaaaatayactcagatgttcaacagtcaaatcawacttctttttcttyttcttytttyttttttttttttttttttttttttttgaraaagagcctcgctctgtcaccaggctggagtgcagtggtgcgatcttggctcactgcagcctctgcctcccaggttcaagtgattctcctgcctcagcctcccgagtagctgggattacaggtgtgtgccaccatgtgcagctaatttttgtaattttagtagagacagggtttcaccaggttggccaggctggtcttgaactcctgacctcaggtgatccacccgcctcagcctcccaaagtgctgggattacaggcatgagccactgcacccagccaactcatacttctttaatatgtttttrcattctgaatactctaaatcaacttttagtggggatcagcataaacttagagctcactcagctctaccttcagagttacagtctgtcagttcacaacacttgtgatttgtgtgacaacttttcactgaggcacaggggaacatgaatgaactttaggtcagacagaccctagttcaaatttttaggtcaccactttctagttcgtgtaacctcakagttaccaatgttggggaatctgttttctttatccatacaatgaagatcataattctcagcttgccacattgttgggaatgtacacaatactgtgtttgaacatgacaggtgctctgtagatggtttctacattaataactattatcataattattgttgaaactgcttgcctaagacactcaagcctctgattaatatattagtggtatttaaacactaactcttaacagttacctgatattcttttgtactcttaaataaaactgaatgactcatagaagttgagggaatttccctgaccttctacaatgcctgtctcatttttgkttttttcctaaggagctcaaggttacccttgaattagaccttgaaagagatagaaccagtagaggcagtaggaagactagccatattttggaaagagaccagttgggagattttagtggatggccttgagccacggaaaagtaacccccccagcattgctgcaggcactgcaggtcattgaacacaggggtgatctaatctatgatgcaccagaacagatcattttccagcaggttgtgaaggggagagaacagtcaaccatttaggatggaactggtgagatttaaaaggccttaatcaggagagtagcaaagggatgaaaagctataaggagatttttatgaataggatcaggattgggcagctgttttgatattgggaatcagagacaggaaaagaagtttccaagtctctgagacagtgtyggaaagaatggtggtttagcttctgatcttagcttgtgcatatgtaggaggaagggaaaattttggccatagggtttgaggaggctgtgagggccaatgagaggcagttagaaaggtgcagctggaaccaggagacagcatggagtttgatgccatttaagaaacttctacrtagcaattactctgtataggtgaaggtgaaggtacctagcaaggaggcttactaaatgaaaaagaacaaatggccaagcattggtctttggggaatggttttatttaacgttcagacaragaagaatggacaggatgagaaggcatgaccaacagtggtagaagctgcaaaaaatggtttaggagatcaggagaggacactggttttaactcctaagacatcattggagatctgtaagaaagcaagttcactggaatgggagggaccatgctgcaagacttgttaaaatgaagattccagggttttgccatagaccttataaaccacaatgtccaagactgaggcctcgggaagctgcatttttgtcaccctccccaagtgattcttatgtacatgaaagtttgagaacctttggaatagagaaaaatgtcatagtgcccggcacagccctaagcagacattggttatttacaattgttttccttaacctataaaatccctttaaaagccaaatgtagctaggctgtgtcttaccattataaaggcatgtggaaaatagtatccttaaaaccttcacctgggtctcagttatactcagagcagagatccactttaaagtagtataaacaggcaagctatacaaatatgttttgaaggctgaattgagaattaagagcataaattgagaattgagtgtctggttcattgtaaacaatcaaatgtttctattatcaaattttaaaagacaaatattttgcttagaattacaaaggacaaaaagctcaacaaagttaccttgcccagtgagtttgagtttttaaaaggctataaatcactggtttagaacacagttacatatgtaagacacacataagatgcagaaatcaccataacacccataagcaaaaaaatttgtgatgtttaaaataataatttaatgattttcctttagaaaatgtgaaaattaatgaagaagtaagttaaaaccacttataatttcatcacctgaagaaaactgttaaaatttggtgyacagccttctaatctcatccgtggcagtggtttctcaaacttcttgatctcacaacacctttataaacttaaaagatctttaaggatccccaaagggcttctgtttttatggattatatttattgatatttactgtattggaaattcaaacakaacattttaaaatatgtatttattgaaaataagaataagcctattacatattagcacaaataacataatgttaatgaaaaatgatattttcctaaagagttgaactgttttacattttttcagatatctttaatacccaacataatacaaaataaatgaattgtcatatacattccattagcttcagagcaatgatatcttaggcttctgcctgcccctctatctcccctccacaggttcccttgaccaccttttgaaaactactcctctgtgataaacacacagaaaaggacacatgggcagggatgcggggatggtaggggagttcactgtattgttgctatcatagtgcccaacacacaatagatgctcaataaaattgttgaatgagtaaataaaatgcacatttttaacctaaaaaatactttgttactcactttttcacttctttttcaatggaattgcaatatatatgtctttgacacaagcagctttaactctacaggctcaggtggaagtttttagcattgaggcattcagtattacttagatattcaagctggaaacagccagtgtttgttggaaaaaaatctttgaaaagaacatgtaattaattttaagaaatctgcaactaggctgggcatggtggcacactcctgtaatcccagcactttgggaggccaaggcgagtggaccgcctgagcccaggaatttgaaaccctgtgtctgcaaaaaatataaaacattaattggcacggtggtgtgcacctaatagtcccagctacctgggaagctaagatgggaagatcacctgagctcyggaagtcgagactgcagtgagccatgattgcactattgcattccagcctgagcaacccagtgagaccctgtctaaaaaaaaaaaargcaaaagaaagaaaaaaaaatctccaattagtgccaarggaacaaatgcagtgcttattggtaaactgtcatgggcaatttagggttctkgccaagaacaaatttgtaaactttttgtcttacgcattaacattgtttcattacatgagttcttcaatagcattatctatagttgctgcctaatacttcattagattggtgtgctctaatttattttttaagttctctactgatgaatacttaagattgttgtgatttttaaaaatttccacttttatatatagtattgctttagtatctttctacctccgtgcactcctattcccttcagaagtgaaaccgtcaatagcatacaaaatgtgtgtatttctcattgttcaaaaggcctcctgaagacattgtatcaattttgatgaatttttaaaatttctcttatgtttaagataagcactggcaaattttgcacactgacccaatcaaacttttgttaagtttcctcattaaatgcattagacggcatttagaatgaggaatgaggctggtgggcagattatttttccaatgataagggaagaaatggctttcagaactgtgccattacctcactctcccaagcagtaagaggcaggattttcaaaatctttttcaaagagagattagaatcttctgaagagagatacaataggtgacagtgttattttcacatcctcttcaatacaccaagacagtaaaagaggaagcgttagcacctgaggaaacttcactgttacagagtctacattaaatcatcaaagctctctgcagagttaacacctgcagttacagatctcggcagaagaaaattccgtctagtcagtgcacagataattgaaaagtcatgacaggtagtattttgtgctgtgtgattttgacacatttaacaatatgtatgtctttatttatttagcgatataattattctgtatgcttttcccctccctcaaccagtcccataaaatactataaatacaagtaaggagaacatatatgtctaaaatattaattacaagatttggggtacattttaaagtgtagttttgaaaattaggtcattgtaaagaatattgtaatcacttctacaacttcggagattgtttccttatcgatctctttataatttrtcttaatggttcaaagaaatatgacttattgtttactggaggaagctgttgctattagaaaatgtgattttttggaaaaatatttccttttttttaggaaaatggttctgaagtcctcagtaatatcctgatcaaatcaaatggttatagttggctagaagatttatagggaaaaagtttatattctatttgagactaccatagtctgattcttagaagtcttcagaacctgataatgttctcacttccaacctctatgcaaccaacatacccaygtgcatgtgttcatgtgcacacacacagttctttaaagtcctgtccttctctgagtgcctctacttcctcagttcttccttagaccatgtttcactgggacgttgtgctgtgtgggctgagggtcattcccaaatctgccccgctagcaagctttctgaaagtacagcctgaggctcacctctgatgaaaagactggaggcaggtccagaattttcctctctacaccttccaatcttcagatagtctttgggaaccccagtttaaatggctggacctcattctggaagtgtagggttaagatccagggttgagctccaacagggaaatgaaattataaygtaatgctgctgctttgggagagctgtggatgcaaatgctgctgacgctgctttgcaggtatagtgctgggaccccaaggaggatagataaggtgccctgaatctttaaaaagactcatcatgtagaaaatgaacccagaacatctttcctttttctcactcattcatttagctaacatttcctgagttatactactaagcatcagacatcgttcgtggagattttattgtgtctaggggagaagataaaaatatcagcaataataacaaaataccagatactaacaccatgcagacttgaagcaggaagatatgatagttcyctgggcagctatttcagagaaggcctgaccttcagcaaagttcttgaaatttaagatgaacctgaagtacatggccatgtgaagatcaagaggaaaacatctcaggacatggacatagctggcctgaggtgggaatgaatttggcatgtttgaaggaaagaaagagggccattgtgactggagtagagtaggagagcagaggcagggacacaaagaggcaggggagaccacccggcacctgactgcatatagtttgtgggccagagtaggaagccagttgaagggttgtcagggaagtaatgtgatctgatgggcattttaaagctgccctctggctgctctatagataatggattgtaagggaatagaggttctaggaagccaggaagccatttagccaaccaggttggaaatgctattgtcttggactctggttgtggaagagatgataagtacttggagttgggatcagttgcaagtcttaccmaggttattgaatgttgcagattaaaggagaccygcctggtgccttgattagcagcctcagattttgcctttttagtgttggctcaaatatttttggatcatatctcatatgtaactcctaaattctgacttcacttgaaaaaaaaaaagagtatctggtatgctgagcatgaatttgcatatagtgacagaggttgggagctgagtggttggcttctcttgttaaggatgggtgtaccctggtttgcaaagcctccacctgtccccatcatcttcttgatggtgaagctatagttggttgccatttatcatcaacttatcctattatttttcctatatcacgcccaatcaacttacttagcatattctttaagcctttcaatttttggatctcacctcagatagtctgaacatgaaagtgggggaaaaaaaagctttggggtacctaggaaccttcgttcctacatagctgtaaaaacagcctatttagcaacttattaaacagttaaataatagcagtctctaaaaccaacctatattgttataagccagggattaccctggagagcattgcctagaaacacaagaaaggtttctagtgtgctagtaatccttgattkcttgatctggtaatatgattgtgttcagtgcaaaaagcaccgatgtacactcatatatgcactttatgtacattatgttccaattacaagtaaaaattaatagcattcttgaagaagagttttaaatatagatgtccttaggttgagtgttgaggttttgacaagttgtcttgctctttcagccaagccaaagccatgtactcctgtaaagcagagcacagtcatgagctttccttcccacaaggagcaatattttctaatggtaagtatgtcaattccctctgcctaagtttgtcatcatggggaggatgaaggaatagtatggtggtatgagtctaaagtagaagccagaagcctcagattttatcccatgtcctgcctctcataacgggcatgcatgaacacatcaaatccctctgggtggcatgcatctgtagtcccagctgcttaggagggtaagcccagcccaacccacaaaataaataaataaataaataaataaataaataaataaataaataggccaggcgcggtgactcatgcctgtaatcccagcactttgggaggccaaggygggcggatcatgaggtcaagagattgagaccatcttggccaacatggtgaaaccctgtctctactaaaaatacaaaaattacccgggcatggtggtgtgcacctgtagtcctagctactctggaggctgaggcaggagaatggcttgaaccagggaggcggaggttgcagtgagctgagatggcaccactgcactccagcctggcaacacagcaagactctgtctataaataaataaaacattttaaaattccctctggattcattcctctcctgcaggcatttgtgtgtatgtacctgtttgtacatgtgtgtgagacagagagattgttttatttgactatgtgaatgcaaaggacattccaactttagagggctgtgacattgttttgtttggacgtttgagttgagtgtatagttggaccctctacattccagaatttttgcatgcacactttaaccaaccatggatcaaaaaggttggaaaataaatagataaataataatacaaattttaaaaatatatagtataacaactatttacatagtatttacattgtaaaaggaattacaaataatctagaaatgatttaaagcatacaggrggatgtccctagggtatatgcaaatattacatcattttatatcagggacatgagcatgcacagtttctggtatccacaaggggtcctggaactaatcccccacagatactgaggactgacaatccgatgtgggtgtttaacccatctgtttatataattatttgacactaatgttgactgagtgctatttatttatttattttrccagtgtacccatcagtggaaccaggatggttaaaggcaacttatgaaggcaaaacaggactagttccagaaaattatgttgtcttcctctaatactatttagtggatggcagtatcttcatggtatccatggtaacgaataaatgctatgattttatctgacacagatacacggggatcagcccactaagtgaaaacagtcaatttctatcaagttcttcaccagcagactatgtagctccttattaatggaaaaaaagatttaaattgttggccattcttttttggttggtttcttattttaaaatatcttacttgtgaaaaatgtgtttttggataatatgtaactctccacwatgtcgcttccgtagcaattgtagagtttcaaatactgtgttaaatactgtatcccagaaatttggaaaccagaaatctgctatatggattttgagatctgtcctttactgcctggcattctctgaggatctctgaaattgttacttaaaaatgtaatttaaattgttcatttattgttttttttttcttagaaatatactgcttttatatatgattgttttgctggtcctaaacatttcaaggatgtaagtctttgttttaatataactttatttgttttccaagtagatgataatattcaaaagcawtaatgtatatgatatctataaaggaagcaaaattaagtcatacactgattccactgtaaacaatctgtccagaattccagacaccttcagcaaactttttctgtaaaggcctgatagcaaatatttttgtggtgggttgaatttggcttatgggttatagtttgctgacacctagtttagagggtgtgtaaaactatcttcataactttgagatttttataaaattttacatgaaaatatactgataaattatatgcacayattttctaccagtagcattatagtggcatcatagaagaatatttaccaatgatggggaaactgtaaaactacagtatcaaggcatacaacttaaattccacttggaagattgtaaagtgtcaaagtattttaatgataatttaatttgggcttttgaaatgttcttctacaaatgaaaaagatgtttaaaaacgttacaagggaagctatgccttctgaagtctrtccttagttgaaacagaaaataaacacmaaggtacaagatccttaaattattttgaaccacagaggttgaaattgttttgtgatcttcagcagaaataaaatctgtacatgattttcttttatgccttttagtttacagtctttattagcaatttcagtgaatttgtagagcatagtaataggtatttactgtccacttatatatatcagcatctggtcatgcacgaaccattaattctatatttctatttcaataattctaatatattatttctataaatgtaatatctgtatgtggcaaagagcctttcttctcaagatcctgaaaagctggttacctgccctttgagtgccacagtcctgaactgcttgttcttgacatcttgcatattacttcagagttccccactgtgcagactctcaggtattaactgtaaaaaactctttacatgccattattatctgtaatctctatctcttctactttaaattaatgtttctagaattaataggttaaatacacatacacacacacaactatgcctcagaaaagttaggcttttacaaataaaaagaataagattagaattaacaagtagagagaataacggtaggcagagtcagaatcaggaataaatatcagtgaatcaaaagaatgaaaaatattatgtaataaaaattakcaatgtaatgtaaacgtttgataaaagagtatctttttcttttatctcttactgttgacctctgtgcactgtaataaggtgtgttgctggatcttcttggtcgaggtccttggtgaccttagtagtaataacagcattgctgacaccctaattgccctctgctggaacagaaggtagttttccagtgtaccagtcccttagtctatacagcacccttggtttaagcacacttgccatcatctggtatcctgctagactagaatctcttaaaagcaaattggttttctttcaaagaccaacttgactccaaagagagattcagaatcctacttctcctgctgctgcataaagaatctcaaccttcattttatttgaacacggaccaaagtgttcctgcttctgagttgtctgtaagctaattctgyagatgttccattcagatttaaagcttttttactgcataggatgtggataggaagcctaactattgtatctgatggcaaggcatatgttgcagccacagtactggctatggtccctttgctgaaacaagctacagaagcactgattcaagttgtgcttgtgcttgaacttttaatcttctagatttgtgaggatggctctttttccttcataatggattacaatgtaagcaagtcatggccatatactggagacgggctaaagctgcttttcccttaaagtaagtttcctacagataaggtatttatgagcactgagaaagtcaggacatgtactctaaatcacwcagaatgttaattccacaggaaggcaatgccagacattgaaagaggatcacattcaacttttaatagtagttcaataacaaaaccttagcttttcaggaacaatgtgaagatacattagaattgccacatccatatcttcaaaacacgcaacctctgcaccctaataactgcttacggtataatcagtatgatgatgagattgagggggtctaaatttaagttccttatctcctgagttatgtgaaaatatccctcartacaaaacatttgtgtgtttcacagatgactctcttgttttgccgtaatgctaccaagtttatggaaactagtcaactgaaggatttttctgttgtgttatgtgtaaatgtctgaacagtaaaatcatctgtgtattcctgtaacattcacgaagtatgaggaagtgggtttctccttgtttgatgtgagtggttttgcttgttgcatgggttccctgtgctttgtaacttgcatgaacacaaccaggtttctcaacaatgatttgtctgctgactcttttcagagatagtgraggaaaaaaaatgtattaaaaccccaaattatctaggtttccaagtaggaaaaataaagatacatatgacttttattattattcgatgataattagctttatataatgtggcatccttcataaaaattcactatgttgtgaggcaaacagatttctcactatcatccagtgtaccctgctcaccttctcactcctagcaccgttcttctggtctgtgttgaaaagggtatcattcatgtggtttcagtttagaagagtccctcagagctttgcctcaagcaatttcaaattgtagtgataccttaaatcatgtattcaggatgccttctttagcatttagaaccccaactagacttatactttgactaaagtcagaggcagaccaatttagggaacagattttgttctttgcttttatgatacatttgtaactcacagctgttagcatgacctcacatcactgcgtaggacccggaaatcacatctcctggtcaggtcacgarraagaacacaggcttgactattgtccagaagttactttccccttgactaaaggtttccccttagggtacacattgctatttaactttgcctcctacccttttttgttaccttccaaaatcaagacacttttaagaaacaaagatagttttctgaacattctgtgtcctgcctgtctcctgttgattcgcagatgtaatatcgagtattcatcaactggtctcmatttcctgaacacattcactgtatccctcattgtmaccgttatccccctgcttcaaaatgtgccagttccacttggtaataacgttgggaaaatgcaggtttatgaatgatgtggacttttagaggatcaaatcaataaattggattttttattttttgagggcagctgccctcactgttttaaataaagaatcttacataagaatgttgacaacattcacagtaagccattggcagaaaattgatctgcatgtcctagaccaatgattacaaktctgtgggtctgtggtttarggggcccakcccatcattccttttccccttggcactcatgagagagaygccaagttcagtgtggatttttcttggtgctctatggagaaatggagtctgtgtgcttactgaagagtcccaaaaascagagaccattttcatttactgccatcataaatattctccaccattcaagatgcctgtgtacacggctatttgggaaacttaagtgttggaggaggcaggggctgaaggtgtcaaaacctcctcagtaggataacccctttctcccctttggaccatctgccatctttcatgagtgtttcccatggtgtttttgcatccagagttgacaacaactcaattttgccttgaatttactcagtcttataaattaaaaatgtgcattttatataaagatgcattttatataaaaatgcacacctttaatctctatatggcagcatatacatatatatatataaaatgcacacttttaatctctatatggcagcatttttgaggctttatatctgcccgtgtaccctcaactgcctcctttttgcagagaacgatccccacaggaactggtctaagaacactgtctgcacatgattgatgcttaaaatccaatataccaccacatatcaaaggttgggattttcagagtccttcttgatttctgagctgaaaccttaacaaatagggaatttggcagggaagacacctgggtttttaattcagaaccctatttatatactgttaaaatttgaggtactrtagtttatataaaagtcggatgttaagatattatatttcagtactaggagcttctttgcagtcattaacatgacaaattaagtaataaatataaaagtgattgtccataaattatcattgaattttttgtttattttgtagtgttctgtatttatctgcactttgtgtatatatacacacatacatatgccaacatgtaaataacctcatgtttattcctaatctaaattgccacaatatttttaatgtatggttacactgtgttttaaattactttaaaaataaactttgtaagcagattttaatttagtctttgtacttgaagacccactgtgttggagggcaattgtcttggcttcatgtagagaaaaaacaargtttctggtactgtgagtgatcactttggtatggctaaatcatagcagaatttggtgaccttctcctcacaaattggtattctgcaagctttggaaaatgttaatgttgataacctattaataatgcaggtatccaccgaggggagagggaaatgggccatatgcaaaatactaaatataacaagcatacaggcttacctgaaaatatatatgtttataaaagtttccaagtgtactatggaagaaatatcagcgtacaaatacctcctgtccatttttattagtcttatgaacctcttggtcatgacttgacttctaggtaaaactttgcttcgctgcatcaaaaaaaaagataatcgtgtatttcttttgcattgctccatagattattagagtgcagcaaatcaccttgccaaagctaagcctcacaggttgaccattggacaacctggcttgctcacataggttgtagttttcatcgatatcagaggaaaagagataaattcatgacacaacacctgttcagatataaggattaatgttaactccagtatagttaagcaggaaaggactattaggttagatattacagattattctagatgagctactgtttaagaatgttggttaagactgttggcctggaatcccctataactgatattttagaattaaaaatgaattaacttccagtggccaaagcyggaatgatttgagcaacaaaataatgcagtattgaatgattggcttataaaacaaagtataaaatgaatatccatgaatccacatggatatcaatgacaataaatttcacttgtgtaaaaaaatgagggagaagagacaaatctttacaaaaatattccaaatcataattggagttatagttacccttccctctagcaggtagaatttaatcctctcctgcttaaaggtgagctagacttagtaactcatttccaaaatttagagtatagaaaaccgtcataactttatagaaaagaaacctagtagccactgtcttaaccaagtggtaaaacttaatatcagtgatatcatgtggttgacttacaccccataatatgtgatgtgaagagcaattcacctctgtggtattctttccccaaacccataattccagtgtaaccattagaaaaacatcagacaagcccagactgaggacattctacagaaaagatctcagcccagtactcctcaagactgttgagctcatgaaaaataggtaaatactgagcaaatgtcacagatcagaggagacttaggagacagggcaactaaatgtaatgtggaaccctggrctggatcctggaacagaaaggagaaaataatagcgggcgtggtgcctcgcgcctgtaatcccagcactttgggaggccgaggcgggtggatcacctgaggtcaggagttcaagaccagcctggccaacatggtgaaaccccgtctctactaaaaatacaaaattagccgggcgtggtggtgcatgcctgtaacccagttactcaggaggctgaggcaggagaatctcttgaaccatggaggcagaggttgcagtgagccgagattgtgccattgcactccagcctgggcaaaaacgagtgaaattccatctcaaaataaataaatgaaaaaaaataaataaataaataaataaataaataaataaaagataagctggtggtgtccaaataaggtctaaactttagttaatagtttaaaaaacaaggtaacaaaaactactcaaaaaatagtacatgagctggggatacttatatcattttgggaatttaagtgactttttcaagaattaaacattttcacttgttccccattaaattttgatctgtgtgtgcaagatacatctcctattcatcagtcaatctcagrctttagaamagagttgggcatrcatgaatacagtagagtaagcccctttcattaaatgaacaaattcattagcaaaggaacaaacattrtaaaccctttaataatttaaagaatacggttgtgggcttgtgtttttatgtctgtcaattctcccaggaacagtgaaatcattcttcaacatccatgaatatatgaatctactctggagccatttatatgttaatggtgtaaacaaacctttacacacatgaacaggtcttaagggcagaggttaaacagattttcttctgtcattaccagacctagcaacacttgattgagctgtataatttgggggtgatgttgaagaattcaattttctaaaccattaaaaatattccaaatttggaaaattaagctatattaaacttgcagttgaagtttttgagccaaataagttgtgttgttaactttgaaattgtgtatagcccaaaactgagaagacaaaattcttttcaagtttccaacatgacagttcttgctattaggggaaaaagggggggagctatagataagaacatgagttatagatwagaacattagaaagtttttcraataagataccctggggaatgcaaatccccaaaatactggttgacatgcttgcaaatgctgtttctgggtatttggggcaaatgagccaagcatagcatttagctagactccatttgttgacagaaataagttatctggaatattctacctttccaaatgccaggagccagtctgctgaaaagcattctctggatcagcctgtgctagagggaggaaaacaaaaatacgtatttctaaccctcatagatgtttatattcatcacatcacctatttacagaccttttttttttttttttcaaagaatgggtgcaattacccaattcaaatagctttcaaaagtatttttggagcaactggaacagaatcattttcttcgaataaatcttacttggaaccagttaaaaatatgagtcaagctgctagcctcagtgcctacatgtgtgctgaagaatggcctgcacttcacccatgcaggtccacagctgcttttttttyytttttttttttttttttttttctgagacagtctcgctctgtcacccaggctggagtgcagtggcacagtctcggctcactacaacctccccctcctggcttcaagcgattctcatgcctcagcacccccttacaggtgtgcaccaccacacccagctaatttttgtatttttagtagagatggggtttcatcatgttggccaggctggtcttgaattcctgaccttaagtgatccgcccacctcagcctcccaaagtgctgggattacaggcgtgagccaccgtgcccggccaggtccacagcttctggcatctccatggaa

SEQ ID NO: 10043 - DNA, 34981 bp, Homo sapiens
agacccttctccagccagtgagtgggcccaatgatgacagccagggctgtatcgagctctgccttgagctccctacgtgcatatctgaagatgaggagggagccagctgagcctcatgtttgcaagcccactttctggtggtgggtacccaaactctctaggcattctcaaagcaccccccaggcttccaaaaagggagatgagaataagaaaacaaccagaaagtgcaaaagaaaatggtgaacaaaacaagggcatcttttattaccccctcttcacatattctggaataccctaccttaaaaacaaaacaaaccgtgctacttggccctcttcccttgagttgttgtctaatctcattcatttcactgccaaactcctcaaatgcatggtgtacacccactgcttccacttcctgtccactcatctttttcctcattaactccctgtggcctggctttgcctgtgacactacacaagctgcttgctccaagataatccaagttcttttctctgtcttcctgatacacaggctttctttggcatctgacactgctggccacctgctcttcttgaaatgcttcttttggcttctaggaaactgcccatttctcactctccttagctgtctttgaatctccttctcttctctgcrggcttctcttccttctcccatcgctgtactgtgggtatctcccaggcctttcctcttctctccaacctcatggcttctttcacatcccccgaggtagtcagccctctttatccagttctgcccactggtctcatagctccagcttccttcaggaaagcaaaacatcttccattggttgccccactcttacctccatttcccccaaacggaacactgtccttcytcctacgwgtcccttttgccattattcccatccttgccgacatcgtgcagtcatgcctctcccttcctcatttcttgcgtccaggctgttagcaaggcattttattccttctttagaaaggccttccagccttgcctttccgcttcatgctgctggtctcgctttcctgccaacgttgatggctactgtatcctcctctcgggtctccctgcctccagcctctcttccgcaaagcacccaataatacccctgctaggcccatcaaactctggtttcaagacatcacaatgactgccatggtttagaactttagtcattcctcattgcttccagggtattatccattttgctgtcctgggaaacagggcagagtccgtagaaagccctttgagcaagacagacctgggtctgaatcccagtgccacgtttgctacttaccttgagcaaacatcttagcctctctgaaccccattgctcctccataaaacacaattwaagtgacacacaattgtgaacatgtgtgagatcatggtgtataaaacactgtgcacctggcacaggtggtcactcaatatgtatatagccctttcccctctccgacattggggccctacctttttttccttccacctatgtctccagatcccccatacgcatagcctcatcaggcatgtgtcctccgagtccttatgaactcaccacaccgttccccttccatgcctttggtcactctgtgattctcattgcccagaacatatcctgatactcagtgcttcttaaagccctcccctcaccaagctccactgtcatgtccccatcttgaaagcttattttattttattttattttgggacagagtctcactctgtccagactggagtgcagtggtgcgatctcagctcacttcaacctccgattcccagattcaagtgattctcatgcttcagcgattctcatgcctcctgagtagctgggactacaggagtgcaccaccatgcccggctaatttttgtattttttgtagagacggggtttcactatgttggtcaggctagtctcaaactcctgacctcaagttatctgcctgcctcagcctctcaaactgctgtgattacaggtgtgagccaccaacgcccagcctgctcctatctggtggcctgaccaatgtcaccacttggcctgggtcaactcctgctggacctcaggacacactgscttgtcatgagggaagctcagtgggcagcagtcaagcagtgatgcctatcccagctcagggctggactgtgggcctagactgagtctaggacagtctgagaaccttggcctcctggcatgacgttcccaagggcagtcacagtctgggtagagccgaccacaagactgcaggatttctgatctactctggtccagaccatcctttgaaccaagtggacttagtggggctgaaggaggtgtggggacaaagaacctatggcagggcaaccggccctcctgtctgcagcctggcttcctcaattttgtgttcctaacctaagagctgccattcagtgagggcccacagtgtgtctgctgtgtgtagactctgcttgtgcaatctctaatggcctgagtagccctggaaacaaaatgtggctatycccatgttacagatgayaaaactggctcaaagcaattatatgactgacgtagaccacacagctagaaaatggaatcactgggtttcaaagtggatttttgtgactgactccaaagctgaccagastgctcatcctgtatgcttctgaggcctctggccctccagaccggtcactccccacaaagtctcccttttggtgagttgtgtccctccaaacactccctgaaggcaagatcaacctgccctaactaccccaaagtgaactaggccagccccaagcctgtctccggccctccatctctctctttgttcacatccatcagaaagcagagacctagagtagggaatgagagggggtgcacaagtacaaaagattttgaagccagcaggaagacraaagaakkacaasaaggagcagctgtttgtaaagggaaatctgagacaggcagaaagctcagctccctaatcctaggctcgtgtggagccagggcagggtccccccaaggtcagggattctgggggcaggcggatgggagagtcagcctccactcctgggtggctcccctctgccctgtgcacaaacaacgagtgcctcattcctcccctgcaccaagtgccctgcctcttcctgccccgtttcttccttccctttgggtaccggakcttttttctgattcccctctctccatgctgacatcgcttctaattcgccctggtgtctccctccctcacaattrctgggagtaattttagcaacttttcctctgaactaccgctggcgtgttcacagcaaatggcccctgttttggcttsacacttgatcagggtggtgacagagtgcagacaaagccggcacaatgcggggaggggaggacgggggacagatcaccttcctttcacttcaggccttatttggtctaccttgccgaagcggccctccttccagcctctctttatttatagcattttgctttgctctcctttatcttgctatcactttgtagcacactctgcacaatccccacccaccccagcatggtggggcccctggcccctcactctccccacaaggaatgtgcatgtgtgcaaagggtaggcctggatgccatttctacaaacagttgactaaagcagtccagagcagggatctttctttgggtcattgttatgtccttattgaccagaataatgcctggcacayagtaggcactcaataaatacttgttgaatggaggaatctgcaaagctgctcagtcttcagacagcagcaagcagcaggaagagaatcatgatgtaaccaagagcaggtgctggaggagctagggagtgagtggggatctttaaggacagcaggccctctgatctgtctgagctgtgaggcaaagcctagttagggaggtgagttctatctgcaatgagagggggcatgggtggagaacagtaacacccaaacaccaacagaccagagcctcccaaacccgaaaggagagaaacaaagtgtgattgatttcccaaatgcagaaaagactacccaagtccccagccaaggaaggasgctggcctgtggtgaagacactggctttgaaatggctcaacwwcgtcccaagcaccctttgtgcatcttaattgccctgggaaatcagggaggggtggcagtttggagcttggaaagctggaaggtggggacgaaaggagtttttgcccctcatcgccaatccttgaggttcctacagggaacctcagacaacagctgtcttaggggtttccttccagctccaagcagctgtattatctatagctttgagagggtctgtctctgtcaatggggctgattcctcagcacctggcagggcctgggggggactgccagagtctgttctgccgggcatgttagtagcacagactactgggataacctcagcaactgtataccttagcactgcagagctgcggtgttgtcagacacagcccttgcagttcgtggtctacccccacttgcctgcaccccccttatagctgctcaatgtcctcagactgtaccttagtgccttggttaccaagcaacccccacagaggcctcctcctggattttcccttccctgctatgcccaccccaccttcaaaatgtacctgctgcacccatcccccaggcctgcctcactccttccaagctgacagctaatcagatggactaatccgcatgcgcggaagagctgtgctygggaagaagggggagatttcacaccaaatcgtgcagtggttgcctagacacggagccagtcaagcttgcatgccccgttgctagaagagcatggcatcggtkgtgttctgtgctcgyaggctgggccccagctccctttcctcccctcctttgtggctgttcctcaggcctgcagaggggaagatttttcctgtcctgttactctgcctcacttgccagaacactagtcgcctccagctctggataaagctgaggctgggtgggccagacaacagctgtcttaggggtctccttccagctccaagtagttgtattatctatagctctgagagggtctgtctctgggctcaggcctttagtacctgtggggcagagccaggaacgtgagtcaggcaaaccgctccaaactaggaccaatgcagctgggtcctgctctctgcgcatagggggtccccacatctttggaatcccagcccacctttccaggctaccctccacaggccgggctccactcccatctgctgaggtttcccaccttgaatcctgctgccccgattagctgtataaccttaaagaatgcactgtccctctccattaaatgaagtgcttggatggattgctaaaggcctgtctggctcggaggcttggtgacctcaacacattgcctgctggtccaaggaaatcagtgcctgagccagagtccccatctctaagctccatggttattgttcttgccacctggctaggaaatgtccttccagctgccccagtctagctgcctcaccctggggccatgcccccaactctgtcctacccttctctgctgctgacactcagccccttcccagcttccagttggatacaggacctgggccaggagagcagggaggacactgtggaaatgcggccaggccatcaggggcctcgcagcaggggactggagggggagcagtgtccagggccagaagtgccctgcgggagagccaggacattggctgcctgtggtcttggtggtcgtggtcagttccctctcctgccagctgtggaatgtgaggcctggcctgggagatatttttgctgcactttgagccaccccgccccctggaactcagaccctgcacagtccatgccataacaatgacgaccacttccaattgtttcctagctggagaggcggggaggggagcactgtttgggaagggggggagcctsggggaratgcttctagtgacaacagccctttctaaatccggctagggactgggtgccgttgggggtgggggtgccctgctgccccatatatacagcccctgagaccaggtctggctccacagctctgtcctgctctgtgtctttccctgctgctctcaggtaggagcgggagctggaggctttactctgggataagggggctccaggcttaggaagggattcctcttggaatagcaagcttcatgcaggacttcatgcagagtaccaggtccagtcactgggcacacatgtgcaggtctaaacatgggcgtatgtgccacaggagttcctaggggmagatatctgcatctgagcatatgggaccaatatgcattacagggtgtgtgtgtgtgtgtgtgtgtgtgtgtgtgtggacaagcctgcatagtctgaatgtgagaaagggtatgtacctcactgactgatacagaaatatcaagtgggagatgtgggtgtatgatcacgtctgtgaacgaggaggttcctttgcagggagggagaaagaatggtggagaaggattctaggaagtgtgtatgccttcatgtgattctgtgaggcctggaatgtgtagctacccctgtccatgcatgcagaggttcttgtctatgcctccacgagtmatgactgttatagtatctgtaccctctgcagaaggaactcacaggcacgggggtgtaggatgttccaggtctttgtgtactgaagaacacgcagtgatgtgatctacttacgtggcacacatcctsaaatgtgcacatttgctgttgaggcatatatggcaccctggggttggggtgcggattgaggtatgggaaggaagcctgtcytcatgtgagaggcatgcccaagcagcaggcatgagtgttcatcagagggcttgtggagggtgtttggctatgtgatgggtgtgtctgtgagaggaagcccacagtgtcttctctctgagaatgtccacaaagtctgacaacaaaatggggacaggatggaaaagaastctctttagagtcatcagacttgcattcaagycttggctctcccacttgttgtcatgggctcttggccaagcaasccatttaacctcgatttcctcatctgtcaaatggggtgaagactgagtaggagaaagtgcattgaagtgcttttagactggaaagtgccgaacaaatgtgaccattagttgtctctcagatggctcaaagaaaggtaccactagatgggtacaggcaggggtgggaccatctcgcaggagtgaagaggattagggttcaggttgagttgacaccaggaagctgttagaactagttcttgaggaaaaagggaatagggtttgaaaaacaagaaggatgggaccagagaagctgaccaccctttccaccttgttttggaagagggtggatgctgaagaacagagccagggagaagcaggaaggtgggactggtcaggttgggcacagcctgccctgacacagcctcttccctctctccaggtyccctgcaggccttggcccctttcctcatctgtagacacacttgagtagcccaggtaagaaaagctgaagctagagygttgaaaatctagtaagactgggcattagagccccaaagccagcctatggaactctagtttctgccatgtgctggagagaatatcttggctatcaagagctacttacctgtgaccagggggtccagggatagatgagggtcagagatggaaatagttagatttctgctcctacagggagctcagaatgctcttccttcccctaggagagccccagcttgaacaatagttwgttgttccttttaccctggcaggtttgctaggctgctcctctggttaaggggtaacctcaaagaggaagggactcactggtaactcctcttgactcttgagcatggtgctaggttttggggctcccactgaaggggagagcccagggagggaagggaagaatgggcagatgggagkgcagccagcttctgctcactccaggcacagccatgggagmttcggagatggcagtctttggggctgccgccccctacctgcgcaagtcagagaaggagcggctagaagygcagaccaggccttttgacctcaagaaggatgtcttcrtgcctgatgacaaacaggagtttgtcaaggccaagatcgtgtctcgagagggtggcaaagtcactgccgagacygagtatggcaaggtgggtgtcaggctgatgtgagagtccaccctggccacctgtacacctgggtggacagagaggggtacacccatgccccatgcccatgcagacctgaggatggtcccattctccttccctytggggaagaatccagaccctccaaagagccctctccttcccaatatcccttctgtcttccctgtgagatcctggttccttctctcttgagcactattgccctgtcactcaccaactcctaaccctcttgaggaaggagggraagcccaggctgacaggagggcttgggtgggggctcttgcagacagtgaccgtgaaggaggaccaggtgatgcagcagaacccacccaagttcgacaaaatcgaggacatggccatgctgaccttcctgcatgagcccgcggtgctctacaacctcaaggakcgctacggctcctggatgatctacgtgagtsctgcmcctggccctacgttgggatctctgttcttgctccatccatgtccaccccaggagccaagagtgtcttctgtttgtgtctaggcagggttacactctaacctcgtcccaacatccttggttcaattccaacactctggggactggcattactcagattgagtgcatgcagaggttttcctttctcttctttctctcctgggatctttctctaactcccaaaatcaccagccctcccccttcrcaactggcaagtcactgctccttttctatccccagacctactcgggcctcttctgtgtcaccgtcaacccttacaagtggctgccggtgtacactcctgaggtggtggctgcctacyrgggcaagaagaggagcgaggccccgccccacatcttctccatctccgacaacgcctrtcagtacatgctgacaggtgagaggccctggaagggtcttcctgaagggaactgggataggccgggagggagagggagaaggaagggagaagccccacgagagcatcctgtgcagctcctracctttccyccccaccctctccccacagacagagaaaaccagtccatcctgatcacgtgagtgtagctgctactgtattccctttcagaatctccctgatcccagcctccagccccatcaggtgtcccaggccccgaggcatagactcagcctctttccccscaacctcgtgcccatctccttcttctctgaccattaccctgacccctctctttgctctccctcttcctttctgctttccatccccttcatgtttttcctctcccacctccttcacccactctccaactcatcacgcgtttatccagaagctcattatcgccatgtcttcacctctgcattttctttcccttcagaaacatttcccattcttccagccctaccaacttttcccaaaacagcccaggcccatctcccctgtttactttgcccagccaagcacaggctcagcctgcccaaaccagtgccttctggtggcwwccttcctggtgycagccctgacctctgtgcatcagaagacagttgtggattttgggtgtagataacctggcagcttcttgcccagggctcctactctcgggtaggcccaggcattctctcctgatttgaggcttgyyggtctccagtagtattgttcactgcccaataagcccctgtcttcacagcggagaatccggagcagggaagacagtcaacaccaagagggtcatccagtmctttrctgttattgcrgccattggggaccgcagcaagmaggaccagagccygggcaaggtaggcctgctgccctccaaggtcctgtaccgcagaaagggagggagaagagctctcacctgcctccttcttggcctctgcagggcaccctggaggaccagatcatccaggccaaccctgctctggaggcctttggcaatgccaagaccgtccggaacgacaactcctcccgcytygtgagtggtccctgaccttggccttgggacttggactggtggaggaatggtctcagatatgagccttcccccaactcatcaccactctcttccmtctctccaggggmaattcattcraattcattttggggcaacaggaaagttggcatctgcagacayagagacctgtgagtgccatgaatctgctaggctcagcctaagctcacccttgctctagaccatctggtcttgacctctctctctctcccctccctccctctgtttttctcctctttaagtctctgtctgtaggtgtctctgtcttcaggtctacatatctgtctctctctgagacttcctctgcatctttctccatttctgtctctgcatggctaggtgtctttctctgggatttctctctgagactatttctctccttctgggtctctgtttccatctctctgtgtgatctctttgtgtctgtccaactagtctctctggctcttcccttccctctgccttttgcttgctacatttatcattaattttccttgtgcccaaaccctaacttttctttctctccttcttctccccacctgttcacagatcttctggaaaaatccagagttattttccagctgaaagcagagagagattatcacattttctaccaaatcctgtctaacaaaaagcctgagctgctgggtgagtcagagccaccractgagaccaactatctccatggcaacctggtcccctctgcttgtggctggactcagctggcatgccctgggtttcatggcactgctggattcaattcagtgggatgtggggccaagccaagccctgtcctgtgctcttcctcaggccatgtgctgtggcgagcagcctccatgagagccgggggcttgtgtcccaccctaaccatgttttttcccctagacatgctgctgatcaccaacaacccctacgattatgcattcatctcccaaggagagaccaccgtggcctccattgatgacgctgaggagctcatggccactgatgtgagtgtgtgaggacccagccagggggtgggaggattggcagygaggggcaaacagggktccaaaagcagagctaagackctggccattggttgtttaaagtggtatggacctcctgagagccagaatgtgccctgtgatcagggtgtactgrggaatggatgaggtgagacaggactggccagtatctggtgttctatcaaaccaggaagagctgaaasscatgagacagagagacacacaagccaagaaacaagcatcaccgagggagcaggacgaggagggaaggccatgcagacggcatggggctggaggggctgttaggtgaacagatgcagacaggtatggaaggccaggcaggaagcaagtgtagggccaggaagcataagtgggtaactcagaaaagctgtggccactgacactggggctgcggccaactgacgtctgctctgctcttgcatcttacatcctttgttttggagttccctgcatcttacatcctttgttttggagctccccactgggtatgggagtctcagaacccacagggattaaggagacaagttttctctccaacttacaagggatctcacttacccatcatacttctttttctggggtccgccaatatggggcctccctacagaaygcttttgatgtgctgggcttcacttcagaggagaaaaactccaygtatragctgacaggyrccatcatgcactttggaaacatgaarttcaarctgaagcagcgggaggagcaggcggarccrgayggcactgaaggtgggaggcagggattcttgggggcagctgtcaagtcatggagggccatgtctgctcagcagtcatctctcttctcttttttctttttttttttttttgagatggagtcttgctctgttgcccaggctggagcgcagtggcacgatcttggctcactgccacctccacatcctgggttcaagtgattctcctgcctcagcctcccgagtagctggaattacaggcatgcaccaccatgcctggctaatttttgtatttttagtagagatggggtttcatcatgttggccaggttggtctcaaactcctgacctcaagtgatccgcctgccttggcctcccaaagtgctgggattacaggcatgaaccaccacacctggccagcagtcatctctttaccaactttgctacttgccttttccttccagaggctgacaagtctgcctacctcatggggctgaactcagccgacctgctcaaggggctgtgccaccctykgktgaaartgggcaatgagtacgtcaccaaggggcagaatgtccagcaggtgggtccatcttcagatgataatgggtgggcagggtagggagactggcatggtgggatgagagttttcaagttcactcttcccaacaaccctgctcaatatgggtctctcctccaccttgcaggtgatatatgccactggggcactggccaaggcagtgtatgagaggatgttcaactggatggtgacgcgcatcaatgccaccctggagaccaagcagccacgccagtacttcataggagtcctggacatcgctggcttcsagatcttcgatgtgagttgggacccctgggagtgggagaacaatcactcactcgctcccacattcaacagctatttgcttagagccagctgtggaccagacatgggaaggcagtggggactgtgtggtgacagaggcagtcatttwctctgtcttcaggggaagccctccttcactgcyttgacatggaggggaccagccacgccctgctgggctcaggcacagtggacgggcacagccccaatggccactcacacccactttctgactgctcccacccctcatgccccctgcagttcaacagctttgagcagctctgcatcaacttcaccaacgagaagctgcagcagttcttcaaccaccacatgtttgtgctggagcagraggagtacaasaaggagggcatcgagtggacattcattgactttggcatggacctgcaggcctgcattgacctcatcgagaaggtgcctctttggccttaccacctgaattctccctgcacacccaacaagaacaccatagacaaaatagcagcccctctcccttctggggaatataaaaatagaaggggctgaaggatccgagcccttggttccagagcctatgttgtgctgagcacccaggacagggtggcaccagggacagctgatttcccaggggcttgaragtggacacatggaggatgggcacctgcatgatgacctccyacacctgcatgtttattgggcctggtttatgcatccaaggatcaggaagtgtgagggtggtgtaggggatcataagagtgcacctattttcaaccctagcatctcaggcatctgggtcgtggagtggtgtgtacagcatcgatagaatccatattcccagactttcacaaaggtccttctgtcatcagacaaaatcctccaccttgaaccggttccagtcagtagataactgtactcagagctgagcctactaccttaacacccaacatggcacctccacgagcaagtatattgaccatagagcagaatccatgtccacctgtgtgaaggacactcagtgatgctctctcctgcttcctcagcccatgggcatcatgyccatcctggargaggagtgcatgttccccaaggccaccgacatgaccttcaaggccaagctgtttgacaaccacctgggcaaatccgccaacttccagaagccacgmaatatcaaggggaagcctgaagcccacttctccctgatccactatgccrgcatcgtggwctacaayatcattggctggctgcagaagaacaaggatcctstcartgagactgtcrtgggcttgtatcagaagtcttccctcaasytgctcagcaccctgtttgccaactatgctggggctgatgcgcgtaagtagggactgaggctcccggtacagaggagcagggattctgccaaggttctgagccaggtcaattgctacaccccaccacttcaatgtcaggttgtaccccaaggtttacagactcagtgggatggaactgggtgaagaaactgaggcagccacattgaaggccctcacccaggggccaaatgccagcaaggatgtaaagaggggctgtgattctttactcacaccctacctccccacactgatgcttcttttgttgactctccttcctgcagctattgagaagggcaaaggcaaggccaagaaaggctcgtcctttcagactgtgtcagctctgcacagggtgagtgggacacagccccagccaacttggctccccatctgcccaaccccacccagccccacccttccctgccttgttcatcccctactcctcccgttccctgtctccttggtgcattcgggaccattttcactctgtcttctcttcccgtcatctcctggcctcttcacttatttacttcccatctcccttctctcctctttcccttctgtctcccaccctctctccttatccctgtctssccccagggccccttcatctctgtgacttctcgaattctctccatctctcttttccttccttcttctcctctcttcttcctgcatctctttctggcattttctttacttttctctattgcatttttggccacaggaaaatctgaacaagctgatraccaacttgcgctccacccatccccactttgtacgttgtatcatccctaatgagacaaagtctccaggtgaggccacaaactmrggccaacccactgctgggcatwcaccgccctgggaacaggacctcctaggacatctccctacctaccaccacagtggtttccaaaccacattcttctcctcccatcccgcatgaggcctcccagggtacctccctctcagcgctaccttgcacttgcagtgtgtaatgagggtgatgtgtaaggcactctgatggacattacctcatcagtggccctacaaccccytggatagctggttgtccaagacagaatcttagttcaactttaaatttacctgcagaaccacttaakcccccaatgagacatattcaaattgttaatccatttttggctaattaggagacagaggctcagggacctgggttcaagacctggctctgttcttgatcagcttagtgaacttgggccagtcccrtaacccctctgggcttaatttactcatctagaacattggatatatctgttctggctaccacctatgataatagktgtgaatcatataaaaaaggaatgtgaaagccttttagttaaaaatgtggctagaagaaaatgaaacaaatgattattactaactgacttgctaagattacaagctaatcagtgacaaagccaggatcagaacccagaacttcagtccagtgttctcacagactcctcctacttccttcttgccacaggsgtgatggacaaccccctggtcatgcaccagctgcgctgcartggtgtgctggagggcatccgcatctgcagkaaaggcttccccaaccgcatcctctacrgggacttccggcagaggtgggtatgagggtgcaccagagctcatagaacagggggagccaggctgccctgatgggaatgggatctgcaggtgaccctrgaattctrtgggcagagcagatcactgcagagcatgggtgactctggacacttccctcctcaggtatcgcatcctgaacccagcggccatccctgagggacagttcaykgatagcaggaagggggcagagaagctgctcagctccctggacattgatcacaaccagtacaagtttggccacaccaaggtgaggaaaggagactaattaattaaaggaagacatctcttttccattgactcctctgatgcttttcctgttgtaatcatcttagcaaaatctcttacctgtatgctacccctcccagtggaacatctagcaccactcccctcatcccagctccagctgccattgacctcctccctgcaatccttttctaggmtgttacccttcctaaggtaatccccaccatctctttccctcgtacccctccctagtcatggccaacacacaccttgcctgcaggkgttsttcaaggccrggctgctggggctgctggaggaaatgagggrbkagaggctgarccgcatcatcacgcrtatccaggcccagtcccgaggtgtgctcgccagaatggagtacaaaaagctgctggaacgtaggtgagagatctcaagaggaggtttcccgcttctctgaggcccaggctggttcaggggcagtgtcaggaaaaaaagctcagcagatcttcaaacacagagacctgcaggaggggctcatatgaacacactgcagtcacagggtcagaggcctcaggaagggtgggagggatgaaggaaatgggatattcccaaggtttcargacctcaggtaggaaggaggcaggaggctcarcactcctttcaatgggcccctgcagagactccctgctggtaatccagtggaacattcgggccttcatggggrtcaagaattggccctggatgaagctctacttcaagatcaagccgctgctgaagagtgcagaaagaragaaggagatggcctccaygaaggaggagttcacasssctcaaagaggcgctagagaagtccgaggctsrcyrcaaggagctggaggagaagatggtgtccctgctgcaggagaagaatgacctgcagctccaagtgcaggcggtgaggctcctgggctactgttggctcttccaccctgctctgccttcacttcccacaaccctgcacctccctgcacaggggctcactgtcttgttccttcagtcagaggactctgggatcaacacttctaaagacctccaaagaggtccctcaggaggaggaaagggcagagggaaaagagctgacttttaaaagcacaggctttctacttgggttcaacctagatacacagcttaattattttgtgaccttgggcagaccakgcatcatctttgagcctcaatttcctctagacagggaataaagctgtccatttcattaagccatcatacataagtgcttggcatcagcaaatgcaattcccacccttcgatggaggagaccagaggaagaggtccagatgaagatttctggttcctttcctctctgctcccctccccagtgttcccaagttatactatcctgaaactcttcccctccccatacttctgaagctcttgccaagtggggatatcctagagttaycctcctatttgagtgatgtgcctctccttccctctacstgcaagaatgaggaccttaccccctgaacagcctcccctctgttcctcaccttcaggaacaagacaacctggcagatgctgaggagcgctgtgatcagstgatcaaaaacaagattcagctggaggcyaaggtgaaggagatgaacragaggctggagratgagraggagatgaatgctragctcactgccaagaagcgcaasbtggaagatgagtgctcaragctcaaaagggacatcgatgatctggagctgacactggccaaagtggagaaggagaaacacgcaacagagaacaaggtaagggcagctccctttggctccagcccgggtctcatcaggactctcagaccatactgaccttgacccaggctagccactyggcatccagagagcagcatggaccttgacatggagctccccacagatggcaccaagctggtgacctttgaccctaaaggagatrggattcttggtcggcaggtgaaaaacctgacagaggagatggctgggctggatgagatcatygccaagctgaccaaggagaagaaagctctgcaagaggcccaccaacaggctctggatgaccttcaggccgaggaggacaaggtcaacaccctgactaaggccaaagtcaagctggagcagcaagtggatgatgtgagtagattgagagttgtggggcctagatatgccatgtctatctgtgcccagagctctgtgtgtgtgtgtgtgtgtgtgtgtgtgtgtgtgtgtgtgtgtgtgtttgtgtttatgtttakaggggggtagggttagaggatgttaacttttctgatatctttctagaarggagctggggaatgaaaagtcagaggtggtgatcaattctgaattatgtatctaatctcactggtatgatcaataatagagatgagttttcttatttaatttaagtgcaatcccatatatctctgcctttgacacaagatttagagggtcatctcataagaacatgataaatttctttggaaattttgtgaggctccccaagtagaatttttgaaattccaatatttaaggcagaatctgatcattgttccctctgatgcacatatgtctgttgactcacttatcactctgtattttaattatttaagcttctatctcagccataagactacaagcttcctttagataggaacttagatctattcaatttggggactgcagtgcttagcacagagcctgatgcccagtaggtgtttataggatgctgaaagaatgaatacggcggccagccgcggtggctcacacctgtaatcccagcactttgggaggccaaggcgggtggatcacgaggtcaagagatcgagaccatcctggccaatatggtgaaaccccatctctactaaaaatacaaaaattagctggatgtggtggcgtgcgcctgtagtcccagctactcaggaggctgaggcagaataatcccttgaaccagggaggcggaggttgcagtgagccgagatcgcgccactgcactccagcctggcgacagagtgagactccataaaaaaaaaaaaaaaaaaaaggaggaaggaaggaaggaaggagagaaagaaaggagagaaagaaagaaagaaagaaagggaaagaaagaaagaatacggctttggggtttcatcccacagtcatttattcctttatctataaaatattgattcagcatcccctatatctaggcaatctcacagtcccctaataacatttggcccactctggggaaggtttcccaagtcctgaacacaaagatttaccaagtcctgaggtaactgaacaacaaaatcaccaagtcaggatgctttgcctcactgggcctggctccttctctctaccagctggaaggatccctggagcaagagaagaaggtgcgcatggacctggagcgagcraagcggaagctggagggcgacctgaagctgacccaggagagcatcatggacctggagaatgacaagcagcagctggatgagcggctgaaaaagtactgtgtcccctccctgctgcccttcckcctccccagcccataacagtacaagcagacccaakacagccatcctctgaggcaacaacctcacgcagcctccacaagtggaggygcaaaccatgggaaaaggcctcccaggcaagggctttcctcccctagtcccagatatcagggtyagttagatggtcctccctggcaaaaagtccattgtatcccatgagwcctttcttcttgttaggcactcagtgggaatgaaaataacagccttcccccttcatacacatctctctttggagaccagttccttgacatggaggaaggctccacatgagagcctcttaggaaagtccctttgtggcttttcacagagagcccacagggcaccaagaaatgccctcacattmaagaagtcaggggwwcagggccatttctttgttttgcttaacttgtggttccaattcttagtgtaagttcttccaaaatgtatagactttccagacttggtaaacagtgagcttgcagaacatattttgataattgaaggtcttatggtgtttcaggctcaggactttgaaaggctttgagaatcatcataatctacatcctcatcaagtttgtgtttgcacaggaatcttcataccttcccaggcacagaatgtgttgaataaatgaataaatacacgatcctatttgaytctcaaaacaccttttaaggatggtatctttaatttcactttaccaaagaggaaaataagtttcagaaaggttagctgagttacccaaagcaatagtgacaaaattaaagaccatcagagctaaaaaggacctttgaaacaatstagtccgaccccctcattttacattatgagaaaacaaggaccaaagatgggaatgtcctgtagagcccaggccccatcaccctgtctacagcactcctcccattacattcttgttggatttcaatctcaccgcaggtgttacacttccagggatcctacatcacccccagaagctgtttttctaatgaaatcctactctttacctgtatcattaccattttcaaccactggtggaccctcctgaggccccacgagtctcccttacctcaccatccctccttccccacagaaaagactttgagctgaatgctctcaacgcaaggattgaggatgaacaggccctcggcagccagctgcagaagaagctcaaggagcttcaggtgaggtctggacacccacgcgggatgctgagtccctgggctggttctgtttcccctgccccctcctctagggtgtcctgttcacagcattacaggaactgattatgtgtccatggaggcaggcacgcagctatcacagtgtgcccatggatacatccaaaaggggtcaggtgatccacagagaccctgaaaaggtcacaggcctggagggcagaattcctggcttcctgtctcagctctgccttagttgggtgacctctgggagcccactccagatctctgggtctccatgccctcccctgttacatggaggtttttaagagtccttcgactctgmtggcatgactttcctccttactctagagcagaagctgtgttaggtctttagttgtctggtcagacaaatacggctctctcattttcaacttttgttatttttttatgactaaactgcttaaaatatccccagaacacaggtctctttgtccatctttaagagcaagtttcaaccactttccttccaataaagagcatgtagactgtcaggccctcgcctaaaggaaggctcttcaaactatcttccccaaatcctttaattcccacctctccastggaagagctaaactgacttgctgttccagagaagccgagagccttttagagccggggggattccagtggaggggtccaggcggtgggtctgagccctttgtgtctgaccaggcacgcatcgaggagctggaggaggagctggaggccgagcgcaccgccagggctaaggtggagaagctgcgctcagacctgtctcgggagctggaggagatcagcgagcggctggaagaggccggcggggccacgtccgtgcagatcgagatgaacaagaagcgcgaggccgagttccagaagatgcggcgggacctggaggaggccacgctgcagcacgaggccactgccgcggccctgcgcaagaagcacgccgacagcgtggccgagctgggcgagcagatcgacaacctgcagcgggtgaagcagaagctggagaaggagaagagcgagttcaagctggagctggatgacgtcacctccaacatggagcagatcatcaaggccaaggcaggctctgctcggcctcccctcctccaacttcctcctcccacctcccctttctgtccatgtagtgtctcttccttcatggttcattttcccacttcccttcctctgcctggttctcagatcccctccttcttttcacaccttccctcttcttttctccttcagttgcacctcttacaccccttcattccccccgcccccaacatccatcatataactctccttcccttctcaggctaacctggagaagatgtgccggaccttggaagaccagatgaatgagcaccggagcaaggcggaggagacccagcgttctgtcaacgacctcaccagccagcgggccaagttgcaaaccgagaatggtgagcctagagcaggggctccatggwtcccaccacagtctccccaacctcctgagccactccagcctcgggcacaagccaatacacgcacacacagacacagagtctctccagaaaatggggcctgagggctagaggaggaggtggggatagagaggagtgctgatctagaatggtgcttccccaggtgagctgtcccggcagctggatgagaaggaggcrctgatctcccagctgacccgaggcaagctcacctacacccagcagctggaggacctcaagaggcagctggaggaggaggttaaggtaagggctagactygggccacctggcccaagcaaggagcacactgactagccttgcatcaaatcacttcccttcccagcaataaggctggctgtggaccaacagttctccaagaattctaaaaagaaatcacagcccaaaccctgccacatgccatctactccccaggctgaggccctctgcttctgctgcatccctggacgggaggcagggtgtgagaaggaggagagaaaatgaactagggaggcacgagatggccttgcccgggcacggctaggggatgtagggactgcacaaatgggtcctgggatttgcagggccacctgaaaactggagaaagaaattmaactggagcctattcctagcactttgctggactcatgaaaaaggagaaagaacatgatttttaaaaaactccagggttcatactaacctgcctcttatagctcagtgatcttaggttagggaagtcccctaacctttctgagcctgtttccctctccccagccaggtaaaatggyggtgatgatgaccatgtctggtgtggggaggagctcagggccaatggccatgaagcttttcttaaatagttcactgctgtattggcattctttgttatcagcaaacagtaaaccatgacaggtccactgggggtttggacatagatgaggccaagggatgatgttgagattggggtgaggagaagggcaagggtggggttgctttatggagaaagctgarcccacctcctggtgcccacccctccccaggcgaagaacgccctggcccacgcactgcagtcggcccggcatgactgcgacctgctgcgggagcagtacgaggaggagacggaggccaaggccgagctgcagcgcgtcctttccaaggccaactcggaggtggcccagtggaggaccaagtatgagacggacgccattcagcggactgaggagctcgaggaggccaagtgagttctgagcagcctgacttctggctgaggcccctttgcaggcaggactcagcccagccccagcctcagcagatcccacacaggcgatgcttagctagtgtttgacaacacaggaggactctgccccggccccacctccttctcctctcagggaagctttttgctcgaattatgtttctgatccgaatataagacgwacaaaaggtttgtctgagggcagagtgcttccgtctggggcagggcactgtggcagggaaaggcagtggggagggctgcagaagcccatacctcctcaatgtccatagcgcagaggctgggccagggtcagagggtgcctgggtctccacgccctgctgggatcctctgcctgatgttctcggcccctgggacctgtcctcaggcttctccagctacacttctgaggtttcaaggattgtctttgagaaggttcatgttgtttcctcttkyccccatccacaccctccatcctccccaccctctgccaccctcccctgggcaggaagaagctggcccagcggctgcaggaagctgaggaggccgtggaggctgttaatgccaagtgctcctcrctggagaagaccaagcaccggctacagaatgagatcgaggacttgatggtggacgtagagcgctccaatgctgctgctgcagccctggacaagaagcagaggaacttcgacaaggtgggccctgggtggggsccgcagccagcatgcagggcaagrggrcatgaggggttcagtgagaggccagagccatcctccttggaggtgggggaggagggctgagcccaggcaggtcctgagacagaccctggacatggggctgaggctkgggggctgaagagtgagccttstccccgggcagatcctggccgagtggaagcagaagtatgaggagtcgcagtcggagctggagtcctcgcagaaggaggctcgctccctcagcacagagctcttcaaactyaagaacgcctatgaggagtscctggaacatctggagaccttcaagcgggagaacaaaaacctgcagggtgtgctgggggcccaagaggctggggaggggctgcactggcmgtgttcccatatggtgccacccaagggctccaagaggcgtctgggcaaagaggcrtgtccctccaactccactggacctcagcagccctcaaccgagttaccgtgttccccacacagaggagatctccgacttgactgagcagttgggttccagcggaaagacyatccatgagctggagaaggtccgaaagcagctggaggccgagaagatggagctgcagtcagccctggaggaggccgaggtgtgtgtgtgtgcagggcacggkgtgcagggagctgagctccaggmttttggsccstgttctcatcccccgctttgtygttttgttcactgtcccatccccagagcctagracagagcctggcacatagtaggcattcagtgaagatttgtggagtgaatgaatgaccagtcactgaactctcttcayatarrcattttacccattgcatcttagctgagcttcccatttccacatacctcccggttcccacctctgcctccctctgttttcttttatactctatacctgattgcctctgtttccttggcaacacttttytcttcattttcctycttrtcttcatagctggctctcccctgtgagggcctgaatcactttytcttaggcttatttttattttctcttagattctcttttcctccaccttctgcttctttgaaccacttacaccactcttgaagtcacttcgtatccatgattagtgagcaggcccccaccctgccctgtgccctgactgtctgcctgcatcccctcccccaaccccttcccaggcctccctggagcacgagragggcaagatcctccgggcccagctggagttcaaccagatcaaggcagagatygagcggaagctggcagagaaggacgaggagatggaacaggccaagcgcaaccacctgcgggtggtggactcgctgcagacctccctggacgcagagacacgcagccgcaacgaggccctgagggtgaagaagaagatggaaggagacctcaatgagatggagatccagctcagccacgccaaccgcatggccgccgaggcccagaagcaagtcaagagcctccagagcttgttgaaggtactcacccagaggggactggcctccacgtggcctggcgaagcagtagtgtcttgatacaggcaccagattcctcctgcccctaggttactgcagggacctctgacaggtgcctttagtgaagggaaccgaggctggctccctgctcatgcccactctcctgatcctcaggacacccagattcagctggacgatgcagtccgtgccaacgacgacctgaaggagaacatcgcmatcgtggagcggcgcaacaacctgctgcaggctgagctggaggagttgcgtgccgtggtggagcagacagagcggtcccggaagctggcrgagcaggagctgattgagactagtgagcgggtgcagctgctgcattcccaggtgagcagctcccctgctsattcctgaagggagcacaggctggggctcagcaagcaaggcttgagagctatgcatagatgctcaatgcttttcctgctctgcccaaccctcccccaacccagaacaccagcctcatcaaccagaagaagaagatggatgctgacctgtcccagctccagactgaagtggaggaggcagtgcaggagtgcaggaatgctgaggagaaggccaagaaggccatcacggatgtaagtcccccactccaccgacccgatccagaccagtgtctctccgtgggctgggcagcaagtgtgtgaggacttgaccagaccatgtgccacctctctcctgcacacaggccgccatgatggcagaggagctgaagaaggagcaggacaccagcgcccacctggagcgcatgaagaagaacatggaacagaccattaaggacctgcagcaccggctggacgaagccgagcagatcgccctcaagggcggcaagaagcagctgcagaagctggaagcgcgggtgcgggagctggagaatgagctggaggccgagcagaagcgcaaygcagagtcggtgaagggcatgaggaagagcgagcggsgcatcaaggagctcacctaccaggtgcgacgggcggtgactccaggcagagccctggcaccatagccacagtgacaaccagctgaggagwatgaagagtttgctcttagcctcttccagggcgaggatgggaatgcagcccccgtttcactttgcctagccctgccccactctgaatgtcccctagctcagaggtcagtctctgagcctcctggcctgggagctccatctcaacacccactcttagcccatcgccaggggacacacacagaattccagacaaagctcacccagtacagctcaccagaaagcaaatatgtagccagggtcacccccaaaagacaccaaaaacacacccatcccattcaaacaagcataadaactttttcattgcccagggcagtgtggactctagctttctgaggtgttttctagaatcagactctgaattagaatttgtttcttttccaatccaggatgtcactatcyctctaagcacactttgtccttaacttagattaagtcagtgttttcctggcctgcattgcagcccaggaaattccatcacactcatagccccaaagtcactcccagcatgtgccgaggtccagagcaggggacttcatccbgcatggggtccccggaccctgaaaaacctgctccctggagcactgcacacacacaattttgtgcataatttcaggagtcccactagttctttggactctttcctggtacagatcatttaaaatatttacacatatttggtaagaaattataaggagaattcaagtgtttagtgaggatcagaaagtagaattggstcaggatatcagatgaagcagggcagggcggaggggatgctaccttctatgactgtgccatcttcaccccctgcctaccctctggcccccagacggaggaggacaggaaaaacctgctgcggctgcaggacctggtagacaagctgcagctaaaggtcaaggcctacaagcgccaggccgaggaggcggtgagtgaccctgctggggaytaggcccaggrgaggcataggagagctcgtcccccaagccaggagtctgagaacccaggccccctctcacctcatgctcccacctcccgcaggaggagcaagccaacaccaacctgtccaagttccgcaaggtgcagcacgagctggatgaggcagaggagcgggcggacatcgccgagtcccaggtcaacaagctgcgggccaagagccgtgacattggcacgaaggtgggtccctcttttgggctttgctagtcacccccacagcaggcatacccagacagagcaccctcaaacccgggatgcttccttttcatttattccacacacttgagccacayggccccagaggccaaggtaatgcagttctctgtgatttcaaggattcttccagctctaactttttttttttttttttttgagacggtgtctcactctgccgcccaggctggagtgcagtggcacaatctcagctcactgcaacctctgcctcctgggttctcctgcctcagcctcccaagtagctgggattataggcatgtgctaccatgtctagctaatttttatattttagtagagatgcggtttcaccatgttggccaggctrgtcttgaactcctgaccttgtgatccacycgcctcagcctcccaaagtacgggattacaggcgtgagccaccactcccagctcagctctaagtttcagtggttctgggaatttcagcsttagggaggggtgccaccctagaagaccctaatttatatacaaccagtatatcccagtttccccccaactgctagtttccagttcccttccacctaattttgtcctgcaatcttgtaactmaaacctaaaatggacatcccagagaacccgggcctggctttgttctcrcccaggcaacttccctctgaccaaccccagaaccctaccctccagaacttgccccccgamcatcgatccctggaaacacatgtgctgctgccacaggggcttccacctgcccacamagcaggccccccaccatcagacccctctcacctttgttcccrtgccctgtccctgcccaataccatctctccaaggactgattggactttgtttcctttcaaaagggcttgaatgaggagtagctttgmcacatcttgatctgctcagccctggaggtgccagcaaagccccatgctggagcctgtgtaacagctccttgggaggaagcagaataaagcaattttccttgaagccragatcctgactccagactcttcttcactgmcctgaggaccyggggatggggtctggmmtaggggaggtggaaatgcasgggagtgggggcaaattcaaaggcctggcctaggaggccttcgtggagcagcactgaaaacccctttcacttcccccaaaccagccaaatgcagyagaggcgacacctctcctcccagccttctccctggtccagccaggatttaaaggagatttagggagacccctaaagttcacctagagcaccctgagcccatctactgtggacctgcaccccagcttccgtcaaccctgccccacccaccaccatggatactgcccagggctgggcaaagggcagcggttcggggtgtgggtgctggccagtgccctttctgagcccgcagaagtgtgaaccactgggccaggtgaggcaatggctgcctaagtgccagtcccaggcgagtctctgagagtacacaaggattcacagctgtagcctgcatccccttttaaatagagccaccaccctctccagccaccgccagaagccagcataccccctgcccaccacaggtgggagaaacacaccctcagcccacctgccgtcctcctcagctcctcctggtgccgagcccccttggcccagggtgctcccttcttcccactcatttcttcccattgtaattcccattaccaagccctttgtcctctgggcttgtgggaagatggggttctcctggcccatttatggcaagccatcttgaggggaggcagacagatgaggggctggggaaggttatgtgtgaacaggactctggggagagggagggaagggatggctcccgagagggccaggaggtggaggaargagtaagtctcctccaactaaacaagttcagcccctttggagttcctgccacagctggrttgcttaggcaggcctggkactgtgggccacagaggtcaggggcttgaaaggcactggggctgtcggccccactgggaacctgggaagsagtggttcarccctggactggatctcccccaacccaccaacatacccactcggagcccactcctgctctstacccagctctgagctcggagctctgaggactgcggcasscagagccaagggccctaagccggagaaggagaaaccagtactggacaatagcaggtgacagcagaggagaaaaagggggtagggaggggacaaggaaagacctgagggggtggcagtggacaaagagattgagcaaccacaggacaaggtaaccagaggaaacagagacaaggaaaaaagatgcaggaaatgaggaggccccagaaagayccgcaggcgccgccacctttctcctcatagccacctccattctccttccctaggccaacccagacagagctccctcaaaccagggatgcttccttttcatttatccagctcaattgaaccacacagccccagaggccaaggtaattcagttctctgtgatttctaggattctttcagcctttttgtttttgtttttgtttttgtgacggagtctcactctgctgcccaggctggagtgcagtggcacaacctcggcttgggccgagatccctagggccattcctctggctaggaacagacttggacagcaatgaagagataactagaaacaaaggaragaaccsytgaaaagggagctatgcagagagacccagggcacctaagcaaccagagcaagagagaccgcaagagatacagatcctatgagaatggtcgggggctggatgcagacagcagggttgagagagstctgagagccaagccagggagaaggaggggtgctgagggggatggggagagaggaaaagagagggagccttggagggagaagcttgaagagctgcgggtggtgatcccgagtgaaggaaagaatcctgggtcacttgcaaatgcaaggagagtcaggaaggcgcaaggagattggagaggaggaagagcctggagcaagatgtggaggcccagggcgagagaagaggccagctcggagagggcagagcctcatgttagaccctgagccgggtggagacacgggccagggagaatcggaggcaggccccactctgagatggagaagcaggcagagggaatgaaggtgagacagagacagatgcaacggggagccaggcagaagacaggcaacctgtgccagggaggccagccttgcctccttggcaccctcacctgtggccgaagcctccatccctgtccttatattccaggactcccagcagaatgaggagctgtgtgcaaggcagcttagggaggacggagagcaatatgtgagagcagggagagaaggagcctggggaagggagaggacggtacagcggagcagacgggcagggcctggggctgagtgaacaccttccttcctcctccttccacaggagcgggggactacmccccaccacctccactccccgctgccctgccaccaccacctataccaagtgaggcctgctcagagcacagggttccctgaggacaaagcctggtctttgtcacctgaccccgacccagactgacctggcgttctcagctccttatcatgtccccagagctatgggaaccaagcagtgacgcactggccatgggctaaccccccggctcraattctggggcctcgagtaacctagagctggggacaggtggcctgcatcycctgggggtaatgatttggcataagcacctgcrgaagatggggatgtggggtcaactaaggtccctccaaggacattgagaaaaggtccaaatgctctgraaagagaggtgtgttcctgagcccaggaatggggtggcagcgtcctagggagctaggggagaggccacatcttaatggaaagtgctcctacccagagaagctgacccctgtcgtcctacccacctccacaccctggagctatattgagaggtgacagtaaactggtgggaggggggctgggagggtgttcctgggtgtgagggtggggggaaggccagagcaggggagtctggctttgtttcctgaacacaatgtccacttagtcataacaggaacagcctgctgaagacctgacacctacagcctctgagagatggcagcattggaggatggggagcggggccttgagggcctagggtgcttgaggacacccrcaaagaagggaatgtgagtataagccctggagggcttggaaaggggcaacaaaattctgcctggggagggggcaggtggcagagccccaccccgatggaatgcagtgcctggggaccagatggtgtaaatccccaggcctgccaggcacctgcaccctctggcagcccggtgaggcagaaggggacagcccctcacccacccccctcctctctcaggccctaggattagcaccatcttcttctgcccaccccaccccaggagcagagggtagcaggggagggcaaaagcctatgtgtgcaaatgcggatgtgcaaatgtgtgcatccatgtacacaaaagaaagtagaaaagaaatctgcaagcttgagtgggtaagtgtgaaaaatctgcatgtgtggctgaagatgggcacagacacggtcaagtctgtatgtgagagtgctgaactggggttctgtgtgaaaatctgcctgaggcggcrgggagaatcactgccattgygtgagcaggttggatgttggccactctatcaggagcattagggaaggggtggggactccagacgtgtccccaaaccagggtggcctcaagaccttgggagaacacttgtctgaagacttggggaacagaaggagaccaggcatggcacttatgcagactgaggccaggacagaatttcctgacaaaagaaaactgagccatggagatggacaacagatcccttccctgggcaccatactgcagcttttagtccctagcactkggggctccagtactaacagcaggaagatgctcccagcctgggactgtgtgagggakgtcagaatggraaggagaggctggggaacaggggaggaaagcccatggttgggaggcggaggacaggcatttggcctgcaggagaaggtgaccctcacccatgttttcagttcacccttcgggkkaaaaataactgaggtaagggccatggcagggtgggagaggcggtgtgagaaggtcctgtcttcccactatctgctcatcagccytttgaaggggaggaatgtgcccaaggactaaaaaaaggccgtggagccagagaggctggggcagcagacctttcttgggcaaatcagggggccctgctgtcctcctgtcacctccagagccaaaggatcaaaggaggaggagccaggargggagagaggtgggagggagggtccctccggaaggactccaaatttagacagagggtgggggaaacgggatataaaggaactggagctttgaggacagatagasagactcctgcggcccaggtaagaggaggtttggggtgggatgccctgcagcccgtccacagagcccccaccgtgagggacctccttcaccaggagtggggtgcaggtcagttggaggcctaagggctctattaaaactgcctatctccaggcccagggaagttccccctgacacaaggaggttccacaggaaacccagaaacctcttttctccttctctgactctccatttctttctctgcatcattctgagtctcctrcatgttgtctccatctttccatcttccttcctcctttggatggcttccttcccttgatcctggttttatcttgcctcttggtcttcatcgacacttgtcacaatcatgcttctttgtctctctcccttgtccttccttcttggcacktgttctcacctccctgcctctctgcttctaaccctgtttccacaccccgtccctcgcactcatattgactcggtgccctttcttttctgcctctgcgtctttccctttctgactccctggtctgtcctgcctgtctgcgctctggggctgcctccatccccgggtggcctgcctctgttgttcttcactctcctcatctgttcttctctctgcccggctctacctctgttgttccttgctccacccacggtccagattcttcaggattctccgtgaagggataaccaggtgagaactgcccccattttctctgcagagactggggcatgcttctcctgggagccggattgctggaccaggggtctgctgtcccaagcactcagcgccaacccttagcatactccagccaatgccaccccagggaaaccccttacagagattgtccttcagcatcacctcagagggcaggagaagcagagccctgagtaggggagggtgcaacagcaggtgcctctcccagggtggaggagaggagcgggggtagggaggggggctgcagaggacaaagccactcgctggagcctgggctccctcaggagtaacatagccctcctgtctctgacccaggggaagcaccaagatgaccgatgcccagatggctgactttggggcagcggcccagtacctccgcaagtcagagaaggagcgtctagaggcccagacccggccctttgacattcgcactgagtgcttcgtgcccgatgacaaggaagagtttgtcaaagccaagattttgtcccgggagrgaggcaaggtcattgctgaaaccgagaatgggaaggtgagtagggcatggygccggggcagaagggaaggaggtctgggaaagaagatgcagaggtggagccacttgcagggggagctgagagggctggagaaaasccaagsccagtggggatgccagsacatgctcctttgaggascccagaatctgatccctctcaaattgacctgagctggtgcaacaggtgccacccagggccatgttccccctgccagagaggatgctgaggaagaagaacctcagtgttcgcctaagaggggtcttgtagataaagagggcacag

SEQ ID NO: 10044 - DNA, 14970 bp, Homo sapiens
tgaggttctgattggtgagagcgagacccataggtatccagctcttctgaaacggcactgcctcctaagatcctgttctgggattgaggttttcccaggagcacgggaagccaccttgaggccatgtctgccagacaaaaggctaggaaagggagctagtgcagtgaatccgaacagcagggctggatacctaagtgggcagacacaccctgtggccctcagcaggtgcagttgaaacttgtcccaacccaagcccaggtgagcaggaaagcattcactgtggggctccccttccattcacagccaastaggggtaggcacggtgtggcacttccatgccaggaggttacatgtggaattggtcagagctggaatgggaaaccagctcagcctctttctttgtgatcttgggtaagttactaaatttccttgggcctcagtttcctcatctgtaacatggggataatagtttccatgtcatggtttcattgtcgggataraatgagatgatgcatgcccagggcttagcaccatgcctggcacatgtaagtgcacaggagctgaggccagcaggatatggaagggagaggacgtctgcgagtactgggggcagagggtgaggcagtgagagtggggccatgatactggcctcatcactgttcctgagtgcccctgctttcccagccaccacctgcttcttctaagtgccctccatcccacagttccaggtgccccaagactcatcagagcagagcagtttctcccarttttccagattgccctttgacttcatcacttctctcttttggggctgctttgccctaacgcattggaaagattcctctcactgcagtttaagttattcctggttccctttgttgatttcctagtccttrgttactagaggagtattttctaagggaaagcacatgcaaatcaagccacatcattctaggggcaatgtctgtgtatgggtatgttgggtgcgtatgggggatgakgcaggccaataggcaagcatgaagagaaggacctggggggaaggacacactggcccactctcagcacagtgtctcccaagcaggctggacccggctgacctgkgtctttggggtcaagcccaactgtaagcctttctggggcacacatacaccctcctggctaayagtggcccatgtttctggacctgctgaggctgagtgggctcacttcatggcctgaaagcagtagctgaccctgtcatgggcttggtccccaaggctctgtgaatgagagcaggttggttcctggaactgagacctccttcctgttgggtcttaggtgaggctgtttcagtttccctcctcttccttgcttcaccttctcatttgtgcaatggggayactcacccacagcttcttccatcagaccttgcccatccagccaacaaacttaggaagtcagggtcttccagcagccctgtgagggtaggcttgtatccccggtggggggcagtgacyggcgagggcaagggggagttagggagtgggtcatggacaatgggggagaagtcatagctgatgggggtcatagaattttggggtcattgaaaatgtggaagaggtcagagaacaaaggggatgggagtcaaaggatgtctaagggaaaggaaataatcacgaaggtggatgatcagagggacacctgggaagaggggaatggtgaaaccagaccctggatggggggagcagggatcatggaaacgaggcctcttgaagggaggccacaagacatttcctaattttggctaccaaaccaaccagggaaatcccgctaatgccagttcacaagaatgcagaacagcagactgttattgctttgaccccatggccagaaaaattcaaagagcaaagtttacccaatcagctaccaggcatataatgatggtcatcacaacttccatgagtattgcattttaagcagcctttggaaatactttcagagtttttttggttttgttttttaayctcaagtcactccctaaaaagacagtggaaataaatttgaataaacaaaacaggcttgctgaaaataaaatcaggactcctaacctgctccagtcagcctgcttccacgaggcctgtcagtcagtgccccacttgtgactgagtgtgcagtgcccagcatgtaccaggtcagtgcagagggctgcctgagggctgtgctgagagggagaggagcagagatgctgctgagggtggagggaggccaagctgccaggtttggggctgggggccaagtggagtgagaaactgggatcccagggggagggtgcagatgagggagcgacccagattaggtgaggacagttctctcattagccttttcctacaggtggttgcattcttggcaatggtcatgggaacccacacctacagccactggcccagctgctgccccagcaaagggcaggacacctctgaggagctgctgaggtggagcactgtgcctgtgcctcccctagagcctgctaggcccaaccgccacccagagtcctgtagggccagtgaagatggacccctcaacagcagggccatytccccctggagatatgagtgagtctgctgcccctcccgaatgcctgccctgtgtgtgctggccagggtatgcrtgagggaccagggcaattccagcttactttcccattttgatctcagaggggctgtaaaggtttgggagttagacaagktctgtatttgagtcctagctctgactctcattggatgatcttgagtcaattcragttttcaaaactcagggtttttttttttttcacctgcaaaatgatataatgccccataggctaatgtgcagatcaaatgaaatataatgtatgtaaaagtctgtatttatgttggttctctccttttcttttaaaacatccctataatggcccatgttttttctgggtaaaatattagggaataatggcatgatacaggcatgaagcatcccaataccaattgatactgccctggccatgaatgggttagttatwagcatactaaaggagtgaaacccttaacttttgggggcagctggctggctggagctgtggactggatatctttgatcatgatcatgggtactgtrttctttcactcagtgtgccacataaatattatagttctctatttgtgccatgatatgaaaaatattaggaagtgctgaaatatgaatgatgaagcaaaatattaaaaactagggtcttagggattccagacatgtgatttcacttcttccttctagttctgtcttagcattggctttgggggtagatggagaagttcagtggtggggagggggtcagatytaactgagattggatctagtgtggacactacaggtcatgactctttggagtggtctcagaagctggctgggtcctgggccaaatcagatggcatgggagcttcttaggggaggcgggtgccagaggttaactcagctgtcttccagaccccttgctgggagtctgtgaacccgagaaccactcaggtggctttccccaaagtgtgttctgtgcaatgctcatcccatgagctgcttctcagaaaaaagtgatgccaggtaaacttgggaaagactgctrtatctcctaccccttggagattcatactgtcattgtacattaaagtctgcaagaagtctgtagaaagtaaaccgttaaactggtgtttcccaaattcatttaagcacccaacaggtgcaggtgatttattagggaacccactttgggaagtgatgtgctagctaattccatttgccagggcttgtctgtgtrgggaatggtcccacaagctrgagactgtcgcctgccagactaatggagtcgcagacctgtgggacatctacttttcagtgtttttcatctttctttctttctttctttttttttttttgccatgaaatcctttcagaataagtaaataagtcttcccatgcactctcaagtatgcttataatataagcktgcacagcgtctggaagaatgtgcaggaaatagttgaggatagcttcttctggggagtggggctggtagggagagactattaactttcactctttayactctttaatasttggatgtcagagtggtttttacttttgcaataatgctataataataatagaaacaccacytaaagtccggcccggtggctcatgcctgtaatcccagcactttgggaggtcgaggtgggtggattacctaaggtcaggagttcmagaccagcctggccaaccatggccaacatcatgaaaccccatctctactaaaaatatgaaaattagctgggtatggtggcrggcatcaggagaatcgctygaacccaggaggyagaggttgcagttgagccaagatcgtgccactgcactccagcttgggtactccgtctcaaaaaaacaaaaacaaaaaatcaaaaaacaaacaaaaacacctaaagtgtaatcattacaataagaaacctcatgctgagtcagatagaagcagtgctggtcaatggaggctaaggcaggagcctgctcaccctcccctgcctccctcacggtcccaggaccagttggaaagcactctgtcacctgctaccctcatttacagtgsggaaaatttaataaaggagggaggtgacttgttcaaagttacacagcaagtgggttcagaactgagacaagaggccaaggccccagacggaccatttccttcttctggcactcccatgccaccccaccctctctgtttccggcccatctttccaaggcctgacaagtgccgcccccacaggttggacagagacttgaaccggctcccccaggacctgtaccacgcccgttgcctgtgcccgcactgcgtcagcctacagacaggctcccacatggacccccggggcaactcggagctgctctaccacaaccagactgtcttctacmggcggccatgccatggcgagaagggcacccacaagggctactgcctggagcgcaggctgtaccgtgtttccttagcttgtgtgtgtgtgcggccccgtgtgatgggctagccggacctgctggaggctggtccctttttgggaaacctggagccaggtgtacaaccacttgccatgaagggccaggatgcccagatgcttggcccctgtgaagtgctgtctggagcagcaggatcccgggacaggatggggggctttggggaaarcctgcacttctgcacattttgaaaagagcagctgctgcttagggccgccggaagctggtgtcctgtcattttctctcaggaaaggttttcaaagttctgcccatttctgkaggccaccactcctgtctcttcctcttttcccatcccctgctaccctggcccagcacaggcactttctagatatttcccccktgctggagaagaaagagcccctggttttatttgtttgtttactcatcactcagtgagcatctactttgggtgcattctagtgtagttactagtcttttgacatggatgattctgaggaggaagctgttattgaatgtatagagatttatccaaataaatatctttatttaaaaatggcctaatctgtatttggcatccgtggtgcctgaacatctcgcggtctcccagcctgtcccttctcctttccaccattggccctcacctctgtccaccctgccagctctctccgccctccagagtttccgctgcaccctcccrtcctctcccatstctgtctccctggcccatcccaaacaccagggtgggggctaggccgcgctcccrgcatgctggagagacagaggcccattgaggcattgcagcaggcacagagcgcccccttgtcccccaacaatccgcctttgtcctccagtcctggctgctgcagcttggtcctgggggtgctgcctgggctgggctccagctcacaccctccctaaaaggaaatgggagaaaggaccggccaaacaagagggttaaggttagagaagggggacacaaatgtcttcaggcttaggtccctgggggctcccagtcctgcccctgttcctctactcacatcccagctcctcccagtttcttttcggacctcctcctctccccttccttctctattccaggctgggttgggctctaagcaaggggagggattagagcctccttcctctctgcccctccccatgggtctctagggggctggtgcaggcagcagcagaggcactctgggcagctgggtgagggcccatctgggcaaggcccccakcgcctgccttctctcccggggccctgtgggcaagcctcctgcttcactttcaggtttctcgaagtgccttcttgctcctgtctgtttccccatcctgccagatttctgtttctcttgctgggcttttggcagtagggggctgtgttggtgggccctacgaagatgctcagtgctcgagatcgccgggaccggcaccctgaggagggggtagttgcagagctccagggcttcgcggtggacaaggccttcctcacctcccacaagggcatcctgctggaaaccgagctggtaacagctgcctcccaacctggtgcctccatctccctgacccccggctcctggccagccttatgccagcccccagctcacccttcagtakcctccttccccargccctctggacacctctcctgcccgcagctgccccttcttcgtctcctactctgccttcttgctgcctctccacccggagacatttacagcaggtttcagttgcagcaggaaggactgcagttagacagggtgactttttgggacattgaggaagcttgagacatagggatgggacaggggcaatgacagcctctaacatggccacttctcagcacgtccaagaagtctaactatcaaaaagggcagacttcctgcaactgcactttatctgtggtctgctgcccagaaacatctcttctcaggaaaggatcttcccctggttacttagcaagaccacagtgtagagttaaggcctctgcacgtatgccaccctaggtcatcagagctaaaggggctcccagaaaccactgggcagcatctgccttctctcttggcatggaatcaaaggctctggtccttgtcagggggctttcaggcatctgggggtggggaaagcattatgaggcagggggctcctcttggtccctgtggagtcgggtctctgtgggcacaactccaggggctggcattcacactgtacctatgaattactgtgggatagtgctcctgggagccatatggcttggccagactgctggggttgctgggtgagcagagtgggaggccggagactgcccttgaccggcaaatgccctgcaacggtggctcctgacaccaggggatagggagatgtgccagagtccttcctcccctccaaggacaggtagtaggtgccagcctaggggagcttccaaggaggggaaggcaaagccctggcccctgcctgtgtccccttcttggcatgttccacatgctcggtcctgcaggccctgaccctcatcatcttcatytgcttcacggcctccatctctgcctacatggccgcggcgctactggagttcttcatcacacttgccttcctcttcctctatgccacccagtactaccagcgcttcgaccgaattaactggccctgtctggtgaggaaccctgacccctagcccagtttggggcccttccctctcctctaaatgatgcattttcctttcctccccgagcttctttccatttccacaccacagctgggctttgtcccatgctatgccctgcactcaaaggtgtgctttgactcacactgatttcacagctgcagggccacgggcaatcaggaggaccacatccgctagatctactctcccactcagcaaaggtccagccccagccctggcctggcttgacccccccgggctggcatactccagccgctgtcccctgggttccagccccagcgcctggcttctggtcctggttgctctggttcatctgcttccactccctgggtagcagtgtgagcgctctgtctcttgaatgtgcttcatattgtgtgaggggtatcctatggaggggttcagaatccctcagggtcgggctgctggctagcctggaaaacttcagggtaacgccccctgccttctgaggtcctgttaaccctgcacccctggcccccaggacttcctgcgctgtgtcagtgccatcatcatcttcctggtggtctcctttgcagctgtgacctcccgggayggagctgccattgctgcttttgtgagttcagccctgcaggactccttagcccctcaagagctcaggctggtgcttgcacactttctgtatcagaagccacagccaggacttggggttctggcttgcacctcaccctataccttaacccaatggccctatagcctctgttttgccatccccactcccactcccacaggtttttggcatcatcctggtttccatctttgcctatgatgccttcaagatctaccggactgagatggcacccggggccagccagggtgagtgcctgtgctctgtggagaggagatgccctccccaccctagctacccatcctgatgtgggtccctacctggctctatcctcacaggggaccagcagtgactctggggctacctggctcctaggcccagccagccagagaggacagtggagcccagacacgtctccttgggattcactagcccccagcccgccaaaccccaccccagccctacacagcagtctggcctgagacgtcactggggacttatctgtggagcctggtgctccaggatgtggcttctcatgaagctctggccagaggaggggaacttattgggggagggggggtggaggggaggaatctggacctctaagtcattcccaaattaaaatattcaaattctactggtgagtctctttcttccccagaaattaggcaggtcaggaatgtcaaggagtattcatgggaatgttgccagagcaggtcgtggtctgtctctgggactgggtctgagcagtgaggatgtgggggctagccagaagaagctgaagacatcctccaacacaaaacttctacgctacacctctgtgtgcacggccactttgtggtgtgcctggtggctgggcatctggagttctgtgtctgagaaggcacagccttcctcatgggagcatgcatgcaccaccacacctgttcccgcaggttagtgggctggaggccaggsgctcgcctggggcgtgtgcagagctcccccttgtggtgtggggaagacttggcccacaggacgcagggagagggcagcctgaggtatcagaggagggagagatttcccaaaatgcgaatgctgggagagccgttgattatcagctggtccaatgccctcatttcacataagagaaaacaggcccagccaggggaggtgaactcatttgtgacagagctagggccagaacgcagctcttctgacacctaagcgagtgttctggatactgtactgagcctccttgtagctcagaaaagaatggccaactcttccctccactgcgggtccaccctcccagcttgccagctcctcagcacacatttcctgagcatctcccatgcacactgtgctgggtgccagggcctcagaggtgacggggggcctgccctttarcactcacaggctgggaaagagacaagctggtcaagagctcccyacagtgaatgctatgggaaggctcaggggagtttggagcagacactgccacagcccgggagtcagccctgctgggccgagacagacagatgtgcagccagacgttcctgcccagcccgaggagcccagcatggcctggctcagcagctccatcccagctgacgtgctatctcctgtcgctgatgtgtgtgtgttcccgccctgagatacaatccttcttctgsagcgctccttccagctgcaggccccagctcccaagtcctgcccgaaccctggatcttgaactctggtcagagcgctctgcttccttggtggcagccactcctctctcttggtctttttcctgcctcctgcttcctgttctcctatccttgtgtcctggctcaccatcagaactggcagcctctcctgggctagaaccaacaggattttgtgtttctctggtcactgctcacatttctcagggctttatgcacagtccattctcatggtctcagaggagggatagaagaggctccacttggggagtcagggagatggggtgccaggtgaacggttaaggaggcggtcagcagagcctggctgcaaagcccagtggggagtggggatttgctttgtgcagaacggggtcaggaccgggcctgtcccacaagcagctgtgtgatccaggccagactgtccccagtaggagcttagagagagcagaaatgtgaccacagtgtttccctgtacaggcacctgtgccatctgtgtctgtgtgagaaccaacatgaaatgagcaatgcccaggcttggtcctcatggcatattggtttgggctcagtgtygattggccccagagtctcaagatgccctcacggtgaggtgctgaatcataggaggcagggggagacccctggggaagacagggagggggctccctgggagttacttcctaggggctgactagaatggaatctctcccatctcctttcccataccttaattctcagccagctctgagccttttctggcattggtggaaaattcatttcagaaagaatgggtgtcctaggacacmtttaatcattgcagcctcaggggtggggtaggtggagagtggcttcaacttcggcaccaaaattctrtctcgtagcatcttggactggctcaccattttgatgccattgttttcttcacttttgaaatttctccctctccacccttgtgtggttgactgagcagaactgggactcacagctgtccacgtcaggcagaacacctcactcctctgcacctcggtctccttccttgtggatatgggatgccttggctctggcagctctgatacaggggctgggggcctccctcctctcaggccccctactgccctgatccaggatggacagctggcaggaaggacagatgggctcaggcagagtttggcactcatatttattacaggttggcaagagtgaggttcccgaggcagtgtcactcctcatcgtgcattttttgctgcaaaaagaataagaggtgtgagggggcagctggcaagagggagaagtgtrtggggacaaatccctggggctttcwgrggcctaagggagatgcccttggagggagaggcagggccccagggatcytgtggtcccacgttagaggcacttgtggtttagggggatggaactggggatctctgcagaagttccagtcagtggggggctgttttgagcaggagagtggattctcaggttatgtaagctatgggaccctcagaactgcctacatatagggcaagcagtgcccactctgaagggcacccatatcagggggcatgctaatgtggaagtgactagtgaagcccaggggagggacccaccttggcaccaatgtcacggctcttggctcgaagcttgttgacctgggactcagcgatgtccgcccgctcctctgcctcatccagctcatgctgcaccttgyggaacttggacaggttggtgttggcttgctcctcctgtggtgggacagtggggatgggtgaatgagctggagatgggctatgggattctcagcctctcaacctgaggttccagctccctgtccctgaggcacccatrcctcatgmatattcctgcaacagccttcccaagggtatcctgcaactgccttgcactcttctcaaacatgtccagcactcagagtccttcacggccatccactgccccagacaaatcccatgctgcccgatctgggccccttcagaatcctgttttgctgcacctgtcccggaccccagcttcctgtgcaggcatgctaatcagcaactcacatccacccagatgtcttccccactgccctgtggctagctgggtccccttctaggcccaattccaccgccaccttcctgccttcagcttcggctgccccacgtcctgcactagcatctacactgccttctgttgggttatggtatctgaattgtaagcagcttgtaggtggtgcctttgttaattcagaacacctgacagctctgagcataccagatgtgtcaaacaaatgtttgagagttaaagtttatagcaaactctttgtccaggcccctctgtaggagatattcattggttctcacaaatagtaggtgtgttgatgagaaagggaagaaagctctgaactcaccgcctcctcggcctggcgcttgtaggccttgaccttcagttgcagcttgtccaccaggtcctgtagccgcagcaggttctttttgtcttcctctgtctgggggtgrgagggtgggagaagctggtttggagggggagcaaatgcaatcacctttccctcctccatcattttactcttctccccttgcctttgctgcccctccctgcaatgatccaggkcaaagaggtggtggggaagattctctgactctatcgtaggtcaaaggggcaatgcaaggttgtcagtcagggatccacagagcaatgaaggctgaagtcataaagctagaagtagggggaggggctcagaacctaatggaattccctaatgtggtaatataaaagcaccaggtctgttccagctccagtatggtggataaagctccaacctggacttacataggttctcttggccagtagttcttgaccagaaaaagaatgcagaaagaagggggtattatcataatccagattattctacattctaatatattgtactgggccagaattcaggcatcgggatcactggctccaacgtcactcgatcattcctatctctttatcattgtatgtgccaggatgccatttctacttctgtccacaaatcactctgtggttctgtatctgtaacctctttcttgtgcctctggtatccatctatcaaatggactgacaccctcrtctccttggccttttcttcccaggtacactgaaaataacgggccaagggcacagctctcagctatgcaagtggaggttttagagcattctagggtcctctttctctgtggccttctctttgtgtgccagaagttctatggaagatttccgggtcttttcccctcccctgactcttatccccacagtcgaaggtggaaggattctttgaactgttctgaagtcttcatggtagcacttagagttattaaaaaaaaaaaaaaagaaagaaagaaacctggggaaagactagttagaagagttttcaggaagtagaagtagattcttcatttgctggaaaaactcatagactcaagtcaaactgactgcagagcgtgagaagaacgttaaatctaccaacagcatctcaaggaggaggtgagaggagccctgtgagggcggggcagtggggccagagaagaaacttccacatctactccyggtgtctggcgtccgccgcacctggtaggtgagctccttgatgcgccgctcgctcttcctcatgcccttcaccgactctgcgttgcgcttctgctcggcctccagctcaccctccagctcccgcacccgcgcttccagcttctgcagctgcttcttgcctcccttgagggcgatctgctcggcctcgtccagccggtgctgcaggtccttaatggtctgctccatgttcttcttcatgcgctccaggtgggcgctggtgtcctgctccttcttcagctcctctgccatcatggcggcctgtgtgcaggagagaggtggcaaggaacatgggccaggggccggggccttttgccccccaaggatctcctttctcccatcaggccctcaaatccacagaactgcagagttggcttggtgttacagcacagtggcctggcctggacccaaggccttgtttctgtctttaggggaggcggaaggtgggcggtcacttacatccgtgatggccttcttggccttctcctcrgcgtttctgcactcctgcactgcctcctccacttccgactggagctgggwcagrtcmgactccatcttcttcttctggttgatgaggctggtgttctagacatggagagagaaaaaygatcaaatatatactacactttgttacctgatttcataccctttctccagaragaattaaaggtggtcattttttttttwaaacaacaagcccacttttagactattgatcgttttgtacctgctttcccttttcctatgaaagtgcatacattctagacattgtatctaagattactaaactctgaaaaaagacttcaaatagcaaaaggtctgcagtattaccctggagctctttagcaacatgtttacgtaggagcatgacaatattccaaggaagatggaaacaactttttaccaggacaatattccagagatgtttatagctataccaagaatgtagtggggtaaggaagaggggatgaggtaagtggatgatgtcattctcacacatactagattaaagaacaaaactccacagggcactgcaaaaggtgagcacaaagtctcattgcagagtataactgaaaacagtgtgggtgggattgcagaaaatggtgttctagccagcttggtttgcaagagatgcagttatgcttctttaaactcccaaactctcatctttacagagcaagccggaggctgtctttcagatcaagaatatcaaataacaggatacattccactactcccagatttgtggctttggcaggtatcagcaatcaatcatgaccctcttagcttctaagtagagaccgctttcttaatat

SEQ ID NO: 10045 - DNA, 21851 bp, Homo sapiens
cagtggctcatgcctgtaatcccaagacggatcacctgaggtcaggagtttgagaccagcctgaccaacgtggtgaaaccacgtctctactaaaattacaaaaattagttggacgtggtggcgcatgcctgtagtcccagctactcgggaggctgaggcaggagaatcgcttgaacccaggaggcagaggttgcagtgggctgagatcgtgccactgcaggccagcctggcgacagagcgagactctgtttcaaaacaaaaaaacaagactttttgcaaattatccattgtcaaaactccgccaaatacatctcccagcccgccagggagcagccagcagaggccgcaagctcggccaagcgagccgggatgtccaaggcgggaacgtggcttcgcgcgcaactctctgagacgcgggccggctcacgtgtccgggccgcaccacgaaaacaacagccacaggggagaacaacctcttgttttcctcatacagccgagctttgctgcaaacgatccctttccttttgtttccacattgcgttattcagaagtggttatgcggcgccaaacacgcgctttctgccccacaggtttcagccttccccaccctcatcttccccgcgctcccctcccgtcgttgtagcttcctgctcgcccctctcatctcagccaaccctgctgagctttcgcgtgggcgtcacgagtttctaggcagatcaggaaaaccgctctccggccgcaccctcgcgcgcccccgcctggcggtgtagaacaaacggtctgagcgcttggcgggcgactgagagcggagcgggcgaggscgaggagcggaggctgaagccgtgaggagcggcccggcgagggcgaggggcgtgcgagcgggcggccgcggctcggtgaggatttcggtcgtgttttccttggccgtcgccggaagcccggagaagccgggtggaactgccttttgaacgcgttctcacgtgtgttagggatcgtcctcctggaagagccttgatggccacgcggtgtcctcgcccctctctccgctggacccgaggccccttgccagcaagagctggcctggtgtccggtatccacgtgkggggcagtggccctcacacaaggattggtacccatctatctagtgcgttggttcgtgcattcacttgttcctttgtggtcgttgaacgcctgtaacgttccaggtgcttgggatccatgagtgaataaaaccaagggccctgccttccttgggacttacagtccaggggagacagagccgctgatttcaggtctcatcagtaagtgacagggtgttagagggcgatagtgctgcggaagggaaagcggtaggcatgcggggggtgctgcggtgaggggcgtgggcagggagggctgggaagcccgaggtcagcgcaggccacattacaaagagactgaactggatagaggagtgtttggggagaaggaagataattccaggctgatggacgagagagtgcagaggcccagtgtgacttgtatttataaggaacagcggccgggcatggtggttcacgcctgtaatcccagcattttgggaggycaaggtgggcggatcacttgaggtcaggggttcgagaccagcctggccaacacggtgaaaccctatctctaccaaaactacaaaaattagccaggcaaggtggtgcgtgcctgtaattccagctacttgggaggctgaggcaggagaatcgcttgaatccgggaggcggaggttgcagtgagcggagatggggccattgcactccagtctgggcaacaagagcaaactccgtctcaaaaaaaaaaaaaaaaaaaggaaagaaagaagagaaaagatagaaaacagcaagaaacccttgaayatgaaaatatgaatggaaggcaagaaagaaagaaggagggagggaagggagggagggagggaaggaaggaaggaggcagggagggaagggagagggagagagggagggaggaaggaaggaagggaggagggagggagggaggaaggaagggcagcaagaaaccactgactatgaatggaaggcgagaatcccagacttggacgcgaagtttagttcacacgcgcggccaaagcaatccaacagcatrmgtccccaccctcctctcactgcctacccctctcctgcaaaagacctcccagtgactggagtgcaggccaagactttcagacagtttaaaccattttttttttttgagacagagtttcgctctggaatgcagtggcgcagtcttggctcactgcaacctctgcctcccaggttcaagcaattctcctgcctcagcctcctgagtagctggaattacaggcgcccaccaccacgtccagctaatttttgtatttttagtagagacagtgtttcaccatgttggccaggctggtcttgaattcctgacctcaggtaatctgcctgcctcggcctcccaaagtcctgggattacaggcatgagccaccgctcccagcctcagtttaaatttctaatttgggatataatccacagaataagcaaaaggaattccaaaataaattaaaaataatttctccttggggttactgctttctttctccttagcaagataaatacaaaattttgtgtttcagaacctgatcataatgtgctatgtgaaaacaaggatgaaagattggagctatggggatagtggggtgagggcagggcatgaaacaacaaagaacaaagtatgtgtctgtatatgggtatgaaaacaaaaacaactcgcccaggactgttttttcttaagactctttacaggcatagagataatactagtagcaactacaaagaaaaaccgattagcttggcttatagtaatgagcaatgggaattttttttttttcgtttttttgctaagactgtaaaagcagaacatagtctctgagataaactgacagcagtgcagccgggcatggtggctcacgcctgtaatcccagcactttgggaggccgaggtgggtggatcatgaggtcaggagatcaagacaatcctggctaacacagggaaacctcatctctctaaaaatacaaacaaaattagctgggcggggtggcacatgcctgtagtcccagctcctcaggaggctgaggcagaatcgcttgaaccagggaggtggaggttgcagtgagcagagattgcaccactgcactccagcctgggcgacagagcaagactctgtcgcaaaaaaaaaaaaaaattgacagcagtgctaggctatgtagcagaaggtaacatcaggtcaggtgcagtggctcacacctgtaatcccagcattttggaatgcctagatgggaggactgcttgaacccaggagtctgaggctgcggtgagctatgatcacaccactgcactctagcctggataactgagtgagaccccatctcaggaaaaaaaaaaaaaaaaaaagaggccgggcgcggtggctcacacctgtaatcccagcactttgggaggccgaggcaggccgttcacaaggtcaggagatcaagaccatcmtggygaacatcgtgaaaccccattytactaaaaatacaaaaaattagccgggtgtggtggtgggcacctgtagtcccagctacttgggaggctgaggcaggagaatggcgtgaacccgggaggcggagcttgcagtgagcggagattgcgccattgcactccagcctgggcgacagagtgagacttcgtctcaaaaaaaaaaaaaaaaaaaccatcaacaacaacaaaaaaagaacgtaacatcagcaagctacagagaagagtaaarcaggagttcttggattaatctctaagaggaattgtttgtgacactgtggccccattaaagcacaaataatctggattcatgttatagatttaaacatcataagacctacacattggagagtgtaactgctggattagttctaactggttctactccgctaataatggggtatcaagttattttaccggcacagagccaagaagttgcaagtcattacagtcagaacatgtgcagaaagggagactttaacctcaaataacccgggaactaaagtcttgcccctcaacagaaccaaaagattgggacatggctggaatatgagcacaggaacactttcaaaagcaacgggtccaagcccaggaacgtccagtgataagaccctttaccatatcttaccataagtggtactgtttgaagtccttcggatcaaaacctgtcctgccagcacttccacctatgcccgtgtcctccctcacacttaaaatttgttccagactccagattgaagagacatatttgagcctgtcttcttgctcagccaccttgcaataaaaagtctggtgcttcagtgtttggctttacattgcacgtggacagaccgacctggtttggttcggtaacaaagaggagagcttgctttatttatttatttatttatttatgacaaggtcttcctctgttgcccaggctgggagtacagaggtgtggtcatggctcactgcagcctcaaactctttggctcaagtgatcctcccacctcagcctcacaggtagctagcactacaggtgagcataaccacacctggctaattctttaatttttttgtagagacaggggtcttgctatgttgcctaggttgctctcaaaccagtgggctcaagcaattctcccactttggtgtcccaaaatgctgggattataggcatgagtcaccgcacccagcttaatttttcttatatggcttaaaagccagttctaaattactttcaggctgggcatggtggcttatgcctgtaatcccagaaccttgggaggcttaggtgtaaggatcactggaggccagtagttcaagattagcctggacaacatagtgagacccctgtctctacaaaaacattaataaaaaaattatctgggtgtggwggtgtgtgcttgtagtccctgcgactcaagagactgaggtgggaggattgcttgagcccaggaatttgaggctgcagcaagctgtgatcataccactgcacttcagcctgggcaacaaagcaagaccctgtctcaatatataaataaataatttcaaaaaaggttttgaataattgtgtcatcctggaaaaagatgatagccttccaaagtggttattttgaagggtaaccttcacttgggagtataaattttcatatgcctgttatccctgtattaaaaaaaaaaactctttcagaccagcatagaagtggagttagacctgttccaaacccactgtatgaaaattaaatacaaaattggagggtagtccttcatttatggaatacccagaatatcataggctctgtgctaggtgctggagacacaagataagtacactagagcctcttaccctcaaggaatttctagtatagtgatgattacatcactgaaataattcaccaaagtgaactaatatatgcaacttcagaaatcttgtttggcataaagtgaggtagagatcatgtataacaagtaagggactgtgaagtgggataaggctagtcaagaagcctttcttagaagaaattagcttgaatgagtttttgktttgttttatttttttgagatggagtctcastctgtcacccaggctrgagtgcagtcgcatgatctcggctcactgcaacctccgcctcctgagttcaagtgattctcccgcctcagcctcccgagtagctgggattataggcacccaccaccacgcccgactaattttgtatttttttagtagagacggggtttcaccatgttggccaggctggcctgaaactcctacctcaggtgatccacccgcctcagcctcccaaagtgctgggattacaagtatgagccacygtgcccagtctaaactcagtttttcatgtttccatgccagcacccttctattgactcagtctaatagatggaggcaaactagtaaaaaggtaagtagaatacaacttatacaggaatcttgataatatcgcctcatcctttttcatattttcccccatgtttttgctatgcacataagctaaactgaaataaatagatataagacattcttttagtacaccttcactgctgatgtttttgctgtaatttttctagactagtgaggtttcagaaaaagggactgagttttaatatcaaataagcaattttccttatatatatatttttggtcactttctccagcattgctgtctttttctctccagcctttggcccttcttatcaggatgaaaacgcttctgtttggtgtctggrccctgctggccttgatcctttgcccaggtgaggctattcgggaaagctttttaaaccagtatgtgtcaggacacaggtagctggtcagtgaggaagggggtggggagtcctgagtggggtgacacttcagtgttcattcatctggacccgggggaaagattcctgtctcttggatcactaggacacagaatcgttacggtctctggcttgtatttgggataacactagttaatagactatcagagaggactctccctaggaaacatgccttctccgcttggttcccttctgccccaggactgccctgtgtttctcctcttgagaatgtttttacttctttgttgccaccgtttgtgtcatgatgaactataataggctcttggtaggacaggacccatacatagctcaggtacagaaagtgagttctcctgatgacgggaaaggaacaggggccttagcaggtaacattgctacaagagctgtgtattcccagaggggactggtattgggaggtgaagtagatggtagatatggactagctaaagaggacctgtagagaagccttcaggacttcctgaagtctccgtgccctttacctacatcaggcatctaaaatccatccgaggccaggcgtggtggcttggccaggcacagtggctcaygcctataatcccagcactttgggaggctgaggcaggcggatcacccaaagtcacgagttcgagaccagcctgaccaacatggtgaaaccccgtctctactaaaattagccgggcgtggtggcatgcacctgtaatcccagctacttgggaggctgaggcaggagaatcacttgaacatgggaggcggaggttgcagtgagccgagatcgtgccattgcactccagcctgggcaaaaagagtgaaactctgtctcaaaaataaaataaaataaagtaaaataaaataaaaatccatctgacatctcccattgcatcagagaagatttccagaacagacgaaatttgtaagcatccaaaacatccattcccttagcgccaaatcaaaatggaatggtctcactctgagaagaggcataaagaagaggcatggaaaatgagtgaccctgggagttacctgcaggccaatggatctgagaatttggtgtgcataagggtccccgggaggcttgttttattccttagcatattttcaggtcccaccttcacaggtttgaaaccatgcgctctgaggtggagttggagtctgcagtttacaagcatttaggatgattctggcaaagggaatccttagccataatttgagagagacactgctttcagggataagtaatgaagttcgaatcctgtgagggtccacagcagcctattatggggagmtttcaagaattctgaaagtttaggaagatattggtttcctgggcataattttttttagcaactccataatttccatggtgatactaatagagaattcaagttctcaagaaagatgataggtggagggaatagtggtgaaatcagagctaacttgttaactacagtttttttttgtttgtttgtttgagacggagtttcactcttgttgcccaggatggagtgcaatggcacaatctcaactcactgcaacctctgcctcctgggttcaagtgattctctgcctcagcctcctgagtagctgggattacaggcacgcatcaccatgcctggctaattttgtatttttagtagagacggggtttctccatattggtcaggctggtctytaacttccaacctcgggtgatccgcccaccttggcctcccaaagtggggaggattacaggcgtgaaccaccccgcccggccaattacaggtcttttgtcctgtctggttgtctgaaccttttttttcagggcaggtttcctgttctctaacctggaactagatagaataggttctgtatttatttgggtctcgtggtcctcaccagagtcattggcatatgtggttcatttttttttttttttttttttgagatggagycctgctctgttgccaggctggagtgcagtggcacaatcccggctcactgcaacctctgcctcctgggttcaagcgattctcctgcctcagcctcccgagtagctgggattacaggcgtgcgccactacacccagcttattttagtacttttaatasagacggggtttcatcatgttggccaggatggtcttgatctcttgaccttgtgatccgccygcctcggcctcccaaagtgctgggattacaggcgtgagccaccgcgcctggccgatgtggttcatatttcaggggtcccggaagagttgtttgaggtttctatttggccaagtcaggccctggtggagtttggacagtccctagtggtcaactgcagcactacttgcccagacccaggacccagtggaattgagaccttcttaaagaaaactcaggtgggcaaagggcctcagtggaaagagtttcttctggaggatgtcacagagaattccatcctgcagtgcttcttctcttgtgcagggattcaaaaggacacaagccttggcatcactgtgtatygtgagtagggctgagggctgggggcagggggatggaaaggaggaatggggaaacatgaacatgtcttatttagggaaggatgggacaaatgtttctaattaggggagataattaaggcccttaataaagatttctggcatactgtagggattctagatccaatcacctttttcatttatttttttttttttgagatggaatcttgctctattgctcaggctagagtgcagtggtgtgatctcagctaactgcagcctccacctgggttcaagcaattctcctgcctcagcctccccagtagctgggactacaggcagccaccaccatgcctggctaatttttgtattttttttagtagagacaggggtttcaccatgttggccaggctggtcttgaactcctgacctgaagtgatctatctgcctcagcctcccaaagtgctgggattacaggtgtgagccacctcaagtccagcaagtagaagtgagccgggcccacttctacttccctttgatgtaggctttcttctgagttttaaattaggagcagaccatagagagcatccagattatctgtgcttgaaaatatcttcaatacaggaaacatatgctaataatgtttatggttaaattaccaaaaagtataagattagcctggccacagtggttcatgctttaatcccagcactttgggaggccraggcaggaggatcacttgaggccaggagtttcagaccagcttgagaaacacagtgagacctctgtttctacaaaagaagtttttaaaattagccaggcatagtggcgtgcacctgtggtcccagctacttgggaggctaaggtgggaggatccccggagcctagaagttcaagcctgcagtgatctatgatcacaccactgcactccagcctgggcaacagagtgggatcctgtctcttaaaaaaaaaaagtatgaaattaatgctgaattgtttgctacaagctcttggaataaacagagattggagagagaagggtttttgtgagctggggcagcctgagaaggctccatggtagaggaggctcctgcactgccctcccccaggatagttagggtttgaattgaaggggacaggtgaggaaggcctttcaggtgggcaaataacatggacaaagatatggcacgaaagcaaatgtggtctctatggggtcagaacttggttagctatagtttggtttgtttgtttgtttgttttgagatggagtcttgctctgttgcccaggctggagtgcagtagcacaatcttggctcactgcaacctctgcctcccgggttcaagcaattctctgcctcagcctcccgagcagctgggattacaggcacytgccaccrcacctggctaatttttgtatttttagtagagactgggtttcaccatcttggcctggctggtctggaactcctgacctcaagtgatccgcttgccttggcctcccaaagtactgggattacaggcgtgagccactgcacctggcctgctacagtatagattttatgtgatgctaaggagcccccggaagctgctcttgcctctgaagcccctctggtaagagatcaatgctttccagaatggcagcaacagtcaaagcaagggactctccctcagcagtcactcttctttgctatggccatagccacttttgatgcgaagaagaagagccagaagactaactcaccccatctagggcagggatggcagaaagctgacattgctgatcagatggtttaagggtggcagtcaccttctgtgatttgtatcacctcatctttctgtcctatgctgtttctttctggagaggtgggtggcatgctcatcaagtcctgcctttttgtcttaaagagccaccagagcaagtgatcctggagctgcagcctgcctgggtggcygtggacgaagccttcacagtgaagtgtcatgtacccagtgtagcacccttggagagtctcacccttgcccttctccagggtaaccaagaactgcatagaaagaactttacgagcttggctgtggcctcccaaagagctgaagtcatcatcagtgtcagagcccaaaaggagaatgacagatgcaattcttcctgccatgcagaactggacttgagtttgcaaggtgggaggctctttcaaggcagctcacccatcagaatagtccggatctttggtgagtcagaactcaagtgcaggaggaatcctggggctcatcttgccttggcctttgggactaagttctcacggggtttagggtgaggatgtgagagtaactgagctccacctttgcttgagctttaaactcaccctgcggaagagagacattttagccccactcccttcctaccttgaagggtcctgcatgatrtgtgatttatcatggcttttctcctttctcttcttgtcctcatttttttggcagaattctctcagagtccccacatctgggtctcttcccttttggaggctgggatggcggagactgtgagctgcgaggtggctagggtgtttccagccaaagaagttatgttccacatgttcctggaagaccaagagctgagctccttcctttcctgggagggggacacagcatgggccaatgctaccattcggaccatggaggctggtgatcaggaactgtcttgctttgcatctctgggtgcaatggaacagaagacaagaaagctagtgcatagctacaataagtggcctggctcttcctttttcatacgggttctctgctgctgaaaacacagagtaacgggttggtgattcggctgtagacatccctgctgccctttgctgggtatgctctcaagtgaacatgagtcttcatctttctctggtaaatgcaggcagattggggacatgggctacagtagttctttccagccttcatccccagtttccttaggctatcctgcttacagagtgattgtggatgccctgaactacttcttagaaacacttatttgaggtgaggaggaaagctgtaagatgaaaagacatcttgcagtccttgcagcgaagcatagctaaatgtgtgcatgcataagagaagctcttgaatccccaaaccacctcattctttcttcagcttttacagaagaagcaatggtatccaaaatctttcccctgttgtctgccttcccaagggcttttaccagcagcaagagtgcagaagtgtctgctagttttgagaaatgtgtctggttctccttttcctttccttataggcttccctccaccaatcctggagctaaaagaatcatacccattggcagggacygacattaatgtgacctgctcagggcatgtattaacatcacccagccctactcttcggcttcagggagccccagacctccctgctggggagcctgcctggcttctacttactgccagggaggaagatgatggctgaaatttctcctgckaggcctctttggtggtgcagggtcagcggttgatgaaaaccactgtgatccagctccatatcctatgtgagtggaggcctgatctttcttgtcaaaataaggattattattttcccatttctagagagcttcttggccagcagtgcttcattattacagttgccacatttttctcattaaaaaaaaaaatcaaaggagaaaataaaaggaaagctttccaagcttaccttactcccgggaaagcaagtggggaaccagatgaggggaaattgggaacataaaggaaaggagttaaagtgatcaggcaatattaattaagggtcgatggccgaggagaacaaaggaagtgatagtgggagtttatgctgaaaagggaaatttccaaaaattccatatacacatttctattttgaagagtagagaaaataggccaggtgcggtggcttacgcctgtaatcccagcactttgggaggctgaggcgggtggatggctagcggtcaggagttcaagagcagcctgaccaacatgatgaaaccctgtctctactaaaaatacaratattagccaggcatgatcgtgggtgcctgtaattccagctactcaggaggctgaggcaggagaattgcttgaaacctgggaggcggaggtggcagtgagctgagatcacgccactgcattctagcctggatgacaaagcgagacttcgtctcaaaaaaaaaaaaaaaaaaaaargaaaagaaaaaatcctcatctctgagttcaccrytacctagctccttacccactgagaagcaaagatgggaagcaggggccccagggccaccatggacagagcagggttatcatgtagtctgaatccgtaaaaacaccctaggttttggcggggcctggtgactcacgcctgtaatcccaacactttggaaggtcaaggcgggcggatcatgaggtcaagagatcgagaccatcctggccaacatggtgaaacacyatctctactacagatacaraaattagctgggcatgggggcacatgcctgtagtcccagctactctggaaactgaggcaggagaatcgcttgaacctgggaggtggaggttacagtgagctgagatcrcgccactgtacatactccagcttggcgacagagcaagactccatctcaaaacaaacaaacgaacaaaaaaaacaccctaggtttcatctgggactccctaccgatagagaaggtgggaaagaagagttggctcaaagcagggagctgctagtgctcccttgggaaggaaagctgttgggtggaggggacagcatttgggtgaggggaggagagggagcagggggtgaaggtagggagggagtgtggtgcactgaactcagctctttgggaaactgtttttgcaggcaagccacagttagaggaatccagttgccctggcaaacagacctggctggaagggatggaacacacgctcgcctgcgtcccaaagggaaacccagctccagycttggtgtgtacctggaatggggtggtctttgaccttgaagtgccacagaaggcaacctagaaccacactggaacctaccgctacacagccactaaccagctgggctctgtcagcaaagacattgctgtcattgttcaaggtaacctttgctgccctgctgccaggcccaggatggaaacccctcaggrgtttgggattcttatctaagcatgaaaataagaaagattctactaggttgggaagaatgagactcagaagtgggcctggtgggctggggtgggtgatccttgtactctcagactttcctaactctatcttctgtgcttgggcaggactggatgaaggaataagctctaccctctttgtcattattaccgttgcccttggagtgggtgtcatcaccatagcactgtatttgagctatcggccctgcaaagtggacaggaggaaattgctctataggcagaaagaggaggacaaagaggaggaaagccagtttgctgttcaggaagagaaaagtacaactcatataattgacarctrtttgattgaatgagasttctgctactgtggtttcccagggagggaagaagggatagaggagaaaggaagaaacacaatggcaggctgcattcccctttgtgtacgtctgtcctgtaaaacggtgtttcaggcccccatgccccatgtcctgtgtgtccaatatgtccacaagctcaccattctctctctstctctyttttcttttctttttctttttctttttttttttttttgagatggagtcttgctgttgtcgcctaggctggagtgcaatgatgcgatcctggctcactgcaactgcagcctcccgggttcaggtgattctcytgcctcagcctccctggcagctgggattacaggtgcacaccaccatgcctgtctaatttttgtacttttcgtagagatggggtttcaccatgttggctgggctggtctcaaactcctgacctcaagtgatccggccaccttggcctcccaaartgctgggattacaggtgtgagccacygcrcccagccacctttctctttagagctcactctagtcattaagaatctcagtctcaatgtttgatttgtaagaaggcctcttgctccttgccaggtgcttcatcagtccactcttagatacaaaaaaaagatcctgctgtttctttatggtttccactgcccttttctcttaaayatcatactaaagtcaggcacatcttagaaatgcaactcatatttcatggttttctgattactaactgggaactaaatytgtagtccarggacaggactttgaagggagtaagtatcaaatatggggcyaggaatcagagctctgttcccatctccactttcccttgctcccctgacctgggcttctggagkgccagctcccagagctgagcttgttgacatcattaaggatcagtggcaagcttcaactcagtaaccatctgttgygggtcttgggggagtatacagatggtaagaaattccacttygggccagacaagcatcctatctagcccagtgttctgtctctgaagtagaaggtagagttcttccatgaaattggcctcataggttaagagctccaaacatctctgaattccttttcatagagtgatcaactgtgagttcgcatttgtcagttttttttttktacccatgtgggtgtctaggttagagttgcaatgtttactctcccttttcatcaataaggacatattttcttctgtctgtaagcaatttccttgaagcttcaagaagaatcctcttgtgaaaatgttcatatgattttatgattctgcttccttccctgtccttgggaaagagtatattcaccctcagagaaggcgtgaggaatcaccaaaccagatcttttctcccaaatcagtcaagaaatgttcactggaatgttgctatggtaaaaataaaagtggttttatgatgtccaaatgcagttcccttcccttctgtgtcattgctgaaacctcttatttatttatttatttatttatttatttattttaagacagagtcttgctctgtcgcccaggctggagtgccgtggcacgatctcggctcactgcaagctccgcctcctgggttcacaccattctcctgtctcagcctcccaagtagctgggactacaggcacatgccaccatgccgggctaattttttgtatttttagcagagacagggtttcactgtgttagccaggatggtcttgatctcctgacttgattcgcccacctgggcctcccaaagtggctggattacaggcgtgagccactgtgcctggccgctgaaagctcttattatgtcaaatggttgcattttataactttttctttttttttttttagatggagtctcactctgttgcccaggctggagtgcagtggcgcgatttcggctcacttcaacctccacctcccagtttcaagcaattctctgcctcagcctcccgagtagctgggattacaggcacccaccgccatgaccagctaattttttgtatttttagtagagacagggtttcaccatcttgactaggctagtcttgaagtcctgacctcgcgatccacccaccttggcctcctaaagtgctggtattactggcgtgagccaccgctctyggctgcattttataactttaagtacaatttctaaggaaaaaataccgtgttgatagcataaacaaccagctcagggcagggggtgcattagctcagggcagcagcctatttgacctgctttcaaaactgaaattcaggccgggggcagtggctcacgcctgtaatcccagcactttgggaggctgaggcrggtgaatcacttgagccccggagtttgcgaatagcctgggcaacatggcaaaaccccatttctayaaaaaatacaaaactaggccaggtatactggcacgtgcctgtagtcccagctacttgagagtctgaggtgggaggatcacttgagcacaggagatggagggttgcagcaagttgagatcatgcactgcactccagcctgggcgacagagccagaccctgtctcaaaaacaaaacaaaggaaacaaaaacaaaaactaaagttcagacttccagatagagagaggtccatagccttccaaattgcagatactagctagraaaaaccatggyatcagacagcagagggaaaatgtttttccattcttcccagacctcccctaagtctggtgttatagattaagtataaaaataaccctttggaaggccaggcacggtggctcatgcctgtaatcccagcactttcggaggccaagsggggcggatcacaaggttaggagatcgagaccagcctggctaacacggtgaaaccccgtctctactaaaaatacaaaaaaattagctgggcatggtggtggacacctgtagtcccagctactcgggaggctgagtcaggagaatggcgtgaacccgggaggcagagcttgcagtgagccgagatcgctctgctgcactccagcctggggacagagcaagagtccgtctccaaaaaaagaaaaaagaaaaaaaataataagcttttcgtttcaccacatacaaggcagtggggatacagtggtgaacaaaacattgtccctggcttccacaaatttattaggaaagcaagacamgtatgtaatgaacaaaaaagttcattacatttgagcatgaactcctatgactgggaaaacagattgttaagagaaagcataactcggatcaaggaaggcttcctggagggacacgaaatatcttgactttgtaaaatagcatcatcccggaacatgaccttttcaacctcaatgtttccactaggtggagctactgctctctcatcmtgtgagtctaatataaatcatccaccttccctgaattgagcatttggggaagtaagttaagaagcaggtttaagagacaggagtatagagctgccccatgcagggatccacagacatttcggtgtcaggatcagccacatcaaggctatagttaycttgtatctgcaaaccctgcctcatggcctcagtgccttgaagcacagcgaatycaaaaaggaagggaaaaatgagccaggcatgccggtgtgcacctgtaatcccagctactggggaggctgaggcaggagaatcgcttgaacctgggaggcagagttgcagtgagccgagatcgtgccattgcactccagcctgggcaacagagtgacaccccatcttgaagaaaacaaaaacaaaagcaaacaaacaaaaaacaagacaaaaccaaaaaaagagggaagaagggggccacttggactttctagttccagcagggagatcctggaggctcarccggctgctgcctttgcttctcactgccacagggtgtcagtgtggacagatggtcccacacagtaccctcaaaccaagcgggtctgcagatctgggttcctacctgctgtggatctctgagggaggatgatctgcttcttcggggcctggtccagcagcgggtgtcctcttgctggggtttccagggttccagttcttagagctcagtagtttggatgagccgtcccgcaaagctcttcagagtaggctgggctgtttcccttgtagacttggaacctctgttcgctttccttcccgaaggatccacacaaccagtggtcaggcaggcagccccttctcattgattcttttttttcttttctttttattttttttggagacagagtctcgctctgtctcccaggctggagtgcagtggcgcaatctcggctcactgcaacttctgcttcccggcttcaagcaattttccctkctcaacctctagagtagctgggattacaggtgtctgccaccacacccggctaatttttgtgttattagtagagacagggtttcatcatgttggccaggctggtctcaaactcctgacctcaggtgatctgcccaccttggcctcccaatgtgctgggagtacaggcgtgagtcaccacgcctggcttcattgattctgaaagcaggaagggtctcatatctcttttccagtatgatagagcttctaagggtagctgcctcattgtctataggaggaggccccacccctaaatgattttgatcrtattctttctgaacattaaagcaaccagctcacgcttaaattgcaggtatcttgattatctccagaggaagagtggcctttaatactccaaaattttatcctctttcttattatttttgagagagaatcttgctcagccacccagctggagtgcagtggcatgatgggctcagcgcaactctgcctcccgggctcaagcgattctcgtgcctcagtagctgggaatacaggtgtgcaccaccacacctggctaatttttgtatttttagtagagacggggtgccatcattttggccaggcttgtcttgaactcctgatctcctcccgcctcggcctcccaaagtgctgagattactggcttgagccactgtgcctggcagtttatcctctcaaggatggtcagggtgacattctggcgtctttgtctttagacctgagaaagagtaagttacatctttagtgggacttcttaccataggattaataatagtatttaccttagaagattatacttagaaagaaatsacataatacttgcaataaactagcatgttgctggagacatgtgtttacatttgttggtttttgtgattacactgataattctggtggtaattaagcacatcattataatcacagtaaactcaaagcaagaatcagaaatccatggtaaccttgagcaccatcaaaagtcatatacaccgtgygcagctttctgatttttctactctttttcttgctccttcccctactttccccccagtttggtcccctaagatttaggactactaatagggtgaccagtcctgtgagctgagtttgcattgagctgagggattcctggaaggaatgtgggacttccagtgttgacattgagaaagtctcctgcaaaccaggacgagttggtgaccctaatcccagcggtgctcattgtgtgcctcagcactccagggccttctgaattaaagaagcatccaggcaaagtgtcagcttgtcttggcctagaagcccagaccctrtaattcagaagaaaagggaaggggtcagttctgctctcaactgtgtataaagggacaaaacccaccatgtgtatttsgacaatgctcatggaagaaattcagaagtggtcattttaggttagggtaaattcaaaaaaaatgacagagtcagtaaaacattatgccaggggtcaaggatgactggagctctgcctgctgaactcttccttgtgygagtcttgctaatcttatcttcaggaagagttttcawtagaaaataccawtaagagccaggcctggtggctcccgcctgtaatcctatcactttgggaggccaagaagggtggatcacctgaggccaggagtttgagaccagcctggccaacatggcgaaaccctgtctttaccaaaaatamaaacatctgccctgtgtggtggtgcacrcttataatcccagctactcaggaggctgaggcatgagaatcacttgaacccgggaggaggcggaggttgcagtgagccaagatcccaccactgcactccagcctctgtctcaaaaacaaaaacaaaaayaaagtattaacaatttttagttgtgagaagatataaacgtttccatcttaaccattttrcstgtacagttcagtcatgtcaagtacattgacatcgtcatgcaaccctcaccaccawccatctccagaacccttttcatcttgcacagctgaaaccctgtgctcattaaatagctccctattccatccctccccacagccactggcagccaccatcctactttttgtctctatgaatttgactgctctgagtacctcatctgactggaatcrgagagtatttgtctttttgtgactggctcatgataaacactttttagatgactggttggaattaggagcaggtggcaccacaactggcccaggcctctcatctcctttttctcykttytccctrttccaccagtacaacagctgtgaacacatgggtctcatctttgcggtccctaacacrgtggttctcaaccttgtttacatgttaraatcacctgggaaagttttcaaaytactcttgcctggaccacattccagtctaattatatcagaatctcagggagtgagggctcacgwatgcatcgtttagaaaacaycctaggcatctcaaatttgcagsrgaaattgccgtccacaccaagttgatgagctgaaatgtagactaacagtgggtaaatcagagtttaaagtagatggtctttaaggtctttttatrttctaaaatgtgcaaagtcagctagtatctaattctcaaccagcagtggttgagtggattctcctacacccgaggggagctgggtggacagtctctggcrtgtggctccccctgcagttcagttatatgtyatsaccaccccactttagaacccycttagccacccaagtaggcgctggacattgtcattccactgtcacgtgcattcaacaaatacttattaagatggctcacaattccttttaaaacacgcaagctgagagataattataattgtgctcattccatcgacttctaaagactgagatttctaaataattttaaggccaaatgaaggacrttgcaggaatattgattccagctttgtgcaagaaatagttttttgcaatgagagtggtttaatagaatgaggagccttgtgaaagtgattcctttggttctagtgctacacactcataattggaatactgactgtaatggacgccgtaggataagattcccaaagtagaagaaactagactgacttatgaggcccttcta

SEQ ID NO: 10046 - DNA, 115259 bp, Homo sapiens
ttccacaggagtaaccactgttaatagtttttattgttttggatagacctttttctatagattgcaaatatactattctgtatgtacatataaacaaacacatatacactcatttacagtttgtgtggtttttggtttttcgtaaatacaaatagggtcattctacgtatgctgctttacatcatatagctgttttcagctagctaatayagatctgcttcagtattttatcagctgtataataatttactatgtggatagattattttccatttttttggtattacaataataatgtggcaatgaacccccttacattatacatctttgcattcttgtttgagtgggttagatagtagaatggttgstgctaggtcaaaggctgtgtgcattaattttttttttttttttttttwtgagacagggtctcattctgtcacccaggctggagtacagtggcatgattatagctcactgcaatcttgaactcctgggttcaagcgatcctcctgcctcagcccctcgagtagctggaatcataggtgtgcaccacgacacctggctaawttttttttttttttttttttttttttttttttttggtagagacggagtcttgccttgttgcccaggctggtctcaaactcctgggctcaaatgtcctcctgccccagccttccaaagtgctgggattataggcgtgagccactgagcctggcctaaaattttttatatttgctgccaaattgccgtccagaaagtctgtagcaccctatagtcttgccagcatttttctcagtctttccaggtcttgagctggacaggtcactgcctgcgtaatactctctaaggctctttgatttctttgctctgttaattttttcgggtgggataattgcattgtggttatgttttttttttttttttaaaagtctttatctttctgagatacatacaaaatatttgtagatggaatgaattaggggggaaaaaggataggatggaatttttttttaatcccaaaactttgctgaaaaatgaaagggaaagacaacagaaccaagaagtgcagaaacagatgcacttaatggggaacagatttccttacatgactgagggataaccacagctggacacttgtgggacacgctgtcttgctcccacgcagggttagaggtttgagccggctctgctgcagagcctgatgggcttctcagccccttctagaatctgcttctgtcttagaattcaggcctccgaatctctcctctggacctgggctttactgctctgactcttggggatctctgcaactctcttcctccaaggatatcccccgatcccttctgagtgaggaagtgtctgaacatctggaagtgtctggcttcagggcttccaggactattggaaattgcttttcattgtctggtttggtttggtaaaacctgtttttaagttcttccttttgggttttttatcaatagctccaggctggcatctggacctagtctctgcattataataataccaagccctgtcacagccagcagaagcctcaggcctcttcctgttcctaagccctacctctctgtcaggccacccactgagtttctgttcttctttgatgcctatagctccagcttgcatatgacttgcagagtagaaataggaagagttaccactttttgtaggtttgccaagcaccagacactactaagtgctatctattacaacatatatatgatcattctgttgccatcagacaactctgatggctcttattttcagattaacacgggaggaatctaaggctcagagagtctaagtaactttctttctttcttttttttgagacggagtttcgctctttttgcccaggctggagtgcaatggcatgatctcagctcaccacaacctctgcctyccgggttcaagcgattctcctgccttagcctcccaagtagctggattacaggcatgagcctccacgcctggctaattttttttgtatttttagaagagatggggtttctccatgttagtcaggctggtctcgaactcctgacctcaggtgatctgcctgcctcggcctcccaaagtgctaggattacaggctacaggtgtgagccaccgcccccggcgagacttaagtaactttctgaaggtcacatggctagttaaagatcagggctgagattcaacctgattctctgactccacacctttaaccctgtgcacttagaagtaactgagacattgctcaccatgcagataaggcctttcctggcttagtgcctcagcttctctttgatgactttctcaattctctgtgtcccagagaatactttttcttttctttcttttttttttttgagatggagtctcactctgttgccaggctggagtgcagtggctaatcccggctcactgcaacctccgcctcccaggttcaagcgattctcctgcctcagcctcctcagtagctgagattacaggcatgtgccaccacacccggctaactttagtatttttagtagagacggggtttcaccatgttggccaggatggtcttgatctcttgaccttgtgatccacctgccttggcctcccaaagtgctgggattacaggtgtgagctaccacgcccggcttttgagaatactttttcaaaaagaaagaaaccaatattgagtacctgttgggccctgttttgctttcacatccattctttcactatgggtttataataccacgtcactcttcttaaaattaaaactctcctttaccttgcacttagaagaaaatccaaaattttgactgtggcttaaaaaggtcctgcatgctagcccttacctacatccaggatctcatctctaactactctcctccatgcacagtgctcccggctgtcctggcctccttgttcttactggaatacatcagtctctttccatttcatgacctctgtagttggttttcttgcagcttggaatggccttcctgaagtctttgcctgcttagctcctcctcagactttaggtcttatgtcccaatagtcctgtctgaaatttcacccttttcctctcatcaccttcagtcctatcacttcattttattaattgtactctccatcatctgaaattattatatttatttactttgttagttactagtctcatttattaggtaagctttttgaggatagacaaccttgtccagcttgttactctactgtattgctaaggtttatgacagtgtctgtatagagtagttccttaatgtttatttgatacgtgaatgggtgaatgaatagcagtctctaccaacaagaggaggagtggttctcaacggggcctgagaaatggctttggaaaagggtgctgggagaagatyagaacttagagtgagatcctgacctctctccccttgctttgcaggccagaggcacccartgagttctatgatggagaccatgacaatgacaaggaaagcgatgtggagatttaagagtggcttgggatgctgtgtcccaaggaatttcttttcacctcttggttgggctggagggaaaaggagtggctcctagagtcctggggktcaccccagggcttttgctgactctgggaaagagtctggagaccacatttggttctcgaaccatctacctgcttttcctctctctcccaaggcctgacaatggtacctattagggatgagatacagacaaggatagctatctgggacattattggcagtgggccctggaggccagtccctagccccccttgccccttatttyttccctgcttccctcgaacccagagatttttgagggatgaacgggtagacaaggactgagattgcctctgacttcctcctcccctgggttctgacttcttcctccccttgcttccagggaagatgaagagagagagatttggaaggggctctggctccctaacacctgaatcccagatgatgggaagtatgttttcaagtgtggggaggatatgaaaatgttctgttctcacttttggctttatgtycattttaccactgtttttatccaataaactaagtcggtattttttgtacctttcgcctttctaggaatgttaattcttgctagtttcctatttatgaaaggagagggaaatgggcatgatgatgcatgtaataaaagcatagttaacattcattcagcacttatcctacgttaggccctgtgtatgtattctacatttattattgtaaatataagaagttaatagaggattttggttaagagttagacaaacctgggcagatttgagaggagtagaagatgacttcaggtttttgaatctgggtgtttagagtagtgatgctagttggtgaagatacactgagataaaacatgttaagtgcttagcacagtgcctgacagaagaagttgcccattatctgtctatgtgaagaacaatgctaaatactgtagtakccacaaacatgaacctttctctagaagagtttacattccagtcagtagtatgataaatattgtagcagatacagactgatacaagaaagaggactgatagatgggtcacttcctcccctccattctctgattctgtctgttctcaacactagcttagaaagtagcttttggactttttagacaaaatgtctggaaagctcagcactaagtcaagtttgaagtatgggatggacagctctatgtaacattctatccgatcaccatcagaaggtctggaccacaagagagatgaatgccaaatttaggagccagccagcttggcagagtccctggtatatctcaggcccttgactaggtactggggctctagagtaagtaagtcactgactctgcccttcaggaacttatgcttgaaatcttgctagctgtggtcaagaatattcagtccatattgtgaaggccgactggtagccacgtaactgtcacacaagggacagatgtagctgggagaatggatgaaattgcttagggagaaagtcatgctagaagagcaaagaatatactcttggagaatactcattcttttcactcatgtttggtttatgtcagtggggaatcctggttaaacatagggtttggcagcaaatcagactaagctgggtttaaattttatatcaattatgcgttcttgggcaagtcacttcaactctcaaaagtccaaatttactatttataaaatggtgaggctagcagaatctatcacatgggactgtggggacttagaaaaatacatgtagagtgtttgcctagtgcctagcagagagcaaagggcatggttaagtggtaactgttattgctgtttaggcacatgttggcaataattagtttgtcctgattagaaacaattagatggtacctaacctggaattcgaactaggaaattaaactccagagcgagtctggtttagtctagtgcttgscctggaccgagctctgttcttgctaccttgctttcaaaacatggtggctatcactataatttttttcatgtgttccatgggtattgcacacattgaaaactgcattctcttggaaaacctgtcactaattttctgccaggataatggtctcacgcgatttttggtctgggatgtgagagggtccaggctgtcaggctgtacagccacgtgggcgctgcgtgggagccagaggcctgcgctgctccaaccgccagrgggcggtgytctccgccgcggccgcggagagctgcascgcccactcaccacccccccccacgtgggtccgaatggttaggtccgmtgggcaggtagcgcgcttccgcggcttccctccgcccctctcccttcccccattggtaggggctgcgggtccgggcggaagtggggcaggcgggcgggagcgaggcgtcgtcsttgtatattcatgaggcgcgcgcagcccggcatgctaatgaggcggggcgcggcggctggctaaagagcgactgggcggcggcgggcgcggagctgccaggcgggagcggcgtaggcgcggggtcgccggccagcgtgaaccgggacatggagccgcccggcgggagcctggggcccggccgcgggacccgggacaagaagaagggccggagcccagatgagctgccctcggcgggcggcgacggcggcaaatctaagaaatttgtgagtgtccctcycatcccgctcctgcctggccccgtaaccgccctctggacccctgcagccggcccctggggcgcctgcccggctttggggagccgcccccgcgccttccttcctcgtttcgctcggtccgcagctctgcagcccgacatcctctcccttcgggacctcgggaagccccggaatcccacccggctcttgccccggccacctcggggcttccctcgttccccagcccttacattctgccctcccgcccgcatatccccggccggctctcagccccgtctctcccctctcagcctcacttcctttcttcttcctccagtacccgaacacgcctcctcttttttggtcccctcttctgggtccattttctcttcttaaccttacaccttttttggtattctcgtatttccttctcctaaaggtcacttccttctccatgattcatcctttttacctgctaactttcctcccgcccagtcccccgtgggccctccgcccggtgtcacttgataatccttcccctgaggaatgttacctgacttgagccctacccccaactccttctttggacgtttgtccttgcgattacaggaatgggctcctgcccaggtcctatggtcactggggcatgacgtttatttgtttaccagtattcctctctccagagaacctctctctttgccctgttgcttatcacttttcagaggattagaactctcatgattgtgcccttcttgacctaggatggtgataaacctctcctgtgggaagaaagttggactgcgagttcaagaagtttgtaattgaattgttttttatacatttcccatgataaccgtctcctctactccttttctactgcctcttgtgccccaaggcgactatcggcttccctttgcgtgcctgtagaagagtaagctttcctcaagtgccagttactttcaatccgagtgaaggaatagtgatatacatgtaaccctatcatatttcattaccttttgcccacaccaacgcctctctccagggagccgtttggttgcttttttgctataaaagctttgtaagatacggggcactgtccaggagaggaaaagtcttggatattgatgatcattataatagctagttataactgtagctcttttgtcttctcttccaggtatttatgcccttacactagtgtatctttctactaaacaaatggcttgtaactcttagtcccacctcccaacattttgacccagctccacaaatttgggaagaaaactgataaagcgatggaaacaggaagaaaatgttgttttatgacctagagggttgagatgttaaccctggagggttagatgtttaattctaaatagaattaaaatagtgactcatctcttcctatttctagcaagaccaagtgctcctggactgccctttccagtgatatctgagatgtcagtaaccatctgtttttatctggtgaacatctttttttccccccctagaaatataaggttaagggtattgacaccccctccttctttggtgactaaagcagcatttttgtatgtttctttaggataagaattgacccctcccccccgttagctttccttccaaaacttaagttctagggctcatattccttctatttctgtatctttttgttttgattttatttccatgagtactgtttgaccttcctcacccaaattccagctattgctgctgacttgtggtgacctcagtgacttgttttcatgtcttgagtagaattttatatgtactctattttatctaacaattatttcacgaacttgtgaagtctactatgtgtgtggtactgtaaggtgagaaacctgaggaagctcaaccccttttcacctgtcttttggaatgtccatgaagtcttctatatgtttaatggatttggctcagggttgtaggtatttgctttagagaggatggagctgaaccaagttctcttttctttctgcggtgttagtcttaacccttaatctgctgaatttttaaaactaaatagctcargtaatgaggaaaattgcattagtagctacggaattggaaggtttctaggaaagtagtgctgcttaacccttttattgccaaatgtaacctatctcaaggcatcagaatattctttcttcctcttgctccttttatgagaactctgtggaaatgagagatgaggaggagcattgcmatccacttctctttgtgtctgtgtatgtatacgtgggtgggtggagtgggcgagattgctggtgtgcttttgatacccgtggcttagttttcttgaactataggctaaaactgaactcaaaggtctttcgccgcctccaccttttctagagtatgtgtcctctggaactccattaagaatgtactgtataaaactgcactggtttggactaagtgtgcccgaaggttgtttgcatttgagggtttataattcctttagctgctacatacctttcctggcttatgcaggttctaaatacggattaactggtgagaacacagagctcacaaattgtctgagatctgctcttaccctctgaggcatcttgtgtggaaaggagatggaccctcagtttaaaagtggttgggcatcatcttttaaaaacacatgattgttagacgtgctgacagtgagtggctgaagccaggctgcctggtattaccccttggttcttcatgagtctgtcttctcctgggccatgagcataccccttctccggcattattccatttcctttcacaagtccttaagatgaaggaaaataaaaattttaggtgaacagagggttttctgacttttcagcagtgatcaatgtgggtgtcaaatagactgatttccaaaatatacgtaaggggaataagtagaaccgggatgttaggaggctgcagagtattcttacatttaatagactttgtatgcactctcatataatcgagaaagtgatgcattgtaagagagaatattgcttcctgatttaactaggagcattagcgagaattttttttttctttttttgagatggagtctcgctctgttgcccaggctggagtgcagtggtgcaatctcagctcactgcaagctccgcctcccgggttcatgccattcttctgcctcagcctccccagtagctgggactacaggcacctgccaccacgcctggctaattttttttgtatttttagtagagacggggtttcaccgtgttagccaggatgttgtcgatctcctgacctcgtgatctgcccacctcggcctcccaaagtgctgggattacaggcgtgagccaccgcgtgcggccctttttttttttttttttttttctttttctgagacgagtcttgctgtgtccaaggctgcagtgcagtggcgcgatctcggctcactgcaacctccacctcccgggttcaagcgattctcctgcctcagccttccaagcagctgggattacaggtgtacgccgccacacccagctaatttttgtatttttagtagagactggtttcaccatgttggccaggctggtcttaaattcctgacctcgtgatccgccagcctcagcctcccgaagtgctgggattacaggcgtgagccacctcgtccggccaagagaatgatttttactattattaaaattattaaaattagtttaattttggattcctatattgagttatgatcatgttgcagttacacggtcttctaaatgcaaagtaatagagtataaatgtttagtagtagactcctgtccaaaaggagacaaattaaaggatgccaggcagaaagaagtggagttgttcgtgcagatttctgcttatatcctcttaaaacattaactttaatccaaaagtttgcagaaaactgaaaaatatacagagagctttgcaaaagtttgcagaaaactgaaaaatayacagagcgctttgtacacctttttttttttttaacagatgatgaacgcaaggattatatagtttggaaagagggaggggagcctacaggaacgttagtgagatgtttgagatgacagaatggtagcttaaagatttccgccattcttcctgccttgtcttaaggacagatcatgagtctacttggtatggttacctgtactttttcaaagaaaattctccctcacaggaggtgaaagtgagggaatgccttagaattaaaatctctgccttgggagagttggtaaatttttttaaaaagctgaaaattttatgacccgtaaattatgtttattatgaaagctaagaaaatagtgagacatgatttaattttgttgatgggtgcacgggtcagaataattttatttcctgtgtcttagaatcaccttttgttattccccaaggcccttggtattttataaatgtattgccaggctattctyagggagtgttatatatcttccatgaaatgtaatagagatttaaaagataagttgtatgtcacatatgatttagaagaacaggttaaaataatttttattgataaatactagatgttatagagaagcaaagagtttgtatatgcaggtttatatatccctttttatgtcccagtagctgaaattatttatggctacaaaaatcatccccattttgaaacaaactttgtattacttaagtggttttcttttttcattgagcctccttttctcaattacctttgtttgaaagcagtaggcaaaaaattcattttrtgctaccagcaaagcattggatgtttgcccctccttggggttaggtgagacaaagccacactctccccttgcctggctgcctgtcacctcctccctgtgtttttattcctttcctacttacgtgggggctgatttgagcgctatgaatagccaggcctttggggaattaggggcagtcagaagctgttgataataaaatttcttaaaacttttaagctaaaattgaaaagtaaagaataattactatgaacatattttactgtatttctccttttttttaacacgtttcttargatcaagaaaccctttttaaggaagtaaaagaattactgaaggaaaagagaaatagactaatattttaatgaattttaccactgattacaagataactctcattgttctttcaactttgaaattcttacttccatccattattaaatcttactgtgaatggtacccttaaaacttcagagttggaagggactttaaatgtcatcaagtccaaacacccactcagtgcaacagtcacttctgcagttgtaggttggaaacatcagggggctaagaggtggaaattggatgaacaagtggaggaagaggagcagaaattttggattctacattttctttactaaattttaggatcttgggaatggctggagtagtagaaagagattatataaaaggaacagatatactagaagctgtgagattgaaaggaaaaagattgaagaaattggctctctattgcttggctctgtaacagttagggagagtcagtttgccctttaaatatttgtttaaatttctttcctccaaggcgggggatagaacagataaggggatgcaaatgagagttagcataatggaattgaattaaaggaaacattctcttatggaggatgggaaaattccatccttggtggtggatatgactggtccttagtagctatctgggaattttgttagggtggcaaatataggtagaatttatggtgtcctgtataattttctggatttctgattttgtgacttatttcctgtcttgtgagtagtgtcatctgaaggctttggatttgtaatttcttttaagatttaaaatactgtaaggacccaagacaggatgatttataaaccatttttgatactgaaggtcacagaaaaccaaagagcatacgttggtagttggccttacatctcagatctgtctgtgttttattttcagtgtcagaactttaagatcaagtagaaaagatacccttcatctctatttttacagcattattgatatataattaaaatacaataaactgcatatttattcatgaaaccatttctatagtcaagataatgaatatagcagtcaccttcaagtttcctccttctcyctttgttatccctccctctcacccatcctcgtcctcccatctccagattaccactaattttctttctgtaactatagattagtttgtgttttctagaattttatataaatggaatcatacagtatgaacccttttgctggggcttcttttattgtgatgtgtggtctttcatatatcaatagcttaatcctttatattgctgagtactattacattgtatggatttacacaatttgtttattcatttaccctattgatggacatttggggtgttcccagttttgggagtgcagtttttgtctgtgaacattctcatacaactttttgggctggacatatgtcttcatttctcttgggtaagtacccatgagtggartgrctgggtcatttggtagatctatgcttaattgagaaattgccaaactgttttcaaactgttttccaaactgttttcattttacattcttaccagcaatgtgtaaaagttccartttcctgtcaactgttagtatgatcagtcttaaattttagccattctagtgggtatgtgatgatatctcagtatgctttatttatttatttatttatttattattttttgagacagagtttcactctcgtcgctcaggctggagtacagtggcataatctcggcttaccggagcctctgcctcccaggttcaagggattctcctgcctcagccacctgagtagctgggattacaggaggctgccaccacacccagctaatttttgtatttttagtagagatggggtttcatcatgttggccaagctggtcttgaactcctaacttcaggtgatccacctgcctgggcctcccaaagtgctgggattacaggcgtgagccactgtgcccagctgcagtatgctttaatttgtcattccctaatgatgttgaacatcttttcttgtccttacttgctgtttatatatctttcttaagaatctgttcaagattttgcccatttgctatctatgtatcgtccgtgaagaatctgctcatgatttttccttccttccttcctttctgtcttttgtctttcttttgtctgtctgactttcttttgtctgtctttcattctgtctttgaaatggtagtctcactctgttgcctaagttggaatgcagtagtgcagtcatggctcactgcagccttaatctcctgggcttcaggaatcctgcctcagcctcacaagtagctgggactacaggcgtgtgtcaccacttctggctgtcttttcattttcctaacagtgtattttgaagaaccaaaaaacttaattttgatggagtccaattttttttcatttttgttttgtgtgttacatttcaaaaatctttgctaaaattatggtcgctaaggttttctcctctgttttgttttttgttgttgttaaaagagaatggatctcactttgttgcctggtctggagtgcagtggcacaatcataggtcactgcagccttgaaactcctgggctcagcctccccagtacctgggaccaccatgcctggctaatttttcttttcttttcttttctttttttctttttttgaggcagagtctcactctgtcacccaatctggagtgcagtggtgcaatgacaactcagttgcagcatcgacctcctgggctcaagcaatccagctgcctcggtctcctggagtatctgggactaccggcatgcaccacaatgcctggctgatttttttctttttcttttttttttttttatagtggtggggtttcactatgttgcccaggctggtcttgaactcttgggctcaagtgatcctcctaccttggcttcccaaagtgctggcattaaggcatgagtcactgcacctggcctaattttttttatgttttatttttgtagaaatgacgtctcgctaggcggggtacggtggctcatgtctgtaatcccagcactctcggaggctgaggtgggcagatcacgaggtcaggagtttgagaccagcctggccaagagaccagcctgtccaatgtggtgaaaccccatttctactaaaaatacaaaaattgggctgggcacagtggctcacacctgtaatcccagcactttgggaggtcagggtgggcrgatcacgagatgaagagatcgagaccatcctggccaacatggtgaaaccccgtctctactaaaaatacaaaacttagctgggcgtggtggtgcgtgcctgtaatcccagctactcgggaggctgaggcaggagaattgcttgaacctgggaggtggaggttgcagtgagccgaggttgtgccactgcactccagcctggcgacagagtgagactgtctcaaaaacaaaacaaaacaaaaaaattagccgggtgtggtggygggtgcctgtaatcctagctacttgggaggctgaggcaggagaattgcttgaacccaggagacggaggttgcagtgagccatacatcatgtcacccttgggcgacagagcgagactccaactcagaaaaaaaagaaagaaagaaagaaagaaatggggtctcactatgttgcccaggctggtctcgaactcctagcgtcaagtgatcctcctgccttggcctcccaaagccctgtgattacaagtgtgagccactgtgctcggcttctctcttttcttctagaacttgtatagatttagcttttaaatttccctcttttctatcatgcatatgtgagttccacatgttcactttgggatataaattgtcacctgtggtcaacagagaacatttctgatactctgaggatttcgggactttcattccatttatcgtggragcatttttttcttgttaggtggtggtgttagcaaccttttgttttcctgtattcagtatactacagattgtgtaatgccagtcttcctgtttctaaatattaatgaatgtttagcatctttatagataaggaaaattaattcattccagactaggatagggaataayaacagtagcagtaataaaagcagttgtttgttgcatacttaactgtatccctagtgcagtgctaaagagccttagatttattatctcattaatctctacattgaccttataaaataggtactgttattattcccattttataggtaatgaaactggaactcagatcaagcagcctgcttgaagacatagaactagttagtgacagagctaggattcaaacctaggcctagctgattcaaaactcatggacttactcactacattgtactgacagtttatgtgtgtccagtttttgtgcctgcagtgtaaaactggactgcagtgtaactattcactgctaggaatttcttagaaaattttggtggtattcccttagagttctttggtcatctacagtctattaaaatgaactggattctcctagagttcagttggcaggaaaaaagtactaggcttagatgtaaaaagcgtagtggctaaatgcctgtttttttttttttttttttgcatttagtaatttagactttgaagccattggaagaatcttaattaaaccttttttaggcatgaaaaaatagctattacagtgcttgcaaaacctatctttcgcttggctcatgcgttattaggatgatgcttaaattattattttttaatgtaactgtgtctcctttgtaagtagaacagctctaacatcatcacctgtcaggagttttagttgtttaaattgctgagagccacaagtagtggtaacaatgttacaggaagggggaagctgttactagactgtctctatagttatcctttttatattttaaatttgacgtttggtattcttaaagacctctgtttgtgctcctgaaatttgactgttgtaatgattgcaaatggctaataaccaggatctcttctgagtctgggaactgctgaagtttgttctttagacctggcagttatttgccagtggttaataattaagacattgccacagaggtccaagtacctggaactgggatttgtttctggtgactagtggtgaggagtagggaagagtttctgttgatttcctgagtctacatgtatctactctagatccaaagactgaccaagaagtcatgagactgtcctatcaggttcagttcttgctctttaagaaattgtaatttcaaccacgtctataaaagagggatagaaaaagctctaaggctgtgatcttagactttaaatgctgtagaaattcatagaagtgagggaattaagtggaaaggctattggactgacagaaggcctaagtttcaaaatcttagaatgctggagtcaaaaggatgctaagaattatctaattcaacccctttattttttattttttaagagtcagagtcttactctgttgcccaggctggagcgcagtggtgcagtcatggcccactgcagcctggaactcctgggctcaagcagtcctcccacctcagcctccagagtagctgggatacaggcacaggccaccgggcccagctatcaacccctttactttatagattaagaaatgttgactagacaagtgatctgtccaaatttaaaactagaaatagaacctttatctcccaccctgtctgaattattctttccatatgtagctgcttagttgtgtctttaccactaattaaccatgtgaactctaagcaagttattttacttttcttcatctttttatcttttgtaaaattagggggttattatgaatcatttctaacatctctgctaatgccccagatactgtaaatgacccagaatgtaattgcgggcagtgttaacttagcttcctagaagatgggggatatgactgggccttgaataaaatccaagatttggcagagtagagagggaaagaattcatgagatggggagcagtagaacaaaggcttaggtgtgaatatgtggctgtagtaaagagaaatggcctgattatagcaattatatgaggtttagtagaaccatttaagaaaggtaaagccacttcatagaaattattttatccctggtaagggctttaaggttccctttctataaaaacctgcagaaagcaggattgaaatttaacattttgtaacaggttgtaatacatgttgatgtccgtttttggccatgtgataagtggtggtgacagtaagtacattggaatatccaagaaggaatagtgttaaggtcagttttcagcaagttatttccgctacgtagatggagtttaaaaagttaagtttatttgattttcagtccttaccaattttaatacatcgatctttttagactttcagaaattagattttaaaaggcgtgactcttcagctggatctcaaggatgtatragaaaattatgggctcagataggtaatgccattgttgaaacaatctgagtctatctttgggccctgttgtttcttctaaatgttctttaatacagtacgatttagcttttgattgcatacttatttgaagtattcttctgtctttcttgaatgcaaaaatatatgtttatatcttattttggggtcttatctcccatctagattgtaaggtttctaagagtagtggtagtatttagctcatgttagttaatatcctttatgtattttatattttagttttaatgttaaccttgggaatctttttcttttttctcatcttaaggtttgcttcctttttttttttttttaatagccttgggaatcttgattattttcaaggctctctgtttctgtgatctaatataggagactgacagttttgaaaacattaattctctctcaccaaagtaactatggggcagagagaatcactaatgtaactatatgtgaccagaagaactctgttgagaagagattattattcatctctggagagatagttttgacttgtgtttaatgaaagaacatgtctgtaggattaaaaaaaactcttatgttattttacatagtgtaaggctatcaacttttattattaaaaatgaaagcaggcactttgggaggccgaggtgggcagatcacctgaggccaggagttcaagaccagcctggccaacatggtgaaaccccgtctctactaaaaatacaaaaattatccaggcgtggtggtgcccagttgtagtcccagctacccgggaggccgaggcaggagaattgcttgaacccaggaggtggaggttgctgtgagtcgagattgtgccattgcactccagcctgggcgacagagcgagactctgtctcaaaataaataaataaataaaaatgaaagcaggatttgactcagtgcccttagggattgttacatacatttaaagtgaataattgctaagttcccatattatttgaatctattaatatgatctttaatggctacagaaaggtttacattgagtattaaatgaagagaacaaggaagagttttcaagtcctcagggtatgtctggatatccacaaaaagtactagtggcagtaggagtgcaccatttttttcataagcacatatactcccacccagagctataagaattccttcagttccttcatttggcaatagaagcaaaatagttttggactattctaaaattatttcattttgcatggggcctagagggatatttttagttttcttagtttttgtgaaagatgtgtgtcaggcttagaggtctctagtgatttctytcttgattcttgtatttttaaaagatgggagttggtcttagttggcagctctttgcatccgccagggctgttcgttacttacttctaggtctgtgggtgacgtctgtttcctgtgattgaaaccgcaagaagaagtggtgagaagccactgtaggatatgtattatcaggcaagcagcaggcattgggctgccctcaaaaagagcagtagtacctaagtatagtctttaaggagtcggaagagaccctagaaatgatctgacccagcctcttaaaattaggaggacactgaggcctagtggtattaagttgctcaaagtcgtgtaattagatgacctaggttttagactccactaatattcttctcagtattctytctcacattgcattgtcatacctaaactttgtaactgtgccttgtcaggagtgtttccttaagcaaaataccactggagaagagtaaatactgataggcattttgcctatggtaattggatgatgatgttttgcttttagatgatgtgctaatgattttttgtgtgtgctttttttttgaaaacacatatatatttttgaaacaatacgtaagaaccctaaatttctatttttcatttttattttacagtctttgtatattttagtcattatctctatgcacaaatatttttacaacattgcctttatagtttacagatgttttttgcttttaaaatagtgtcataaaaattttccagctttctaatctttgaaaattgccaccttaatttgaaatggaaatgtatgtgtattctaaaagtgatagtttttttctaagaaaatacaaatgtatataaaaagagtaaaacagtcccatactttgtttttcagaaattaattttttttaatggttagaaccaaagagaacagtacatgatatatggaagtttctttagatcctaagtactttggcatgaaattctgtgtgtgtttgtgttagaacatagttcaacacaagtacaattgctagaagtatcagaacaaccttattttaacacttatatttctggtggtagagaaataataagatttcatcttcatgctcatctcccctcctccctaagattttttcaaaatcttattctgaatgtgtaccgggccaaaaaatattttctgtggtttcgtaggatcaagtctggcttattgagtagtagtataatttttggattagttaagcggttgtcagtaggggtaggattatttctgggtattcaggagtggtgtgaggatacaaaaaagagattatttagaaatgaaaggactttaggaatgggatttaaaacaaggtgtcctcatacttggtgcctgtatgtagaagcggtagcagttgcagaaacttcctgctgtctgctaggctttgggtgtgtcacacacatgcccacccttgaggaagagtagatgtcctgctactcacatcataacatgggaggagaagacagttgctacggcgattgggaaacagcattcctgagtcactgactatttctaaatgaatggacaacacccctttttttaaaggagtgatcatagtcttctctaagcttaggcagcagagggagaggcctagtaagaaaggaagagcaagtatcaatatttgaagcttgagaaatatgttgaaattttggaaaaattggttaacattatgttttgtttcctgtatatgtattcaaaagttgtattggaaccttagaatgtttgaaaggaaggaagctttgcttactgttctgtcaccaaatgacagactatgcatgctggctttcaccttctgaacagcagaagataccggtgtgcctgctacaccttgtgatacttgataggaaagtaggacttccagactctgagcactttctctgttggcagcttgtttgcccaaaccatgtgtgctttatagtgcaaggactggcagttyktatggatggacttggaggaatgcagcatcctyagcccggtttctacctgttctgctgtgctggaatagtgataccagcgtggcctttcctccttccctctgggctatcaactacctaggatgccggctgccagttgcagggctttaggatgagctgagctgtaggcaaaaagttactttttccctttccccaaggtacttgccttcttgaactattagagaagtgatactttggacctgttagaggatccaattctaatattaagatagttttcccctcattttaattataattgggaaataaggtttattggaaagcagactcaccaacagttttagacagttgtgcaggacattaagttagttgctttacatttataagtaaattatttcaaatttataagcaaattattgaaatacagaatggactacagttactactgttctttatacggcatttctaacttgtgcttgacactggccactgcctagaatctttcattgttcccgggtggggttaggaaaaagatgctgattttggaaggcaggggtagattgatagaactcttttaattaggaataaaagatattggactgtcttttactatgtttcctttgttggctgttgtatgaattctaacaagtttattatttatttatgttttctcagctttattgaggtataattgacatacaaattgtttatggtatacaacatgatgttttgatatatgtatacattgtggaactaatgagtttaactctccagtgcttartttagctgtggggctgctgaggcactctgaaccaaatggaggagctgctacagtcttacctaatccttcagcactttttcctcagtggtcatggagaacatgagcctatcatttccatttctggggactgctaggtaatcttcagccttctttcccttaaacacatttagcttttctaggtttatagtttatatttttaaattcctggtcattttgtgcccctcttctagacttcctttcctctgaggtaccctttttctttcctttattttctttttgaagtgggtactccaactctacacaacgcctgtgtaggctgcaggcaccaataagtggtgatgtcagaatctagtttgtttctctgtaaatgctagatgaaatgttgattcaattgctgttgtctttgggccattccttgaaaatggaagggaaagttcttctgtgcatttaaagttgtccattatttcattttctttagttctgactgacttctgtttaaggagtgggaattgaagaagggaaactagccagtttcagtggttccatcatatattatttaacttttacaaagtactttgcaaaacaaagtgctttatatctgttttattatttattcttcatactagtcctctgagacaacagaaccctagagataggaagactgaaactgtggtcgatttttaaaagcttaccctgactttacattcctttagtggaaatgtgataaattttgtggcaaaggccaggcgtggtggctcacgcttgtaatcccagcactttgggaggccaaggcaggtggatcacgaggtcaggagttcaagaccatcctggctaatacggtgaaaccccgtctctactaaatatacaaaaaattagccgagtgaggtgatgggcgcctgtagttccagctactcgggaggctgagacaggagaatggtctgaacgcaggggcgtagcttgcagtgagccaagattgcgccactgcactccagcataggcaacagagtgagacttcgtctcaaaaaaaaaaatttttttttgtggcaaagctagatcaggcctcaatggtaactgaattcaagatcctattatgaccctctgttgcctcagtaccctaaggaactgtgtcaatcctgaataaagaaattaatcagagctggacccttatctctctgttctgcatgattctaagtgacatatgccttaccttacctgttctttctgggtaggtagattaggatatgaaaggaaattatttttggctgtagtgatacttatttcccattttacccataggtagactttgtcattattgagggcttattgtcctgtgggctccagtcaaggttccttggtctcattcataaggaaagacattactcttgaaggtttgatttactgagctattcgtaacaatcatagtgtactgtcatataccttgaattgaaacttttccttacttttctcaatttgaatagagtaatgaaagaataaatatactgtttcggatgatgctcctaaacctgtagtgatgctaattttaaaatttatttattaaaatgtgggccacatcakttgaataaracatgattttgccctcatgcaatttagtctggttcacagaaaaagttacaacaaatgatctgttaagaaggttctaatatagtcccggtgcggtggctcacgcctgtcatcccagcactttgggaggctgaggcagatggatcgcttgaggtcaggaattcaaaatcagcctgaccaatatggcgaaaccctttctctactaaaaaaatagaaaagttagccagatatagtggtgtgcaactgtaatcccagctactcgggaggctgaggcaggagatcacttgaacctagaaggcggaggttgcagtgagccaagatcacaccgcacgttagcctgggtgacagagtgatacttcatctcaaaaaagagggagtagttcttttttttttttttctgtgtctaagattttatttttattttatttttattttttatttttatttattatactttaagttctagggtgtatgtgyacaacgtgcaggtttgttacatatgtatacatgtgccatgttggtgtgctgcacccgttaacttgtaatttacattaggtgtatctcctaatgctatccctcccctctccccccatcccacaacaggccccggtgtgtgatgttgcccaccttgtgtccaggtgttctcattgttcagttcccacctatgagtgagaacatgcggtgtttggttttctgtccttgcaatagtttgctcagaatgatggtttccagcttcatccatgttcctacaaaggacaagaaaaaaaaggcagttctagtataaaatatttagaacctggcttgagtgagtcctttagttatttttgtgtaagaattgtggctaagtatatgatttatagacaaggaatagattttttccttatgccatactgttggcataaagcatccactagtctatcttcaggtgtgtattttacaagaagtcttgtagcacatttgcctttacagaatgatctctcaccactccattttgtttatgacctcagtggtcgtaagaggtatatgtggggggttaataaatgggggaactgaagcatgaagaattaagcatgtttgctcaaaatcatacttgtagttttctaggaagccagaaataaaaatcaggactcatgagccttttcctttagcgaagttctagataaattccagagttcagcagtttgcttaatgtattggtttcctattgcttataacatcaccccaaacttactagcttaaaacaaacacacttattagctcatagttctgttggtcagaagtttggcatggattgtgtatctgggatctcagaatatcacaaggctgaaatcaaaatgtcaggctgggctaagttctcacctggaggctctgggggaaaatctgcctccaggttcattcaaattgtttgccaaattcagttccttgcagttatagggctgaggttcctatttctttgctgtctgtcaccggggaactgttctcagtacccagaggctgcctataatctgccttttggccccctccaccttcatgccagaaatggcatcctgaatccttgtgtctctgacctctagatttaaagggttcatgggattgggtcaggcccacttggatgattcccctttcttaaaagtcagttgtgcctgagccaggcatggtgctatatgcctgtaggccccactacttgggaggctgaggcaggaggattgctggagctcaggagttcaaggccagcctggcaacatagtgagaccttgtctcaaaaacaaacaaacaaacaaaaaaacatagaccaaaaaaaaagtcaattttgcctaaaatgtaatctaatcacaggaatgatatcctatcatattcacagtcctgatgattatacagggtgtgtacatcaggctagcaatcttgggggacatcttagacttccacctatcacattaaacatgttcctcacactaaattagcccatgagcaagggtggatgtcagaaaagagagaagtaggagtgtataccgagggagttagtgaattgtgttgtgattatacatataagaaaacctggctgggcatgatggcaggtgccttgtaatcccagctactcaggaggctgaggcaggagaatcacttgaacccaggaggtggaggttgcagtgagccaagaacacaaaaacctttgtagttcccagggatcctgggcctcctagaatcgtcagagtgtaaggaccaagtggcattcagctgtgctgttctggtggtagtccatttagccaagaactcaaatataattgtagttgtctattacaacttagccttaacaaaatctttagaaagtaatgaaatacaggcttacagtgtgggtttatatttcccgtgtgctggccacatggttcttgcaattaccgtccatgattaactgtccatgtgaagcacagaagtaggaattagaaacactttttgctatgtagaatgtactctgtgttcagagtaatgtttagtcatactctctttttagatccctgctaacctctctgctgctaagaactacccaattaccttttgcttggctacatgagcatcctgtgccaagagaccatgcttagttgtctgagtattctctgggccctttttctgattaaagtgaaaagttaaagattcagagaatcaagtagaggtgaatcagtctcttggatgagttttcttgtgtcctgaatttacaatagattgaattctgttactaagcaaacagagggagcctctgtgcagaagactgccattggaccgtttttaaaaagctgaagtattaatacacacaaccaccaccactgcaagaacaaatccagatatgcaaaataagttttaaacttcatttatgttttctgataataattaatcagggtgtttcaaactcattaagttattaattagcttgaccttacagggaataaataccttggggtcttttgacttttttkttgttgttgttgttataaactataaagtatctaggaagtttctaatttcctgtagatggtaaccaaaagatttatcttaccacatattacattaggatgtggtaactgaatcagaacttgaattactctctggaaggggagtaaagggacagcttttaatttttatgttgatggatggtcttagtgcagagaagaacccagccaaatatatttatatttgatgctgttatttttgatgtactgtacctttgagcaatttgtattgatttaagtaagatttgatagcactgagaatcttttggagaagagaagctcattttaatacatgcaattctattaaattattttcctgtaccagctaatgacctttagacatttatctagtcatctaattctattgcataaaaactcctatagaataaatgtttttctgcccctttaaaaatattttgttttcattaataattatttgcatataaatgaaatagataaaacttaagaaacaaaaatctaacatgtgtataaaagttggcattgccactgttagatggagtcttccaggcagagaaaaactgaataccatctcagagtcatagcccagcttcagattctgtgagtgtttacgagtgcacctagattttaaggacatcacttggccaggacataagtaaggcctgggaaacagggttcaccacagttgagcatctggcaggcctgcagtgagggccaagtactagacattcaacaggaataaggttgagggagtacactgctctgtattttctgcttctgagcttaccatatgcaacctctgggtctcctgaataagtcaaagcgggaaagttctgtggtgtgggaatgagtatccttgacagtccaggtagtagagcagagaaggaaagaaaaaaactgttaacatatggtccagacaggccaaccatctgggtcagattcacccaggtgttgtgaattttaaaagccagaacaaaagcagatgatggtgatgacaggcttcaagggtctggctcaagtctcattgctcccttttagctggtggttctctgtacctggcacatacagtcatcctggaacctttatccccgggatttccttcaatttcctcatgtgttaggtttcatttcctgtatttcaagtcttgcacttttttggtttgcatcctcattttggtggagcatgtcctacagtagcttcctgcggtatatgggaacagattttttaaagcttaaatgtctgaaaatgtctattctaagctgacatttgattgatagtttttgttgggtatagatttgtagtttggaaattatttttcttcagatttttaaaggccttgttccattgccacccagctgttgatattattgttaagaaacccagaactgctctgattcctttgtatatgacctgttttcatcctttctgtggaattttgtaggattttctttgtattcyggtgttttgaaatttcaccattatatgcctttgaataatctatttttgtcctttgtgctagagacttatccttcaatactgggaaattttctttatttccttgataacttgctctctattttatgttttctcctattatttggatattggtcctcccaaactggtcttctaattttcttatctttttgctgtactttttggggaatttccttaattcttccagtccttttattgagttttcatttctgttcttgtattttaaacttctaatgasctctttttcctctgaatgtttgttgtggatattaatgatttttagaacatctttcttcttgttgcatactgtttatttggcaagttgcttcccccagccccgctttctctcatgttaggatctttcctcagatgtctgataatcctgggttgtctactcatgtttaagaatgagggattacaaagcagattggaaactctaggtgcgtgggtaggatttgaaagctggttgctttgctgtaggacagcrccatccaatagaaatctaatgtgaatcacattgtaagtttagattttctagttttagaaacgtgaaattaatatatctaaaatattacttcaatatgaatgaaatataaaaattattaatgaaatattttacttttttatattgttatgaattgcagtgtttattttacatttacagacatctcaactgagacgctaaatttttatttatttatttatttatttattttgagattgtcttgctctgttgtcagcaatgtgatctcagcttgctgcaacctctgggggctcagctgatcctcccacctcagcctcctgagtaggtgggactacaggcaagcgctacaatgcctggctaattattattactttttttttttgagacagagtcttgctctgtcacccaggctggagtgcagtggtgcgatctcggctcactgcaacctctgcctcccgggttcaagtgattctcctgcctcagcctcccgagtagctggcactacagacgcgtgccaccacgcccggctaattttttgtatttattttttagtagagacgagtttcactgtgttagccaggatggtctcgatctcctgacctcgcaatccacctgcctcagcctcccaaagtgctgggattacaggcgtgagccaccgcggctggcccatgcctggctgatttttaaatatttttgtagaggcaggttttgccatgttgcccaggctggtctccaactcctgggcccaagccatctacctgcctcagcctcccaaagtgccgggattacagatgtgagccaccacagccagtccctaaaaatttttttaagccttttttttgaagagcagttttagggtcacagcaaaattgagatgaaggtatagagatttccaatatatcgctgcccacacacgtgcatggtgtatcaatccgttctcacactgctatgaagaaatacctgagactgggtaatttayaaaggaaagaggtttaattgactcacagttctgcattgctgggaaggcctcaggaaacttacaatcatgatggaaggcaaaggagaagcaggcaccttctgctttgccttctaagggtggcaggacagagtgagtgcaagcgggggaaatgccagatgcttacaaaaccataagatttcatgagactcacttgatatcatgagaacagcataggggagactgtccccatgatcctattacctccacctggtcccgcccttgacatatggggattatggggattacatttcaaggtgagatttgggtggggacacagagccaaaccatatcgcatggcctcccccattgtcaacatcccccactagcgtggtacatttgttgcaattggtgagcctgcattaacacatcagcatcacccagtccatagtttacattagggttcactcttagtgttgtacaatccatgaatgacatatatccatcactatagtatcatacagagtatttttcactgccctaaaaaccctctgtgctctatttattcataacctgcctaccctacctgcctcccccaacccttggcaaccacagttctctttactttttccatagttttgccttttctagaatgtcatatagttgggtacatataatatgtagccttttccttttttctttctttttttttttttttgagatggagtttcgctcttgtcgcccaggctggagtgcaatggcgtgatctcggctcacagcaacctctgcttcccggtttcaagtgattctcctgcctcagcctcccaagtagctgggattacaggcayccgccaccatgcccagctaatttttgtattgttattagagaagagatttcacaacgttggccaggctggtctcaaactcctgacctcagggaatccacctgcctcagcctcccaaagtgctgggattacaggcatgagccaccgcacctggccgccttttcctttttttgagactgggtcttgctccgtcacccaggctggagtgcagtggctcgatcttggctcactgcaacctctgcctcccaggttcaagcgattctcatacctcagcctcccaagtagctgggattacaggcacccaccaccatgctgrgctaatttttgtatttttagtagaggcggtgttttcaccatgttggccagtctggcctcaacmtcctggtmtcaagtaacccacccgtctcagcctcccagagtgccrtgtttacaggtgtgagctaccgcgcccggccatatgtagccttttcagttcagcttctttcttttagcagtatgcccttaagattagcactaagacaacagataatgttctgttgtctgaatgtgccatggtttagttacctgttcacctactaaaggatgtctttgttgctttcaagttttggcaattatgaataaagctgctgtaaacatttctctgcaggtttttggtgtggacatacgttttcacttcctttggataaataaataccaaggagcatgattgctggatcttatgttagtgtatgtttagttttataagaaactgtgaaactcttcgaaagtggttgtaccattttacattcccaccagccatgaattgaaagttcttgctcggctgggtgcggtggctcacgcctataaatcccagcactttgggaggccgaggtgggcagatcgcttgaggtcaggagttccagaccagcctggccaacatggtgaaaccccatrctaaaaatacaaaaattagccacgtgtggtggcatgcgcctgtaatcccagctactcgggaggcttgaacctggaagaaggttgcagtgagctgagatcatgccactgcactccagccttggtgacagagcaagactccatctcaaaaagaaaaaaagaaaagaaagttcttgctccacatctttgcaagcatttggcatcatccgtgttgtggattttggctattctagtaggtatgtagtggtatcttattttaatttacacttacctgatgacatatgatgttgagcttctttcgtaagtttatttgccatttaaattttgttaaataaaatgtaataaattcctcctcacttacactagccaccttagtagtgctgtacaattatatgtgcctagtggtacatgttggacaatggagctctgaagtgatctacttggactatgtcacaagctttaagttgattccccagagaagacacttccaaccttctgtctcaaggggaaaggccaggctgctggggctctaagagactagagggggaaaagtgctgagtgtctcagtatatactatgcctaggtttacttttctttttagtatagggaccctggcatcctccaatccagagaccctccgttttaccctcttctgagaacaaacttccagacctctgctggaagaagggagggtagtttcccaatggcatggttgaggggtggggtatgatctagggatctaactgcttcttaaacagcttccaaccagtcttatttttagcctccccctcctttaactcccatttccataggtatctggtgccaattattcctaagccttttgaggatccttaaagtgtaatgggttggttattgctctttccggtttaggactcagctttctgtaatgtgttggatttaatacctctagttcttctagtcccagtcttcaaaatttgcagttgctcttttgttcttcccaaccttgtaggctctttccttgcatcacttcttactttctaaaaaacaccttttctgtaggtttagtgaggtttcaagaaggagagaaattagatgttttggttcagtctgacatcttttacctsaaagttcctattaatctggattcctaagccagatttggatatttwaaaaaaattcattctgtatttatgcttccttcagtatctatatttgtagttaaaggtataagtgctaatgtttagtggaggactcaatagaagggccaggaagtgagatatttaccacagccagcctaggacagtaagggtttggtttgggaccagaagagaattgmcagcaamcaaggagaatgatgaaagtggatgcatttagatgtaggtaggatgattagagacttaattttaagaatcttggatatctgagacctaatacataaataaagctccagtarcatttatctccctggactcctgtgtttttgttgttgttgttgttgttgttgttgttgttgttaacttgtcatgatctaggaacttattctatatttcagagaatacacacaactaatgatacaattaaaaaatgactactgaacaaagctgtttgccaacatagaatctgtaagaacacacatagtattaactaagtaaacaatacactctgaatatactgtagcagcaggtttctattttaataattgagcttgctgttygagtgttgtattggattctaaaacygttttgcttgtactgactgggctgtgattcactttgctggttgttgctgccctctgttggactagctcaggaaatgcagctttttttccctcgtggatcatgtttgctgtccttccccaaattgaacactaaaacatgggtaattttttttaaattttctttctttctttttttttttttttgatacagagtctcgctctgtcacccagactggagtgcagtggtgcgatctcggctcactgcaacctccgcctcccgggttcaagtgattctcctgcctcggcctcctgagtagctaggattacaggcaggcgccaccacacccgtctaatttttgtatttttagtagtgatggggtttcaccatgttggtcaggctggtctcaaactcctgatctcgtgatccacccgactcggcctcccaaagtgctgggattacaggcgtgaggcactgtgcctggcagataatttttttttaagataaaatctgtttctgatgatgccctaggaaagcaagggaaactggcatcttccttcatatatatatatatatccccatctcccttccttccttttccatctaaaggcgagagttagtggatattgaataggaaaaaggcacaagaatttggggaatgcaaagatttggcagctttggagtctggatgcctgagttctgtatccaactcatcccctaatcatatgacctcagtaatttacttcacctggctgggcttcagtctcttcattgatataatgaagaggtgtaatagacttggagagtttctccagggattgatattttagggaagcaagcctagattatagtatttgttcataggagatataatgacttaagttacaggctctgccatcaagtaacttagtctggaaatgggtagaggaaacagacaatcagaagacaattgtaatccatttttagtgctgtgagacaggcaagtgccttttactatggaaacacaaggaaaggtacatatccatttagaggagggatcattctgtagggcctgttggagttgtgaaagcacaatctaggctgaggaggcagcagcctagggcaagtctggggcattgaggcagcgtcatctgtttggagacgaagatggagtctgaggtggagagtttgctgagaagatgagactggggggaaaagccaggagagtcatatgccatgcacaggaattttgattttaacatagggcagcggagagttattgaaggcttttcaatggagaaataacatggacagcttggcattttagaaagatttcctcttggatatagtatggagaatggatgtggtatggggcagatgggactgaaggcagggagatcagttaggaggctgttggagtaaatcaaacaggagacaataatggtgtgaacttaggtagtgctagtagacatggatggaagagagacgaatcaagagtctgtaggcagaaagaacaggttgctggttaccccccaccctttttttttttttaaacttaagcttcagctgtgaacaattcagctgccattaattctttagacgcaggttctgttatctacattacatctatcttagagttgtttgcttgttgcttggttctgagggaactctttgagtttgggggacaagattttggaagcaatgactctgggagcaaataagtttaaccttggctacggtaacccaaattgtatgcactcatcccttttgtgcttgtttcaccttctatatgccaagggacttagggtggtgacaaaaggaactatgttgttggttgtcttgggtggtgctttctgcttcatcatccttctgctttgcttctattacataatcagaacacatgaagtaactaaattccgtggaccctttctcatggcaagattctcatggtttgggtgagtgattagccctcagccagtggactcttgacctattctggacaatggaggtcaaagtttgtttgcttgtttgttttattttatttcaaaagcaccaggttggtgaaaaatggacaaagtatacattcacagtttacactggattgaactgaattgtgttatatggggaacgtgaacataataatgtagatttttcttgtccatgaaagaggaaaaatagctttgtggcagaaatggaaccagtttttcattagttggggaaggttattcaagaagcatttaccaactgggtacggtggtatgcacctgcaatcccagctactcaggaggcggaggcgggcagatcacttgagcccaggggttcgagaccagcctgggcaacacagggagaccccgtctctttaaaaaaaaaaaaagatttactatactcgtctaaggacattaatgaaaaagaaatattgtttaaaattaggcaggatgaagaaaaattcacactttcccagacttgctcattcagacttttttgggggggcaggaggggtaaagtataacatgtatacagaagagaatgtaaaacatacagaataattataaactggacagtcatatgatccatgtcaagatacagaatatcataaacaccccagaagctgctttgtccccttccccaatcacgaccccaccccacccaccccaagtaaccactgttttgacatttatggtgattatttcctttatataataattttacataccaaataatacagtgttacatgtttttgaactgaatgtaaatgaaataataattcaatattatatttatgaatagctgtaagttcattcactttctttgtgaaattgctttccttgtaccaatataccagtttatttgtccacgctactcttttagttcacatctttcattaactcatacacaattatttgtcttctggtttgttgaagcaataaatcagacaacttttgtcacaataatatctgtcagagtggccagccggccataaacactgtaacactacatccatctgaagggcactcccaacgaaggtggctacttttgccattctcattggccttatgggatttcaggacagccagcttcaccttctttctcatgcttattcttcttgggagtagtgtaaaacttctttttcttagccccaccacaaagtctcaagatgaagagtggactccttttgaatgctgtagtcagacaaagcacatctaccttctagttgcttgccagcaaagatcagtctttattggtcaggaggaattcctttcttatcctggatgttggcctttatattttctgttttatccaaggattcaacctcaagagtgatggcctcccccataaggatttttatgaaaatttgtgttttggtggtggttccaatatatccagatggcggatcagaaaacccgttctactcttgatggccatttgcattgttttctgttttacatgtcatagtgttactatgaacactcttggtatacacattccactacgtatatgcaaaattcagcagggtagataacatagaaattgatgtgttgcgttgtagtacatgtgcatattttaactttactggacaatgccttactgttttccaaagtggctatagcattctatagtaccaccaagagttcctgttggtctgtgactagacggacatgaaagttttttccagtcttgggagtgtgaattgatatctcactgtggttttaatttgcattgcctcatttactatgaagttgagcatatcttataagtgtatcggtcatcagattcggattctgttcagttctgcatcatcttctttttttttttttttttcctttttaagagtcatatgttagtgaccttcaaactcttcctgccccttacttgagggaatgtgctaaggaatactttgacagaaatcattagcttgcagaaagtagcttggatcctttcaacttctctccctcttttccccaacccgtctggtgtttgggaggtttccttgtacttcactgatttctcttctttcttctccctcctttttcctgtttcctagactctgaagcggctcatggcagatgaggtaaggacattttgtttagcatgtgcatgttctagctcattgcctacactatcatatttaccagttttcataactttgactttctgtaacttatagtggtgatatggcttctactcagtatctcaaggcttttttcctaactctttgctgtgtttggcccattgcatgcatttccgtggaccttcattatcttccgaagttaggcatgctctttaaactcaaagctgacttgcagtctgaatgccactcatatcacttgaagccctataatacttacagataattactgttattttcaaacaaggagagctgataagctgttgcttattggtgactcttgttgatttgagcatcagtatttgagatttgaggaatggcttgttagcatttgtttggcagagagatggcatatatacccctgaggtacattgtattctttgctgacgagatgtcatgcaaaggggattttgaagaatatatattgaacttttgctgcctacattacacaagtgctttggagtgtacaaattaaagagaaaggaatgaatcctgactttaaggacaaatttatcctatttggcttgtatctattaaaatctgtagtaatacctcttgaagggagacatcctctggggtcctagcaacatttattgttgggtagctagaaggaaacaaagggcattttattgatagaactctgtcatgagaggctttcagttccgtactactacaaggcttagaaatggcaggggagatcaagaacaatgtttcttctagtttaaagaggtttgaaatcttaatactttggtcctcttatctttgaacatagatgagagtacagagtcagtatggtaagttagataggaggaagactgatttcttcttttcatgtcagaagagtcttgaactgcttgtgaaccagaggaaccatgcctgygtaagaggttaaaggggtaaagaatttgatgtgtggcttgttatgtaagtgaaaatggatcactgctaatgcttttttctgtttctcagctggagagatttaccagcatgagaattaagaaggagaaggaaaagcccaattctgctcatagaaattcttctgcatcatatggggatgatcccacagcacagtcattgcaagatgtttcagatgaacaagtgctggttctctttgaacagatgctggtaagtttcccattcccaaaatgttgcttcttcctgtgcatttatggacatggtgggctctttttggtgcataattcccarctagccctttattacaaagaattccaggcttaacatggaactttttaatattaaccctttaatcccataattagggactaaatatacaaataccagttcataaaattggaatctgtgcttggaaacatccgatcactgtcttgttcatggtcttctgcccagcaacactttagccacaaagacgtagtggaccatctaaccctgtgtaccagagttggtaatatggagaccacctttgggttaagccagagcagataaagtgtggaggtattcacaacaaactctgtataaaggagaaactgaggatggaatatcatttgctcaaggtcctgtatagtggtgaatctggaaagaaaatacatagaattgctagaagacctttaaagattgtgtctgaagtcagctaagtaacaaagtatatgtgcatgtgacttactttgttgtcctcagtgaggaacaccgaataaggaggatattcagtgagtgtccattagtggtaagtcttggaaagttttgatgagtacaagatttcctaagacctgtatattgcatagatatgtgatctcagattcaaatagagactagtggcaggcctagcttaattaaaagcttaggtttaaaatccttagcacagggcctggtacatagtaagcactcaactggtactactgttgttatttttcactgaatctttcagtttgtctcttaatattccaagtgcattaagagtcttaagagtatggtctgtcaagataatctcttggccttggattgcaagtttaaatgtctcttgggccaggcaggtagtataaataaggtaagcaggctagatagaagatggcaaaagaagtggggaatgtggcaaattgaagagaggcttttggcatttttgttagaaaagccagccacaactcagttctagtaggtggttgcattccagttgggaatacttgcctagtagtgccagatatttctatttttcaaaagaagtcagcaatcygtaattttaaaaaaataataaatcttgaataacataaaatatcctagtcactatttgaatwtccccaattaggtcatttttttaaaaaccagtttgttcaaatcacaattccaaatatagtccactgtactggtattctcaattttcatttaaactataggtttcccttcctcttttttttgagatggagtattgctctgtcgcaagcagagcaagacttgcaacctccgtcttctgggttcgagcagttctcctgcctcagcctcctgagtagctgggattacaggtggacaccaccatgcccggctaatttttgtagcttgagtagagatagggtttcatcatgttggccaggctagtctcgaacccctgaccttgtgatccacccacctcagcctcccaaagtgctgggattacgggcatgagccactgcacctctttttcttttatccttactattgatactaaaaaaaaattgttgaaaaaaccgtttgtttgacctgtagagtttcccacaacatgaaattcgatggatgaatcctttggtgctgttttactagagatctgtatctttatgtaaggtcccccagatttaaaatgttgagctagccaagtgaaacattttatctttgggtttgacttagcttgagggccaccattttgtaacttctgtgttcagttwatctgcaagaggaaaaatgcatctggctggcagtggtggctcacacctgtaatcccagcactttgggaggccgaggtgggtggatcacgaggtcagcagttcaagaccagcctggccaagatggtgaaaccccgtctctactaaaaatacaaaaattagctgagtgtggtggcgggcgcctgtaatcccagctactgccaggaggctgaggcaggagaatcacttgaatctgggaggtggaggttgcagtgagccaagattgtgccattgcactccagcctgggtgacagagtgagactccgtctcaaaaaaaaaaaacccaccaggaattaagtcacagaaacttcagattaattttgctgcttgcagaagaaacagaatacatccccccatccatatttttctcaattcaaataacattctggaattatyagggctaaatttgtgcacaccaaggtactaggcttggacacatggttgttatatatgtagaaagatcaagcagagcctttccccaaacatacatcagattatgtctgtcagggggcctctgctttatcatagagtttccagttctttcttcgtgggaaaggagtttgtacagggactgagttaaccaggggtaatgggtttgtaggccctagagttggtgcagagtttgttgctgttgattttgcttgtgtttagattatgccattcatccagtgcttcagtctgaagagatttttaaggtccatccttgatgcagaaagcattgtgtgtggttttctttcaataatacaaaataaatctttcatttatattgagtccatttttcttagagaaaaaaagtgtgtatatgtctatagagatttatactaaaatgttaactatacttatctttgaggaattttcatcagctgtaatagcttaaatttctagggatcaaaaagatttatttacttaagcattttacatgctcaactcttcactaagcatactaatattaaacactaaaaatttgtaaagaatttgaggcaattttgttttttctcttttttctccctctcctagctggatatgaacctgaatgaggagaaacagcaacctttgagggagaaggacatcatcatcaagagggagatggtgtcccaatacttgtayacctccaaggctgtgagtcctgggacaggtacccatgacatgggagactgtgcccttgtcttggacctgttttttttttgccaattttatgtaacattttatgtctgcatcarttctgtttcattccattatataagcctgttcactttttactgtcttatttagttaccgttcttacatacattttgcctggttaaattttcatgaagtatgtaaatatagggaatgggataggcagttctaagtctcatttatgttggtggtatgtgagatgggtatctgccctgataaacgtggcctgacatggtggcttactcctgtaatctgagcactttgggaggctgaggcagaaggatcacttgagcccaggagtttgaaatcagcctgggcaacgtagtaagaccttgtctctgctaaaaataaaaaataaaaataaagtataaactctattgactaatactagtccttaatttatgactgggtccaccattactaatctctgtctatgccttctgtctagggcatgagccagaaggagagctctaagtctgccatgatgtatattcaggagttgaggtcaggcttgcgggatatgcctctgctcagctgcctggagtcccttcgtgtgtctctcaacaacaaccctgtcaggtgaggattctgaggaggtaacaggagtaggagccaaatgttggacttcactggtggtgattgaagatcaaaggagccagggaagcatgagaatagtctgaattgggagtagtaagttgtcaggataaactttgtttggcaaataagtatttattggtttgatattgcattgcctctctctgttccttacagttgggtgcaaacatttggtgctgaaggcttggcctccttattggacattcttaaacgacttcatgatgagaaagaagagactgctgggtgaggacttccaagtctttgcaacttcaagttggagagtcacaggggacttggctatttgctctgaaggagaaagtagcagttaaatgtaaagttgtgggctaggggaatgtactgttagccaagaaggggtttatcrtagtggtggctagaggatgaatgatgattrtagatayaggaaagggaggaggaacttaaatttcatgttggataagttcaatacataccacagaatattagtctcccagcactggttctttttcaatctggaaataaaatctgatttagtgctgctgtgtaatctggtctgggtaatatccatttggaagtcttataatatacttgggactagtattgtgacagtcttcaaggttggaataattttaggtataccttggactctcttaggctaccttgaagccaacctgaagcagagtacttcctggaatctttctgaaacaaaataataacatggccaagacctacatatatcttctcagacttgaaacctctagtagcaaggcaagcagcaatagatgggatgttatcctgatagaatttagcatttaggagcctagggagagttaaaaagaagattttaatataatactaaattcttggattacaagaggatcagccagatttgttgatggtgaagatccctcttcagttatctattttcttcagtggttctgggcaaggtgctatttcctaaaatttactcatctgctagatggggctgttgttcctaagaaccttgtttgcaagattaaaaatgggaaaggggtagagaataaagggacctcactgaytatgtcttctatatacaggagttacgatagccggaacaagcatgagatcattcgctgcttgaaagcttttatgaacaacaaggtgagatttttcccattctcattccaaaccccatctggacgcctgttctttctcttctattggcaaaccaaaagaggaactaggaatatgaggttcaggacttctagctttctcttttagtatcataactgtttttcattgccacatatacatgcttctgtggatatttttttctcagttctaacttctgtttcagaggacaggctcaattttgtttctctctcttttttttttttttttttttttttttttgagatggagtctcgctctgttgcccaggctggagtgctgtggctcgatctcggctcactgcaagctccacatcctggattcatgccattctcctgcctcagcctcccgagtagctgggactacaggcacccgccaccacgcccgggtattttttttaatttttatttttagtagagacggggttttaccatgttagccaggacggtctcgatctcctgaccttgtgatccacccgccttggcctcccaaagtgctgggattacaggcatgagccacagcgcccggcctgtttctttactttcttttgctaattcttgaatttcctgacctgtagttattgtctctgcaatatttgctttatttcctgtttcttttttcttctagactgttgctccatttttatcttctttttgtctgtttagtaattcaacctagtgagcccacagtcctgtgcctctgaggacaaatctctcttcctcattgtttaattttgttataattaacttattccattggattgcggggagagaattaacaagaaacatataaatcaaagacttttattcttggaagacatctaattctgttgtgcctcctagaaaattattttggtatgttcatctctaattatattgggaaaagtattctacccctgtattaatttgctagtgtaccacaaaattagatatcttaacagaaatttattatctcacaattctagaggctagaatttcaaaatccaaggtaccagcacggttggttctttctgaagctgtatatggtaatatgttccatatccctcctagtttctggtagcttgttggcaatccttggcactccttatcttgtagatgcatcatcctgatctckgcctatgtgatcacatggtgttctccctctgtatgtatccatatccaaatttcctctttttataaggacactggtcatattggattaaggaccctttctaccccagcaggacttcattgtagcttgactaattatatttgcaatgagtatatttccagatgaggttacattttgaggtactgggggttgggacttcaacactggaatttaagaggacaccattcaacccataacaacccgtaaacttgtcccccagttagatgctttcgtctttcagcctcctttctttgttcttggtcctaccagtttggaatcaagaccatgttggagacagaagaaggaatcctactgctggtcagagccatggatcctgctgttcccaacatgatgattgatgcagctaagctgctttctgctctttgtattctaccgcagccagaggacatgtatgtgactggaataatttttcttctccattttcaattttatcattttctcttagttcagaggacaattgagttggttgggtgtcctctcggtcataaatactaggtaagattgtgtttcttcccagaagtgaacactaagcatcttaaaatttaagaacaattcctaagtgatgggtgctatcctgaatgttccactggtcatcagaggtatagcaaaatgtctcctatatctccattaatatctgtattgtctaggatgagggtttctttttactattctttttttttttaattcagaagtggcacaatgttatttttaaaactcaaacgatatagaagtatataaagtaaaatttaactgcctcatccctttgccaaatcctattctgcaaagagaatgactgttaatggcatggtatagtctcatagaacgtttcctaagcatagacaaacatattgcgttcccttgattctagacatctgccaccgcaaaagatagtatcttaagagctgaggaatgacacttatgcctataaaactaactgcatatataggatagatttttattattgaagagggatttggtttaaccaaagctaaatcattcttttcaacctgtttctttttaatagtagatcttggacatttcttctatgtcggtacttacagatctaccttattatctttagtagctatttagtattccatatacatgtatgtatggcctataatttatttaacaattcccctgttgctggacttacagattttttttttttccttttttttttttgagacggaggctcgctctgttccccaggctggagtgcagtggcgcgatctcggcccactgcaaactcctcctcccaggttcaagcgattctccttcctcagcctcccgagtagctgggactacaggagtccgccaccacgcctggctaatttttgtatttttagtagagatggggtttctccctattggccaggctggtctcgaactcctgaccttgtgatccgcccgcctcggcctcccaaagtgctaggattacaagcgtgagccactgcgcccagccaacttacagatattttttaaagcagatttcactatctgttctaggtgatcatttttacaaatgatactgcagtgaacatccttgtgcatatcttctttcacatttatgcccatatgttggatacatttctagaagtagactatatgttacatgcatgagaaattgattagtactgttaaatgcccctccaaaagttgtatcaatttatacttcattgaataggggacttgatttggtatttatggacaggagcctagggatggattgtagggaatgcatttccctgaagagatggtccttagctttcagcagtttctggaaactgagtggtgagaataataatgtgagaaatccggaacactgataatgtcctgtttcctaatcggtctgtgcccctgtgtaatttactcattatacgtgtccgtgtcacagtacctggaaagttctctccgtttcctttctcttgggcaggaatgaaagggttttggaggcaatgacagaaagagctgagatggatgaagtggaacgtttccagccgctgctggatggattaaaaagtggaaccactattgcactgaaggcatgtatatcccctgaaactgggcccaagaatagaattcaagatggacagacttaaattcatttgaccttttaataaaatacatggagtgcctcccaactatatattttacatttcagaatctgttatgaagggaaaatgattaaccttctttctaagaaggtaaagaatgaactgttttcctcattatgagatggaaaaaggcatgatatctatttacaatctaggaaaaccaagacctacaataacatatactctcaaatccttgaaaccatttagagtttaggctctccggatctgtactcaaaccaggtctcattgctatagtagaaaagtcatctttagagtttttgtattgtatctttcaggttgtattggggacctaagaatgcatgtaaagaaaatggattcttgatctccaggagttagcattgacatagctgctgaattttcttattttaggttggatgcctacagctgatcaatgctctcatcacaccagcggaggaacttgacttccgagttcacatcagaagtgaactgatgcgtttggggctacatcaggtgttgcaggtaagatattacacttcattagaaaggctagactggttccttcttgctctacagccccaataatcccggggataattctggttttcaattaaaaaccaggttgaaaagcttaggtttctaaccacagaggatacttttgggttccctgacttctacttttgttgttgacaggaccttcgagagattgaaaatgaagatatgagagtgcaactaaatgtgtttgatgaacaaggggaagaggattcctatgacctgaagggacggctggatgacattcgcatggagatggaatatccttttgctgactaggttcaaggcagatgagacattcattgtatttagttccctgatccctgtgtggaatggtttgggagatgatgactcagaacagagcatcaggcttatgtgtcttctcattaaataaggcaggtgtatttttattgcgctggctttacttagcttatcatagatcagggaagtcagtaaaggtgatctgagggttgttgagcatggaagccatcaaaatcagtgtaaacttcctagaatgtgatagcttagcttactaagatgtagaactggcttttagagatgtttggactgacagagggagtaattkagttacctgttaatattttcagtaagtgactttgaggcagttacctcttattttctgtctactgcctgatcttcaagccaagtacttactaggaatcctctgtgtgtatagtaccacccaattcactggtcccttaaaggacgttttagaaagcttaaagtttctggtgatgtttacaggaagaacagccagtagaatggaagtggtgtcttgctacttttccctagctttttcaagagttaaataagccacctgtcaaacataatttctgcatatttgctttccttagcctatttcccttttccactgactttaatgaagtctttcagattctcttaaacacagtgaaggattcaaaggcagagccacacttcctttccatcctgcagcacttactcttggtccgaaatgactatgaggccaggtaagatgctgtgcttatgagaagttttgaatttgagcctaagtggagagagtgaattccttaaattcaaagaytgttctgtaaaaggaaaatgtaaagacaaagacccaagattagggttcattagtcaccgatataaaggaagttgtcttatttctttaatccaactcaaaggcatccctatggcagaggtcagagtgtataaggtgaaatgccgttctgtttttggaggggagtaggtaaayaggatgaagatgttagcaaacagaagtggcaatttaaaattctttctagtttcctggaagtatagatttagcaatagcactatccatcacaggaaggatcaaacgcaaatttttagatgggaaagtattggcactaggagcggatggcaagaagttttgattatttgaagtagatagggtagggtagctgatgtggaaaaaggagttttcttagcatggcagcaatacttgtgttaactttacaaaagtttttccaggtctctcagttgtcagagcaattacgttttcttggtcctgaatacttctgaaaattatattttgattttcctttgatgaccctgtttttattctcttgtagacctcagtactataagttgattgaagaatgtatttcccagatagttctgcacaagaacggggctgatcctgacttcaagtgccggcacctccagattgagattgagggattaattggtaagcatactcttctatctggctcctccaagtattgcttcttcctttcattttgcatcttgtttcagtgaaaatgtcagagaagatacctttccagtccccagatagttctatttttgtcctttcttaggtcataaccagcatctttgctaggaatctataggtctttagtttatttttagataaaacacacaccagcaccttttgcaggaactcctggtggtctcagagagtcaaaaatatcactcataggcattcttcttgccacccagcatggtggccttaccgcacactcagattacatgttgaacttaactgaaagttccatttctttgtctagtgcagaacattaagaaagataataaaaatgatcaaaaagactgttctttggaagggtgtagtgtgaaagaaatagaacaagagaattaggagctttacttactgactcttcttcttttcagatcaaatgattgataagacaaaggtggagaaatctgaagccaaagctgcagagctggaaaagaaggtgcatatgagagaccaaaracatgtgtttgagtatatctttctttgagaattattattttcctgatctatgagacagttttcctctgtggtattttggaagcgtttagcacccaatagtgtagttcccaggggaaacctttccagtatagggtagtcattggagaaagtgatatggatgtcttcatagggagctctagtggtggactttcagttcttgggctactgggcaggaaaagaaagacagatgatactcatgtaatagtaatggcactctcargtttgcttggcattttaggcctcttacccctagaacaataggaactggggtccttagagcaatagaactagaggatgtctgagttctctttttctcttcagtttttaagaacgtttattgtggttaataggtttttgatcctagagaatattgggattgtactaccatggtcgtcctcgttaaatacctttaaaatcttattttttttaactataaaaatagggaatctgtggaaatgaactgattcccctctcctttaaccttgttttattttcatttttatttttatttgttttttttttgagacggagtctcactctgtcatccaggctggagtgcagtggcgcgatctcggctcactgcaacctctgtctcctgggttcaagcagttctcctgcctcagcctcccaagtagctgggattacaggtgcccaccaccatgcccggctaatttttgtatttttggtagaggctaggkttcaccatgttggacaggttggtctcgaacttctgacctcaggtgatccacctgcctcggcctcccgaagtgctgggattacaggygtgagccactccgcccagccaaaccttgattttaaggtcagaatcatggtgcttttttcccccgagcatggcctggatttatgagctctgtaaatcaagtactggcccagaacaggaggcagtggggggattccagcacccccaggcaaaagaggaggtagggagaattatgggtaataatacttgtgcttcttactgagatggagagcttgctgggagcctgattcgttttttctctagttggactcagagttaacagcccgacatgagctacaggtggaaatgaaaaagatggaaagtgactttgagcagaagcttcaagatcttcagggagaaaaagatgcactgcattctgaaaagcagcaaattgccacagagaaacaggacctggaagcagaggtgtcccagctcacaggagaggtaatgcctgagcagggaaggcagaatgacctgtaacctcaggatgcacakggcttggaacaggagtcagtcatctcgctcctagggagggttcagctactaataggtaatctagttacatggtgcatattttaaaaataatatactggtttttggtttgtgttgggggtaagtaatacataagacagaaaatctggaaaatacagaaaaacattaagaataaagtaagtttcattaccacccagaaataaaagtaataagtctcctaataaattaggaataaaaactaaactgttaaaaattgactaatttcctgttattttagtcacctctgcacagatttatccttacacactctctctgcagtagtaaatacttaaatgatctttgatgtctgataacttgattacttatgtggttatataatcatctgtgtagcacatatattagttatataactagaacatttaatttacttgacctttacattttctaatcaagggagggtttaacataaaggttgaaattgtcttcttaatacaaagcatgctgaactaagaacatgaaaacctgaattctagttttggctctgctgccaagccgtgtgactttaggtgatcatgtcatctctctgactcctctcagttcctccatttgtaacatgagaagtttggattaagtagtttattaggttccttccagtcccagtagtccctgaagtggggtgagaagtactcacattgatgttatttctgtaggttgccaagctgacaaaggaactggaagatgccaagaaagaaatggcttccctctctgcggcagctattactgtacctccttctgttcctagtcgtgctcctgttccccctgcccctcctttacctggtgactctggcactattattccaccaccacctgctcctggggatagtaccaytcctcctcctcctcctcctcctcctcctcctccacctcctttgcctgggggtgtttgcatctcctcacccccttctttacctggaggtactgctatctctccaccccctcctttgtctggggatgctaccatccctccaccccctcctttgcctgagggtgttggcatcccttcaccctcttctttgcctggaggtastgccatccccccacctcctcctttgcctgggagtgctagaatccccccaccaccacctcctttgcctgggagtgctggaattccccccccacctcctcccttgcctggagaagcaggaatgccacctcctcctccccctcttcctggtggtcctggaatccctccacctcctccatttcccggaggcmctggcattcctccacctccacccggaatgggtatgcctccacctcccccatttggatttggagttcctgcagccccagttctgccatttggattaacccccaaaaagctttataagccagwrgtgcagctccggaggccaaactggtccaaggtaagagtttctgtctatttcttcaccagtcaatcttttttttttttttttttttttgagacggagtttcgctctgtcgcccaggctggagtgcagtggtgcgatctcggctcactgcaagctccgcctcccgggttcacgccattctcctgcctcagcctcccgtgtagctgggactataggcgcgcgccaccacgcccggctaatttttgtatttttagtagagacgggatttcaccgtgttagccaggatggtctcgatctcctgacctcgtgatccgcccgtctcggcctcccaaagtgctgggattacaggcgtgagccaccgcgcccggcccaccagtcaatcttaagaaacagtttcagttttctactttgtattttgtgcatggatgggctacgccttaaggctttcatctttctatctttaagcttcactcatgcttatgtttattcaggagatattaggcatcttctttattccatacatcaccacggagagttctgtgaacsctgtattctgaatttaatcttaacttaatgttttttgccttttctctgaggctgtgaataccatggtaacacacagtttgataatagtcattcaccagtctgcaaactactgataattgtgctgatcccaaagtcatggatttatgaatccactctcctatcccaattccgcaggatgtgagttacacaggccatttttttttttttttttgagttggagtcttgctctgttgcccaggctggagtgcagtggcataatctctgctcactgcaacctcagcctcctgagtagctaggattacaggcgtgtgccaccatgcctggctaatttttgtatttttagtagagatggggtttcaccatgttggtctggctgctctcgaactcctgaccttgtgatccgcccaccttggcctcccagagtgctgggattacagacgtgagccaccacacctggcctacatrggccatatttgcatgcacagtattgttcccatgatgtgtttgagatgcctgtgattctgagtgagttagcctttttcttctagaaaccaagttaatataaaggaccttagggatttgctcataaaatgagcaaatttggcacagttagccaaactggtgggagaaatttaatgatgagcaagacttctctgaaataaagccttaatggttatgaagctagaggatttggagttaggaggaggatacgtagtatatatatgaatctagttcttgaataatcaccaattaacagatgaactggaagtattctctcctaatcccactgcagctattctgtgcctcaagttagtcttattctagtaagacattgctgataatcagccagccacctattttacagcctcatccgttttctaggacggaaagtacagggctcagtttactaattcttaacaccctgcctttatccacagcttgtggctgaggacctctcccaggactgcttctggacaaaggtgaaggaggaccgctttgagaacaatgaacttttcgccaaacttacccttaccttctctgcccagaccaagagtgagtaccttcctctttgatgcaaaggtccagtgtagggcttagaatattttttcattaggtttcctattcccttcccttccctgggtgaagatagaaagggtatgttggatggaagactgatggattttcccattcaaaagaaagaaaagatgtttttgtattaaatattatggagttacttggtttgggaaagagaactgttgtatgtaggtattttgtatcagtataacttgttagggatatgagattaaagtgacagagcttgatttgggcccattttgatacttttgaacagattctggcactgccttaaggtgcagtttccagttctaagtacataattaataagggttggaaagagtctttaacagtttgggtgactgagtgactgtctacagtaacaagaaccatatgtgattccttttcttccttccatttctttccaatattggatgccttctccctcctggcactttgctcctgaagcttccaaaggtaagaatacaaaagagccttttagtttggtctcttgaatattagagaaaaagatgaaatagatataaaggaatttctcattagaaaactgagaccagagattgagggttgacttgtctttgctaggtgttttttgtttttgtttcctcccctggagttcaaaatgaccaatagctttggcattaactaatagggaggaaagtttgcttcccgttaaactaccacatacttaatctctttagaaggtgagggacaacgtaagcaataatactattaccttacatttgtgctgttttacaattttcatagtgccttaacatatatgaccctatttgatatgcagagaagccttatgagacaggcaggatgtgtatcatctccattctgtagcatatatagactctgaacagttaggtagctttcccaaggttatgtgatcagaaccaggagtcttgacttctggtccattttttctatataaattcttgattttcttttttagccttcatatggttccttttattttacaagagctgatctactttgccctcttctttcttgacttcctaattcttgtggttttgtgctaccttgtgatagggtacttatagttacttcccctgagatagtatttgaaagattgtgtcatgtataatgacaattatagcccaataatttcatatttttatcttcttccagcatttttgtttgtttagaggcttactatgaccctagtgatgaaaattaagtgcaactttggagcatttattttccccacctccccctagtcaattagtatttttaaaggcaattcctttttttttccttaagtgatctgatggaaacaggctgcactttgttctaataaggagtctaacagattgtgaggtgccttggtggcccctagttacatatgtgtgtgtgtgtatctaggagtataagaccataatgctcagatctgtcttgttgccctgtcattcaggtcaaaatggccttttcctctaagaaaattgtcaccttccatgccaaagtccagcctaagggattaattccactctcttaattaaaatactgggatggtaaccacatatactgtattagtctatcaataaagactagttgacaaagtcaaaattaaatgattttctaatttgtaagttcacagaatccctatgttggcctctggcataagtttctttcttgagtctgggctctgcacttttagtgccattgcaaatgaatactgactgggccccttttctccccccacccccatccccatctttttatttggtgcatttgtattcctattaattctagttgggttttatacagtttagtggtcttccttggcattatattctcattatgaattgggatatggtagtattttttaaaataccaaagtggcccccttagtcacaaaaggccaataaaaagaaaactttagtaaaagatctttgtgcttcttatttagagtttaggtttttgtcagataaggaatttcaagctctcaaaaattgcaagcactcagaagacccagatctcctcagtatgacagcaagtatactttacttcagtgctttaaacatctctagtatttatatttcagaaaaagatcttcatccttaactacttttattttttttatttttatttttatttttgagacagagtgttgctctgtcgcccaggctggagtgcactggcgcgatcgtgctcactgcagccttcgcctcccgggttcaagggattctcctgcctcagcctcctgagtagctgggattacaggcacccaccatcatgtccagctaatttttgtatttttgtagagatggagttttaccatgttgggcaggctggtcttgaactcctgacctcaggtgatctgcccaccttggcctcccaaagtgctgggattacaggcatgagccactgtgcccggccatccttactactttttaaaagtaattcttgaatactgaattgaatattgaaccagttcagtttgaatgctgaagccagtgtcagttaccaagtctctcattcatagtcttgatattgatgatataattaaatgatagataactactcattatcaaccttgtaaatatttcatcttccagatgaagtagtgacatagattagataactttttccaaactgtataaaaagtgtcagaattcagactccaaacagtgactccaaagtccttgctctagccttctacttcttaggaagtgtgtatgtacttgccctaagagcctctgaaagcttagatccagacaaaagctgcaagaaaggggatatgccgccttcaggaaccacttcattcattcagacgcaaatgtccttgaattggcagtgactgagtagaaaaaagggaacaataatagattaaaaaaagtaagtgagatactagatatttagggttataaaagagaaggcatattctgactgtattcaactctagcaaaactaatccagttgaagaaataagacatgtttatctagtagaagcactgcttaggtgatttcagtccaggtggttgccagtattgatgaagaagttatttggacactgggttttcatcatattgcattatttcctctcttgcttgctaaacacaactctgctatttgttaagcatgcctgtatcccccttatgttttattgatacctaaaaccttcggtatacctactggcccctccaagaatgggcattgaagaaagcacctgcctcactctgcacatttgcctcctgtagtgaaaagtctcctgttacacatattctgaagcagaatatgtgtgcctttttacaagagaagagctgagagacaggaactggtcctagaatattatactccagattcttttacacattatttctcttttaaggattagtgtcttgtttctgaaggctttgtttcccataaatgaggtatttacttactcagttaacttattccctgccagagaatattttgaatttacttttgataggcagtgccataaaacttctggtcctttttcacattctcactttccttatagtgatcagcaaggagtctttgttgactctttttgaatttcttggaaataggtccaatagttaaatttctttttttttttttttgtttcattttctccaagggagcattttcattgctgtagtagccttaggcagctcattatttgtatgtacaagataaactagtttttcattttccatttcttctcttcgctgtcttttgttgattatgtgatcattacactaccacctcttgaaccatagcatggtgagtgataactcatgtcttaaataaatagtacagtgacttttatttttaggtttattccttccttccagaaacaatatggaacattagacttgttaaagtaagaggtgtgttatgtgaactgtgagcatcagaacagttctccaaatatttaatggcagtaatttagaaaaaactctggctaaaaagaccttcactaagaattgagaattttattaaaaaataacagtattctagttagcatttgactgtgtgggtccagtactgttgttccagaagtcagaactgttagccgtaacagataggtttacctgtctgctgccctgacataattttcttgcttcaggcttcagcaggagcccctttcccaaaaagaatctgagggtctttttctttttccctgtgatatctcttctgtccactaggtggcactcacccagttgcatctttattagtgaatttttgtagcttctgcagctttaacctttagcagcaaggttttgtgagagctcagcctgctctaccttgttcagtgagtctcttagcagaaagatgtctgttccatcagtttcttattccactcaaatcggtaagattaggactagaggtactagtcaagtgaacacttgttgggagtcttaccttttaattacttagcttctcttgggttttgagtagggtcagactactascacaaagaaattgggaagttctataatatcaagataatagtcccttgtgatttaaaaatataaatctatccctattatctggggtttccagaacttcttcacatggaaaaagtaccatacctcctccaggttgtcatctcactgtcactagtgatataaaaaaggaacctaaactgccccctcatatacccctctacaccccaacctttccatcaccattttcttttaatccactggatctaatattatgccatttatcttggtttatgtcacttaccacaggcagccccagactcctgggtcatccttcatctcccatagtttaattgcgataaggttctgtgtggttcctattctgtctcctcccatcccacctaagctcctgaaactggtccactgtaccctctggaattcatggtccattactggcaaaacctttttcactttgctctactggaaacctggttttctctcaataccactttcccttttgcttgcttatgtggttttgttttgttttgttttgttttgttttgttttgttttgtttttgagatggagtcttgctctgttgcccagactggagtgcagtggcaagctctcagttcactgtagcctctgcctcctggtcacaagcaattctcctgcctcagcctccygagtagctgggattacaggtgtgcaccaccacacctggctaatttttgtatttttagtagagacagggtttcaccatgttggccaggctgctctcgaactcctcacctcaggtgatccacccatcttggcctcccaaagtgctgggattacaggcatgagccactaggcccagcccatgtgattgtttttctttgttctcatagacctcaccccagtgggcttggagatggggtagatgtaatctttgttattcattgccactctcagatcattttgcctctttactaaaaggaaacaattcctaaaaaccaacaatttcaaatcttatgacatcgttatgtcacccattttctcttcatgttgtcatctactgacacccgtgttactcctcatttctcaaacaatttagctcttgactcatatccactcttctatactccaatactacctctgacttaattcttaggaatttttatacgaaaaggtcatgatcctaccaatattctggcctttcagttccttgaattcttctactgattttgtcctctatcctacctcaaccattcccccgttctaggatctcatgtcataccacccaggttctatctttttaccttactccctttgctatcctgaccccaacaggcctccagccccgctaatccatttgtcctaccagcatttcactgtccttcactttctgatgacttcactctttccctgagctaaaatttcttggttaatcattataatcattcgcttgggttttgttcttccattatctctctcatttcatactcgattggcaaaaccacaatcccggttaattccttttctgtctttgtcctgctcctgtagctgtgcaactgaacatggctggagaataccacaaaactgggccctcctttgacagactttcttctcttagctttcaggacaggaaacacttacttttcctgctaactcactggctgatctttctcccaactctcctctgcttaatttgtgaagttgcttggcccttgatactgccaggcactcatatttgaagcattacaaattcattgaatttcctgctctcctaaaggttatttcacacctttttttcctcctcaacagcccaaacctccctcatcctcattctcagttggggatgttttctttctacttcactgacaaaattgaagcaatcagaaaaaggaacttctaaagacttccatcattacttttacctagcagaattctgtcttcctctgttaccatggtcctgtctaaagccagttcctggactaatttgttatcatcattttaacaaatatgtagaatacactggaaatacagggtaaaaaggtgtcctcccccagagtgactgtggttaaatcatactttttatatacatatgttattctaataaaggaatgggaaaatccttttcttctttagttcaagtgagaaaggtaaatttttgaataaaactttactggaaaaggggcaagggaattaaaaataaaattacagaaacatgaaggtatacacacttcttttttaatataattggtgtgatcttatacagtatatactgttttgtattttgcttaacgtgttttagcatctcgatgtccttacatatagatttgtgtcattatttctgatagttgtattctgtcatataatacaaataagttttccatttttttattacaagcaatgctgaaggaaacatccatttttaattgtctttgcaaacttgtatttctgcacagtaaattcttaaaaataaaatctgtgggcccaagttgctaggtataagattgtagcaatttatacttccacgaaaaataaaaaaatatttatggtaatgtctagtaggggaaaagtgatatgttgttttagtctgaccactaataagattgcaccaggggttatctttcttaccttgactctatctgtaaagtgagatacatgaacctaaaaggtatctttcagttttaaacttctggttctgttactttttttccttgcaataagctgtctttggtgttatctgtcatgtcaaactcttcttttgtttctgacagccttccaggtccttttgttattttgtttgttttggtctgagtttcattctcttactctatgcaccaaaggtcaggcatcaggagctgctgcttgcttacagccagtgtttaggagtatagagctaaactggggcaaaactttaaaactattgcgcgaaggctgctgatgtagtttccacagaagacttactattggagatttaagggactgcatcatcaggtaaaggaattaagttttaattttcttctcaaccgtgggaatttgatattttatttctagcagtgtgctttactgctttcagccaccagatggcacatggatcccttttattttagatgtgtcattgttgcgtttggtagtgatgtcatcacgttagagagaggcaacctctgtcctttccaaatacaagctgattagtatactgccctctacctgtcaggaaatttatttggaggactgatcagcagttaaattatgcagaaagctacagcttgcccttttacaaaaggatcttgtcctgttgcagctagtattttcaatagtagcaatattcgtgttctttttggggtccagaggctggaaaggtttttgttctttagtctgataccttcatgaaagcatagccttcctttgagagggctcaaagagaggtttgtattttatcagcttggtagctcattgtagcctcattatatacacactcataatcccatctctgtctcagtttctgctgaaaaactactttaagcgcataatagaacctacccacattatatatggataactagcttgagataacatactgaatccatttcttcagggaattcccctggtctaacttgratagaatatgctggtgcagaaagattttcacggtcaaagtcaaccctttgtgtcatatgttaactcctaattatccccagctagtctcatttttagagcctcyttctagccatcccagctttagtgtgtgcctgtattactcttttctagaaacatatagactgaaatggtatcttttaagtccaaggtaccatctgccattatctgtggattccagattttatttctaaccaaatgtccttttaaatgtcattgtctgagacttagaccatctagttggggggtcagtattacttaaacttctaacatcttggtacagtcagttcctagccttaaatgtctgttgataccagtaaatctcaaactttagtataaggattacatgaggagcatgtttgtaacatgtaacatgtttacatgttaatggtgtgaattaagccactcttcacctgttctcttaataatattttggtatctgtatctgaataggtattatataagtattatccctgttcttatggaggtcatatgagattgattaggaaacaattcaacattttctgttgacttggcagtcaattttggagtcactgtttcagaggcacttttcttgccatcttccaaacttctcagtagccatcttagaaggacattttgaagaagtcctctgtggtcagtgaactagctcggaaccacttagagattgactctgctggagaggatggatggagggcagagtgattagggcagagtattgtgctggactggggcttgtacaacacggaaggagttgtgagaaactggaggagatagaaatcaagatgaagaatgttacagttatacagacataacttttgttcaagcttggttattctcttgctatggagacctggagttggtagacatcagagatgtgtttaggcaaagaaatgggatatctagcaagtgtcaaagcagaactaaggattggggtgaacaaaagagtgatccagtgctctcttactacatactagaacccaaaactgttgccttaaggaaaaggcactgttttgaggatcccttgaccttacactatttgggaattgttggacctgaaatgactttgctgctgatgctgaacaagtctccctccaaacataaggttgtagacaggctagtttgcaaggagtgctaaggatgtctccacagaatgtttcctctggggcttttctttcagcttctctgttatctgtttttttttgtttgtttttttttttttgcataggtaagtggttcagaagtcaaaacagtataaaaaagtctcattcccaccctagtattcatccatgccatccttctccctcccctaccttctagaggtaaccatttttattagtttgattatcctttagactttcttaaaaagtgcagttataaacaaatactgatacagattcttgtccttcctcttaccaaaacaaggaacatactatctgtactgtttctataccttgcttctatatcctggagagtcttcgtatcagtatgcagagactttcctcattaaaaaaattataagtttttaataagcaggcattacttttataatgaacacaaggataaaacaaaagtagagtaatgaaataattgttcttttttttttttgaaacagtagctacagtaacccatttgatctgactgcatcttagcatgtatacatgtccttttgatcttcctaaaaaaaactcatacataacaatgaattgaagagttagttacccacatcagctctgtaaatgtatggcaacttatgctagagcttacagccattatgatatggggaagagagacttgcaaagttcagccaggggaccttccagacttcactcgagtgtgatacttgaacaggaggagatctttgtactgctagcaaagggatgctactctataaaaggtctttaaaggaaaggagtggcctaccttatttttttcttgcttccatttcagtttttgttctggagatgaattgctctagaacttagtgtcctgtaactgttccatgtattagaactctcgcccattgcctttggagcagtgtggaagaatgcttgtgattcagtgtttggtgggaaaagcaggaaacaaattatgtacaccttattacaattgtttcatattaaaaacaaatgcattagtgaaagattagaagggaatataccagactactgtaacagagattttgttagggtactacatactttctcttttaatttttctataatgtggttatattgtttttataatgaaaaagacacagggttaaaaaggaaatttcagtgtctgacatgcttggagaagattctagagcacttctagatttctagaagtacttggacctgagatttcgtctgccaagccaagtactagcattcagttctataaagcaagtaacagtatcctttacttcactcttaacagtttctttttgaaaaaacagactccaatgtaaaaaaaaaaaaaacaaaactcttttcacttctaagtaccattggacaagggaccccagtgatataacagaagggcattggtaaccccatttctgcaagatgggatggaaccattctttcctcctgatcctacaataaccccaactcttcttagagccagtgatttcttcttttagatctattagatgggaagatacggcactctcctgtgtgtgtgtttgcatttcttttagcaagaaaaactgcaaaaatccttcccaagaatttcccgtttttcctattctgcttgcatttttcttttcggccacggggtgcgcgcagttgagctattttggctcaggttccagatkgtgaggtcagagactagggattggaggagaagatcaggtgactttcagtaacagagatggcggtcctcccatctccaccccttccccccctcatctttccccaccctttcctggcttccacctcaggaacaaagaagggaaaaaaacagcagtatgacgaaaaccagcagctgtctctgcaggctcaggctgggggctgggagtttattccatctgttctctttgttctgctcttaccctgttacttcccttcccaaccctgaataaaacagaatatttctagaatcctttgttatggagaatggtttagaattctgcagtttactcagtatttatttaggttagcgtgggtgagatacagcagagattaaaactgatctggagcacctaaaaaaaagatgaaggtactttgccttctcattcagtcttaaattatgaatacctatttaatgtcagatttgtgacaggggattatcaactattatttccaattatcaaaacattatttccataatgcctaattggtattatctttgttttataattgagagatataaaagagaattaatatgtcctttgcttgttaagattttatagcaagtaaacaccaagccagaatttgagcctagatatattgggctcaaatccagcacttagtgaaagggagtggcaagaatgcaggcatgttgagagaaacctcaggtgcttgcttccagtgactgacagtgtaaagtaactgtgctagtgcttcttgatttttaccagtgattagtgtcctgatttcttcaacaaataaatttcaggggaaaaaatgagatggagaggaacatatagattaagagggaattttaaattttatcaaccagtacagtatatggaacttatttagatcttgatccaaatgaactatacaaaacacttgacagttgagacagctggaaattagtgtgataatggtttcatggcattttttaaaaagtcatcatcttttagagatgtgtacagaaataattgcggatcattatgggatttagaagtggggtgtagatgaaacagaattggtcacgagtggataactgttgaaactgagtgatgtatgcatggggattaataattgtgtttttgaatgtttaatttttcccataataaaacattttttaatccaggaaaagagttttatttctagtaccttattttaatgccttttcttctgccctctagcctattgtttccttgcataaacctgtcctctttgctgacatacctgagtccttgtttgggatagtgcctgtccttccagtccttccccacccacatcctagaagcagacctctttttagcactccctaattgagtcaccatcctgggtgtgctgggaaagtatctgtgggaaactcaatgactatattatctgaaagaccaaatgcttggtgaagtgcccagatttttaatactgcttttctgctacccttccagacttatatctgtccccttctttataactctcagcatctggttcttcctttgggattctgtgtggctttgttcttgtcctttaggtttgttcattaatgccagtttgccctgtccctccttacagcttgcacatctgtaatggtctagttctgtgggattttgcagatagttgtatattttggccaaggtatcagtgatacggttacctttgggcagggataactgctattcggttggcatgatattttttccttctataatgtataccttagtgattgttttaaagtgctgaatttatcccttatgtatattacaaccatgaagaatataaatcagaagtcctccatttgggcagcttcttatattaacacttatattaacattaagaccctcttactgtctcctcttcccagaattagagagttgatgtagtgcttaatagacatggcttattgtatgctaggtgaacttggcaattccatagctatgttaccctcacagaaagttatttcctggagagattattaagtgttctgatctttcatatatgcctgagagatctaagattcttccacaaagaccctatttcttcagagaaaactatagtgatgccagagtcttttttttttttttttaacaacttgtgatttttgtgcacctgtgttgtatgtgttgccattatctcactttagggacgttggataaactggcgtatttgtgcagcctcatttaagtagtggcaaccattaatgacttgtacccacaagtttttccagataatttctgttttttccacctttcttacatgttcttttttagtcataggtacttggcttactcaagggaggtgtagcgtaagataaagataatggagggtgttccctgtagaataggtacaaatgctgcaggctttatcttgggcagagcaagtagggttttggtcctgagtaagtgagtgaggttaggtggagctgcctgtcttccagccgtgcggatacaactgactcagtccgtgttctcaacagtttttgaaaagcccatttttctatcccacttactcccacctgcagttctttaagaacgtagtttccaggatgtcaggcaactccccactcctccatttcctgtttgtggtcttcattgagagacgccttaaacaggaattcctggggaagtgcaggctrtagcggtgggattccgggggtcattagtccattattgaagctggggaatcatgtactataaaaggacctcccttccgttctgttgtctcctagaaactattactgatcataaccaagcagtaactgcaactcagggctgttgacttgtgccctttgtctttagagactgaaaattattttcccttcttgtgcctcagtttctattagttgaattttagagctcaacatcaagatttgtgacaaaattaacttggactctgtaggactgattcgtttgaaatgcaaaagtagtgaagaacataaaacagactccctatcttggccgccagggggtgccctttcccttcgctttactgtctggcactccccaccgcattcagccattttagacagattgtttttgctcccagctaactccattttgtatttgtgacgcaggaataaaaaaaggagttaggcaaaggaggagtctggtttgcagagggagggagactggctgaggcgcagctacgtactcttttactcagcagttgctcatcagggacacaccttgctgcaggctgcctgcatcctgagcaatcgatgccgcaagtccttgccagcggagcacagagcaaaatggtttggctgccggacacctactaacagtgacagagtgctagcttttgaggcagcaggccagggcatcccctctgcctcatctagactctaatcctgggtttaggtgtttttgctacagagatgtttagggcagttttcttaattataggatcagataagaaaagatacccccaaaaaaagaagaaaaaaaggaacccctttcacttagctgtctgggaagaatcaaatgccccaaggactctagggaaatggtcctgaatttttttaaaaaatgttatttttgaaaccgtgaaaaaaatgcacgcacacatacacacatatatgtaaagagactagtatgaacacccctatgtccatcacccatttaaaaaacttaatcaacagctagtcttgtttcatatacctgtatcaactttgtctttgccacccattatttttacatgtatccttgttcatattatttaatccttaagcagttcagaatgtgtgtcaaaaaaattaggacttttaaaagaagataattactaccattatcacatttaaaaaattctttatcatcagatagccagttagtattaaatttcccaaattatcttatgatagttgttttttttaatagttcatttgaatcagagccaaataaagtctacacattgcagttggttgatgtctctataggttctctcttatgctcttttttattttttattttgcaatttatttatagacttaatttcttttaaaaagatctctgccaggcgcggtgactcacgcctgtaatcccagcactttgggaggccgaggcgggcggatcacgtgaggttgggagtttgagaccagcctggccaatatggcgaaacctcgtctctactaaaaatacaaaaattagccgggccgcctggtggcgcatgcctgtaattccagctactcgggaggctgaggcaggagaattgcttgaacccgggaggcggaggttgtggtgagccaagattgcaccactgcactcaagcctgggtgacagagtgagactccatttcaaaaaataaataaataaataaataaaaagaagatctctcaggttgggactgagaagatacaaagccagacttcccttcttgccagagcagagcctcttctttaggatttcccacagaggctattggtgaccaagtgaaggagcaatgccctgccaccttcagagggagaaagggctggactcttacttttctcctgacgtgataatctgttacccaaagtcttgagaaaagtttgcacactgccgtcaacggagaacatggtcatagaagtgggcctcacccgttctaagaattaaaggagagcttttaagctttgggacaactgtgtttggccactgtgtaatagctgcatccctatggtgattctagagtatcagctttttttttcccgaatactttttttacttaagtagcagctttctccctggtaagactcaatgaattaacagcacttcatggacttttacagaaagaaaaaatataatactgtgttggggccgggggggatgtggtgaaaagtcctttatggcttcaggattataatatcgctagtccttcccttgacctttttggagatactccctgagactgacttagatgcaaatgatcagatgaaagttcttgcttaatattcttctcccacttctgaaatgggtcagtgactctgactttcagcagccacagcaagcagtctattcccttgcccaagggaagggcacaggtgatagaagggaattagcagggtctggcttcttggcaaggctggcaggacactcgtagagtctggtctgtggagactagattggccccatgtctagtttggaaactatagttcccactagcaaaaggtttagaatctgctgaataggtcaggattgcagcagctagaaatacggatcctggcacggccactttttaaccacatagctaggtgtaagggtctctcttttctactattgtttgttgagagtcacagcctttgcagaaaaaattttcctcttttcctttgtgctaaggtgctatctatacccacctattttggtcccttatttcacacaattctgtaaactgaaattactcagcccttgatgttgtttttagggtgagggacagcatgaggcctttgttctggacttctcatctttgctcttatgaaaatgggggctggaacccaagcattgataaggttgtatattaggtgctttagtatctggatgattaattagtgcaccattcctgtaagaaggctgggaaggcagcaaatgggagcattctatgggttctacatttgactgcctgtctttactgctggttgtcagtgggagttcttcctaacccaccgtcaaagttgaaccaggcctacctgtctaaggatatgaaaataaaataggtggtgcccagagccatatctgtcttacctttctcacagtttcctgtttggtgacagtttttaaaatttacacatagttacattatcacactatgttaacaaatcaaactgttttaatttgttcatattcacttgtagtctttgcctgtgctgtatatatagcatttacatggttgtaatcagagggggacgtgtgtgtgtatcttagttcttctttatttcaggtcgaagtgtacaactcattatgcagcattaaatttcaaaaaatttaaaaggaaatttacattcatgtaatcagggtctgagaccaagatgccctttgttatgtaccccccttccagttacaactgaacctccacccccaactcagagtacccaccatcctgaagggttttgcctgtagcttttggtatatatacacattgtcaaagaagtttcttcgatttctaatatgctaagactatttattctgaatggatattaaatttggtcaggtttttttttgtattgttgagatgatcatataattttctactttaatctgtaattgtgggaagcatattaactgatttctgttacaccgattttgcattcctaaaacaaatctaacttgaatgtgatctgttattatttttattttataccccttaattcactttgctattaggaattttgtgcctgtgtttatgagtgaaagtacctatgatttttttgatactgttctttcacattttgatagtgaagttatgctagcctcacaacatgagttgagaaaatatacttctattctgtggaaaaattttttgcgtaaaattggtggaattatttattccttgagtgtttgaaataatagctggtaaagtcatctgggtctctgaagaaatttttgatcaccgatttagttcttttatggttataggactggttttttcttattggataagttttgatgtgttatgtttttctagaaatttatcaattttatctaaatttgcagacatattttgtatgatattattcctttttttggggggagcgggtggggatggagttttgctcttgttgcccaggctggagtgcggtggcacaatctcggctcactgcaacctctgcctctcaggttcaagcgattctcctgcctcagcctcccgagtagctgggattacaagcatgcactaccatgcctggctaattttgtattttggtagagatggggtttcaccatgttggtgaggctgatctcaaactcttggcttcaggtgatctgcccgcctcagcctcccaaagtactgggattacaggcatgagccaccrcgccctgcctgatattattcctcttaatgcttgagcctgagccatatttagttcagtcctgtattttgttcctgatgttagttacttatgcctgatttctctgtttttctttcttgttttaaaatactgaatttaactggtcttaaaaaaaatgttttaagccaaaactgttggcttcgtgaatcccctctgctacagatttcactaatttctgttcttgtctctatctttaaatttttcttttggtttattttattattcttattctaatttttttaaataggtacttacctctttagtttttagtcttttttccctgtcatatatgcatttgagacgatgttttcttggggggtttttttgagatagagttttgctcttgttgcccaggctggagtgcagtggtgtgatcttggctcaccgcaacctctgcctcctgggtacaagcgattctcctgcctcagcctcctgagtagctggaattacataggcgcccaccaccacgcctggctaattttttgtatttttagtagagttggggtttcgccatgttgggcaggccggtctcgaactcctgacctcaggtgatccacctgccttgacctcccaaagtgctgggattacaggcgtgagccaccatgcccggccragactgtttttgtttaaattattgtttgggacacatctcttaagttgtttttttgagacagggtcaaaaaaaaaagacagcctgtcacccaggctggagtgcagtggtgcgatcttggctcactgcaacctccacctcctgggttcaagcaattcttctgcctcagcttcccaggtagctggggttacaggcgtgtgccatgacacccagctaatttttgtatctttagtagagacagggktttttcaccgtgttggctaggctggtcttgaactcctaaccttaagtgataggcccgcgtcagccycccaaagtgctgggattacaggtgtgagccaccatgcctggctcacatcccttaagtcttgataggaagtgtattcgtttgctagggctgccgtaagagagtgccacagactgagtagcttaaacaacagaaatttatttctcacagttctggaggcttgaagtccaagatcaaggtgttagcaagtttcatttcttctgaggcctctcgccttctcttgcagatggttgccttcttgctgtgtcctcgtgtggtcttttcttctgtgtgcgcattccttgtgtctctttgtgtgtccagatttcctctcctttataaggacacatcagatttgaagtacttaatttccatatatattgagtgtattagtttcctattgttcctataacaaattaccacaaatttagtgacttaaaacaatgcaaacgtattatcttacagttctggaggccagaatttctaaaatcgaaatgttggcagggctgtattccttctggaggctctaaagaagaatctatttcctttccttttccaatgtctaatgcctgcccagattccttggcttatggtcccttcctcaatctttaaagccagcagcatagcatcttcaaatctctttctctgacctctgcttctgtcatcacatgtcctctctgactctggtcctcgtatctccttcttataagaatccttgtagctaagtgtggtggcatgtgcctgtagtcctgacagctcaggaggctgaggcgggaggattgcttgagcccaggaatttaaggctacagtgagctctgattgcaccactgttctccagcctgggtgaccgagtaggactgcaactctaaaaaaaaaaaaacaacaaaaacaacttgtgattatactgagcctacccagataatccagattaatcctgtcatctcaagatccttaattaaatcatgcctgcaaagtctcttctgctgcataagcttgttcaatattcccagattgtgggaattagaatgtggacatctttggaggaccattattctgtctaccacatggaattttcaggattttttgtatttcttgttaatttccggctaattgcattctggtaggtgctcttgtgatttcagtctttagaaatttgtagagttttgctttagggctcagaatattgccaaatattataaatgttctgtgtgcactgaaagaacacgtatatggtcttcagttacgtgaagtgttctgtatgtctccatttgttcttgtctgttaattgtgttgtttgaattttctgtattctatttgttttatcaattactgagaaaagtagtcaaaatatctcactttatggagtaggcattgtactatttggttttattttatattttttcttttgatttttttatattgacataattttagacatacagaaaagctgctagaatagtacaaaaaatttcctgcatttgcttgaccacattccaaatcaactgttaatattttacctttgtcttacccttttctctctctgtgtgtgttatttatgtatgtgtatgtgagtatagtattttttattgaactatttgagggtaagttagacacgatgcctttttttttaagagacagggtcttgctctgttgcccaggctggagtgtggtgacactgtaaccttgaactccctggcacaagcaatcctttcacctcagccttctgagtaactgggactacaggcgtgtgccaccgcacctggctaattttttgatttgtatttttggtagagatgtggtctcactatgttgcccaggctcttcttgaactcttgggctccagtgatccttcctccttggccttccaaagtgctgggattataggcataagccactgagcccggcccagtgtgttttctaataacaggtccataaatgcggtacagttgtcaaagttagaaaattaacataagtgcaatactgttatttaatctaccgactttcttcagattttaccaattgtcacaataatgtcctttatagaaaaaagtcctggatcatgtactgcattcatttgtcttttatctttartctcatttaattgggaacagttcctgttatggtcacctgcaagggcattatagacccccacttaaaatttggtttggatgttaagactattcgtgttacatgcataacaagagggtatgaaaaggtttattaacataattgaggtccaggagagcagggcaatcctctcaagcaggtttgaaatgactgtagagaacaaggaaaggatagctgggcatggtggtgtgcacctgtattcccagctactcaggaggctgaggtggaaggattgcttgagcctgggaggtggaggtgagctgagattgtgccactgcactccagcctgggcaatagagtgaggctctgtcttgaaaaaaaaagaaaagaaagaacagggaaaggagattcrtttgggcttttattgtggttaggggcttgggctggggtgagagttcttacacaagagcggactttacctagtttggatttcttgctgattcccaaggaaggaacatctagactttcatatcagcttgcctggataagggacttaggagaaagaaaaagaggtaaggtttacatctggcttatgtacagatataggacatgagagaaagaggaagaggtgagctgtcagcagttaaacatcaaaaaatgaagtcagactctttgttatagttcctcagtttttattttttgtgaccttaacgtgtccatcagtttggatttgtctcgtgtcctcattattagattcaggttatacatttttggtgctttatttatcttaagataatgttattaggtacatacaaatttaaaaatcctgcattttcctgatgaactaaacttttttttttaatcagtatagaaagtccctctttatcttttatactgctttttgttaccttaaagactattttcgtctgatgtgaatgcaacttggacaactttcttctagttagaatttgcctggtatagctgtactttttcttcctttctgtatccttgctctagatgtttctcataaacagcatatccttggactcttgttttttaatccacttgacaccattggtctcaaccaatacagagtgtgtagtctgtttacatttaatgtaattactgaaatattgaggtttaaatctaccgtcttattttgtgctttttatgagttccatttgttgcatgtgatgtgttgatttcattccattcaaaatatttttttctattttgtgatttcttacctgactccagagttatttatatatttgcttaatatccaaataattgggtattttttggttatctttttactgatagcttagtactttgaattatttctatcctttgaaatttgttgaggcttgcttttacccatatatggtaaattttggcaaatatgctgtatacatatgaaaaaagatatgttagtattattgggtacattgttctaacatgtcagttaactttgttagatatggtcagattttctacgtcctttccaagtttttatctgcttgttttattagtattgtgtgacgggtgttaattcttccactgtggttatggatttgtctttttcagcctttagttcactcaatttttaactttatatattttaaaactaaattattggatatttttagatttagaattattatattttcctcaaggattgaccctttattatgaaatgtatgtatcatgccagttattagagatgatatctctatctgatactagtatagctacaccagttttctcttgattattgttcttttgattagtacatcttcttccactattttactctcaatatatctgtgtctttatttaaggtgtgtcccttataagcagcacatatttagtatgttttgtaactccagtctgacagttttagtcttttcatatatttaatccatttgagttgatatataccctatttctatttgttttctgtttgattttcatgatttatgttcttttttctgtttttgccctcttacggattaatttagaactgtattatttcacatttcccctgtcgttatatacctttttactatcctcctagtgagtatcttaaaaattacaatatacatacttgacttatgatagtctaatacaaattataattttactaccctctagataatgctagaactttacaacatttctttttttatttttcttttttgaggcagggtctcactttgtcacccaggctggagtacagtggcatgattgtggctcactgcagcctcagcctcctcgggcttaggtgattctcccacctgagcctcccaagtaactgggactacaggcacacatcaccatgcttgctaatttttgtactttttgtagagacagggtctcaaccttattgcccttattgcccaggctggaacattttagctctgttatgtaccttccttttgagttactggtgtcatgcagtttgattctgtaggtgctttaaaccccacaaatatttttactgttactttgtaataccagtagtcacttagaaacacctttctagtgtttttgcttcctgtctacatttttgtatttccttcggataattttttctttcttctgcctgaataaatactccctttactatattagttcaggtctgctgctaatgaattgtgtttttttgtggatatatctttatttcatccatattttggaagatgttttttcttttttttttttttaaagaattccactgtcagtcttattgtttttcatttgaagataatatgttccaccccctgctattttgaggtttttttttttgaaacaagatcttgctctgtcgcccaggctggagtggagtggcgcaatcatagctcatggtagccttgagctcccaggcttaagtgagcctcctacctcagcttcctgagaagctaggactacaagcgtgcaccaccgcatccagctaattttttagttgttttgtaaagatggagtctcactgtgttgcctgggttggtctcaaactcctgggctcaaggaatccacgcacattagcctctcaaagtggattacaggtgtgaatcatctggatcaccacacccagcaaggattttttttttaactctgatttttagcagttttactatgatgatatgccacggtgtggttttctttgtatttatacttgagtttctctgagctgcttgattctgtatgttgaaggctttcatcacttctgaaaaatacacaactattttctcttcaaatcttgctcctgtccaatttttcttctctttctgggcctccagttatacatatgttggaccattggccttttcaatgtgtctcacttgtccattacattctttttcattcttaccatttttaacctctgtgcttttagtttggatctttgttactgtcttccagttcacccatttctactatgtctactgttaaacccatctgttgagcttttaatttcaattatattaatattttttagttgtagaatattcatagatttttattttttatttttatttatttatttttgaggcggagtctctgtcgcccaggctggagtgcagtgccgcgatcttggctcactgcaagctccgtctcctgggttcacaccattctcctgcctcagcctcccgagtagctgggactacaggcacctgccaccgtgcctggccaattttttgtattttaagtagagatggggtttcaccgtgttaaccaggatggtcttgatctcctgacctcatgatccgcccgccttggcctcccaaagtgcgggattaccgcgcctggctgaatgttcatagattttttaaaagtaaattctacttctctgatgaacttctccgtcttcatttatttttattttttcctctatattccagaacatgttaaccagagtgattttaaagtcctttttgggaaactgtaatgtctgagttgtatgtgaatctgttcctattggtttgttccttgaactttgggcaaatgatcctcccttttgacattactagtaattttgattaaatgcccaggcattgcatataacaatggtggaaactccagatgatgttacttttctctgaaaagagaagtcacactttcctctctagacagataatagtagaggctgattgtgttaatccagtcaggaattgagctgtgccaagacgtggttgtggttttggaaaagcttgatctacctctttcaccctgttcctagagtgtagtctttctaaggctttcagctgtgagcctgttttattcaactttaaggatatagccttttgtgctcccagcttaaggaggagagtctctttttttttttttcttttttttttcagagtctcattctgtcgcccaggctggagtgcagtggcacgatctcagctcacagcaacttccacctctcgggttcaatcaattctcctgcttcagcctctcaagtagctgggattacaggcacctgccatcatgcccgactcatttttgtatttttagtagagacggggtttcaccacgttgggcaggctggtcttgaactcctgacctcgtgatccacctgcctcggcctcctaaagtgctgtgattacaggtgtgagccaccacgcctggctggtctcatattttgtttgtttgtttgttttttgagacggagttttggctcacttcagcctctgcctcctgagttcaagcagttatcctgcctcagcctcccgagtagctgggattacaggcatgcgccaccatgcctggctaatttttgtagttttagtagagacagggtttcgccatgttggccaggctgcgctcaaactcctgacctcaggtgatctgcccacctcagcctcccaaagtgctgggatacaggcatgagccactgtgcccggccccagagtctcatatgttttactttataccatcttgattttttgttattcttagggaagttttcatttattcaagattatatttctgttttttatagttagatttttaatgtatctagaatttagttttgtgaatatcataaaattaggatcttactatattcctttaaaatggaaagccagtcgtcccaacactattggttagaccaggagtcagcaaactacggccaacatgttttgttaataaggttttattggaacacagccattctattgtcattgtcaatgactattttcatattatgccrgcagagttgagtagttgcaacagaaactattaatatatggtccacaaagcctaaaatatatgtctgtttatggaatttcttttatttctttatttgcttaatgtgttcttctctcatcatctcacactgttttttgttgttgctttttttctgagacagggtctcattctgttgcccaggctgagtacagtggcataatcacagctcacagcagcctcagccttctgggctcaggggatcctcctacctcagcttcctaagcagctgggactataagcatgtgccaccatgcctgactaactttttatttcttgtagagacagactgtgtcgcctaggctggtctcgagctcctggactcaagcagtcctaccacttgtccttccaaagtgctgggattacaggcatgagccactgtgtccagctgttctcacactattatagttattttagctttatcctactgtattggccttgaagatacaatttgtttagtcaggtttgctgagatataatttatatatagtaaaattcaccctttttatgtgtacagtatyatatggctgacaaatgtatacggccatataatcacagtcactccaaaaagttccttcatgttcatttgtcagtcctcctccttattgccaaaccctggcataccactgatctattttctgacagttgtgtctttttcagactgtcatataagtagaatcatacactaagtagccttttcagtctggattctttgattttagcataatgtccattatgtccattcactggctgatggacatctgggttgtatccagtttttggcaattatgaataaagctgatagaaacgtttgcatacaggattttgtctagacaaatatattttcattttggagggataaacacctagggatgagattgttgggtcatatggtatggtaaatgtatgtttaactgtataagaaactgccaaactgttttccaaagtggctgtaccatttttcatttccactagcaatgtatgagagttgcaaatgctttgcatcctcaccaacacttaagtctcataagttttgtttggttttgtttttagtgattttaaaaggttagactttgtagttttaattcctaatgagtttaattcctagtacatagttttcatgacttactgatgatattgagcagctttctctgtgcttaatttgccatctgtatatcttctttggtaaagtgactttccaaatctgtccattttttaaaattgggttgttttcttatgatctagtcataactttttaatctgtgttgggtatactagttctttatcggataagtgttttgcagatattttctcccaatcttgtcttctcatttcttaataatggcttcaaaagaacagaagtttttaattttgatgaagtctgcttcatcaatttttctttttatgttttgtattcttttctttctttatttttatttttatttttttgagatggagtctcactcttgtcgcccaggctggagtgcagtggtgccatctcagctcactgcaagctccacttcccagtttcacaccattctcctgcctcagcctcccgagtagctgggactacaggtgcccgccaccacgcccggctaattttttgtatttttactagagacagggtttcaccgtgttagccaggatggtctcgatctcctgaccttgtgatctgtctgcctcagcctcccaaagtgctgggattacaggcgtgagccaccgcgcccggccgatttatacttttttttgtgtcttacctgagaaattattaccacctcaaagctgtgaagattttcccctgttctcttctagatgtttggtagttttaggttttccatttagttctatggtccgttgtatagatgcatgcttgtctatatgcatgtatacatttatctattgattgtattgacatataattcacatatgataaaattcatctttaaagtatacaatcccattttttgtgtgtgtacagatgctccttgacttacaatagaattatgtcctgaaagccattgtgagtcgaaaatatygttaagttggaatgcatttaataacacctaacttaccaaacatctttcttagcctagcctaccttaaacatgctcgggacacttatattagcttacaattggacaaaataatgtaacgcaaagccagttttataatgttgataatgaattttgaatcaaaatttgaagtacaatttctactgaatgcatatggcttttgcaccatcataagctaaaaaaaattgttaggttgaattatcttaagtcagggatagtctgtattcagaaagttgtccagccattaccactatctaattccacagcattcttatcacgcttacaagaaaccctgaatccactagcagccacttcctacttcccattccacccaacttggcatctgctaatttacttactatcatatggatttgcctgtcatggacatgttgtgtcaatataattaataaagtatgtgccctttgtgtctggcttctttcactaatcatgatgcttgcaaggttcgtgttgcagcatgtattagcacttcattcctttttatgacaccacattttgttttttccattcatcagttgatggacattaggattgtttccactttttggctattataaataatgctactatgaacattttctttttttttttttgtaactaaactgagatgaagtaccaacagcatgaccttttacccttaaattcttcagcatgcatcttctaaatacaagttctataatcacagtgtaattatcacatttagaaaatttatcattgataggatactgttatctaatatacaatccatattcaagtttcaccaattgaattagtttttaaacatgtaagacaataaacaattttattgagatgaaattcacacaacataaaattaaccattttagagcaagcaatttagtggcatttggtatactcataatgtacaaccatcatatctatccagttccaaaacattttcatcactcccaaaagaaatcctttacactttaagcagttgctcctcattcctccatccctttagctcctaacaatcaccagtctatgtgtgtctctatagatttacctcttctgaatatttcatataagtgaaataatatatgtgacttttgtgtctggcttctttcactttagcatgatgtttttgagaattctccacattgtatcatgttatcagtagctcattactttttatggcagaataatattccattgcatatgccacagtttgtttatgcattaattgacagacagacaatttcttttttttttttttcccaagacagagtcccactctgttgcccagtccagagtgtagtggcacgatcttggctcactgcaacctctgcctcctgggttcaagtgattctcttgcctcagcctcccgagtagctgggattacaggcatgcgccaccatgcccagctaattttttgtatttttagtagaaatggcatttcaccatgttggccasgctggtctcgaactcctgatctcatgatccgcctgccaaggcctcccaaactgctgggattacaggcatgagccactgcgcctggtggacagttagactatttctacgttttgtctattttgaatagagctgctatgaatgtgcatgtacttgtatccatttgagtagctgtttttggttttgggggatatatgccttaggagtggatttgctaggtcacatggtgattccgtttaataggatgaaaggatatgttgaatctgtagatcgatttggggaaaatatacatctttcaatgttgaattttatgttctatgaacatcatgtatctttccatttatataggtctttgatttctctcatcagtgttttgtggtttttagcatacagttggrtcacgtaacttttgttcacataactgaaatgtaactgaagtgtttctttctcttttctatttatttatttgcttttgtcttatggtactttatttctctttctagttgttcatttctttttctttctttcttctttttctttcttttttttttttttttgagacagaatcttgctctgttgcccaggctggagtgcagtggcacaatcttggctcactagaacctccgcctcccgggttcaagcgattcttatgcctcagcctcccgagtacctgggattacaggcacacaccaccaccagctaatttttgtgtttttagtagagacaggctttcaccatgttggccaggctgatctcgaactcctgacttcaagtgatcaacctgccttggcctcccaaagtgctgggattacaggcatgagccactgtgcacagcccttaagtatatataaagaaatataatttagagagtagtgagagcaaacatctttaccttgttcctggtttctagagtctcagaattcaatctttcacaattaagcataaagttatttgtaaatttttcgtaaatgttctttatcaggttgaggaagttgccattaattccaagtttacctagagttttaaatcatgaataggattttaaattttgtcaaatgctgatatgattttttaaacatctctgaaatcatgatgtttctcacagtggatgtcatagtttcattggcaggactctttcatttttaatggtgcataaaatagtgtgtattttataattgctgccatcatatatttgatgaaatagcccaagctggagtgcagtggcatgatctcagctcattgcaacttccccctcccgggctcaagcgattctcatgcctcagcctccagagtagctgggaccataggcgagtgccaccacaccaggctaattttttgtattttagtagagatggggtttcaccttgttgcccagggtggtctcgaactcctgagctcaggtgatctgcccacctcagcctcccaaagtgctgggattataggcgtgagccaccacacagggcctgaaatggcgtcttttgataggtgatagtgctggtgacatgtctgtttaaaaattttcctgagaccaggtgcagtggctcatgcctgtaatcgcagcactttgggaggccaaggtgagtggatcccctgaggtcaggagttcgagaccagcctggccaacatggcgaaaccccatcactactaaaaatacaaaacttaggctgggtgtggtggctcacgcctgtaatcccagcactttgggaggctgaggcaggtggatcacgaggtcaggagttcgagaccagcctggccagtatgatggaaccccgtctctactaaaactataaaaattagctgggcgtgtggcaggcgcctgtagtcccagctacttgggaggctcagacagaagaatcgcttgaacccgggaggcgtaggttgcagtgagccragattgtgccacttcattctagcctgggcgatatagcgagactccgtctaaaaaaaaaaaaaattagccaggcatggtgtcatgtgcctgtaatcccagctactygagaaggaggctgagacaggaggattgcttgaacccaggaggcggaggttgcagtgggctgagatcatgtcactgcgctctagcctgggtgacagagcaagactccgtctcaaaaaaaagaaaaaaaacaaccttatgccttatgagatatacagaaagcactggttagagggtaatttagacctgtaaatgcccatagtaaggaagaagaatgatctcaaatcaataacctaaccttcaaccttaagacactagaaagagaagagcaaactaaatctaaagcaagcagaaggaaagaaataatagaaattagggaggaaattaacaaaatagagaatagaaaaaaaaaatagagacaatcagtgaaaccaaaagcttattatttaaaaagataacaaaattcataaaactttagccagattgaccaagaaaaagagagacttgaatcagaatgaaagagtagacattactaccaaacttccagaaataaaataaagaggattacaaagaataccgtgaacaactgttcaccaacaaattagataacccagatgaaatggcaagttcccagaaatatacaaactaccaaaactgacgcaagaaaaaataaacaatctgaatagatctgtaacatgtgaggagattgaatcattagtcaaaaactacccaaaaaaggctgggggcacggtggctcacgcctgtaatcccagcactttgggaggccgaggtgggcggatcacaaggtcaggagatcaagaccatcctggccaacatggtgaaaccctgtctctactaaaaataccaaaaaaaaaaaacaaaaaaaaaaacaaaactacccaaaaagaaaaggcccagatatcttcactgctgaattccacccaacatttaatgaagaattaatacaattaacactaattctttgcaaactcttccaagaaatagaatatttgacaactcttttttttttttgacacatggtcttgctctgttgcccaggctggagtgcactggggcaatctccactcactgcaacctccgcctcctgggtttaagtgattctcatgcctcagcctcccaaatagctaggattacaggtgtgcgccaccatgcctagataattttttaatatttttagtagagacagggtttcaccatgttggtcaagctggtctcgaattcctggcctcaagtgatctgcctgcctcagcctccttaagtgctgggattacaggcgtgagccaccacgcctggctcacatctcattttatgaggctagtattaccctgatggcaaaatcagacaatgacatcataagaaaaaactatagagcaatattttttatgaatttggtagcaaaaatctttaatgaaaaactattgactgggtgtggtggctcatgtctataatcccagcactttgggaagctgaggttggtggattgcttgagcccagcccagcctgggcaaagtggcgaaactgtgtctctacaagaaatataaatgttagccaggtgggctgggcacggtggctcacgcctgttatcccagcactttgggaggctgaggcaggtggatcacctgaagtcaggagttcgagaccagcctggccaacatggtgaaaccccgtctctactaaaaatacaaaaattagccaggcatggtgrtgggttcccgtaatcccagttactcgggacgctgaggcaggagaatcacctgaacccaggaggcggaggttgcatggtggtgggtacctataatcccagttacttgggatgctgaggcaggagaatggtgtgaacctgggaggcggagtttgcagtgagccgagattgtgccactgcactccagcctgggagacagagcgagactccgtctcaaaaaacaaaaagccgagcgaagtggctcacgcctgtaatcccagctctttgggaggccgaggcgggcagatcacgaggtcaggagattgataccatcctggctaacacagtgaaaccctgtctctactaaaaatacaaaaaattagccragtgtggtggtgggtgcctgtaatcccagctactcaggaggctgaggcaggagaatggcgtgaacccaggaggcggagcttgcagtgagccaagattgcrccactgcactccagcctgggtgacagagcgagactctgtctcaaaaaaaaaaaaacaaaaaaacagccaggcatggtggctcatgcctgtagtctcagctacctgggaagctgagatgggagaattgcttgagctcaggaggttgaggatgcagtgaaccatgattgagccactgcactccagcctgggtgaccaaatgagaccctgtctcaagaaaacccctcaaaaacaaagattctattttgatttatttgcagtgtttgagtgtattgctttatatagttttcttagatgttgttgtaggtattacaatatacgtatataacctatcccagtctaatacataacctatcccagtgttttaccaggttgagtgaagtgtagcaacttttttttccatttaagtctctttgccctcctcactttttaaatataactgtcttaagtatttcctctacatgaagctactccattttggtggaactggaagtgcatatgcttgtcttttatctgtcaaccttactgaatgattaattcttgtagttcttccttgggttgtcttgaattgctatatatagtcatatcttccacaaaaatgacattttcatcccttttttttttttttttttttttttttgagacggagttttgctctttttgcccaggctgcagtgcaatggcgcgatctcagctcaccacaacctctgcctcccaggttcaagcgattttcctgcctcagcctccctagtagctgggattacaggcatgtgccaccacacccggctaattttgtatttttagtagagacagggtttcttcatgttggtcaggctggtctcgaactcccgacttcaggtgatccgcccgcctcagcctcccaaagtgctgggattacaagcatgagccaccgcgtctggccaattttcattttttatatgattttcgttttttggagactagggactctctctgtcatccaggctggagtgcagtggcacagtcatggctcactgcagcctcaacctcctgggctccagtgatcctcctacttcagcctcctaagtagctgggactacaggcatgtgccaccatgcccagctaaatttttttttaaatggagacagggtctcactatgttgcccaagcttgtctcaaacacctggactcaagtgaccctcccacctaggcctcctaaagtgcttggattataggcatgagccaccatgccaggcctatttttttatgtgatctgtctttacctacttctctcacttcatctcctgctcttcccttcattgcatctacttttagccttagtgacgtttttgctcctccttcaacaacacatccaacatgctctatctcaggcctttgcatttgttattgcctctgcctggaatgcttttgcccctttcccctggatgtttatgtggcttgctccctcactttctaagaggtctttactcagatgtcacttacagtgagatcttccctgaccatccctctaaaattgtaaactgcccccgtcatcaaatcccccatccttttccctgtttttcttttcacagcagctatgataatatagtatactattttatctattaaatggtctagtttatttatttttgttaggacgtaagttccatgaaggcaagaatctttctctattttgttcacttcttttatttccattgcccagaatggagcctggcacatataggtactcaataaatatttattgagataattaatctttgtgtatttagtatttttcttcctcaaactgggactactgagctccaaaacagtgaatttttttgagacaggttcttactgtgtcatccaggctggagtgcagtggcaccatcacagctcactgcagcctcaatctcctgggctcaggtgattttcccacgtcaacctcctgagtagcagggactacaggtgcgcgccaccatgcccggctaatttttgaactttttttatagagacagggttttgccatgttggtcaggttggtctcaaactcctgagctcaagtgatctgcccacctcagccttccaaagtgctgggattacaggtgtgagccactgtgcccagccaagagtgaatgtgttttatagttctttgtaccttttgtatgtaacttttttgttttaattcttgtttatttgtaccaggtaatacttttcatgtggtttaaaattcaaatggtataaaaaggttgtgttcaaaagtattcctcccactgtcgtgttcaaacaccccattcctctgctcagaggcagctagctttgtcagcttctcgactctcctttcggggatattcccatatgactttctgaaaatttgataccaagttacactatagtacaaagtattttacaattatatctgtccagaatagttacttggttttttcctatgtattgctcaaccctccttggatagccagcatcaaccattttttagagaatgttactatcatgagagccattaagggagtgatacaatgaaatactgttttgcccatgcccttgaagttcaaaatctaggtgggatgagaaatatccacacttattaaataacagaggctttaaaaagatcaagataataygtatgcaatgtcacaaaacattgaataattaattgttggatgagatatagataacaaataccatgaaaataagtttatcaaagcagagagtgagtatcatttatcagggaacgtttcatgagaagggaagaatatgatggctttggatagtctgaaaagaatgcagaaggcagaagtatattttacctcaatcataggcagttgagaaaacaaaatttttttagagaaagtcatgttcaagatggagcttaaggtagggcaacagtggctcatgcctgtactcctagcagtttgggaggctgaggcaggcagattgcttgatcccaggagtttgaggccagcctgggcaatatggtgaaacctcatctccacaaaaaataaaaaaattagccgggcgtggtggcctgcacctgtagtcccagctccttgggaccctgaagtgggagaattatctgagcccaagaggtcaaggctgcaagtgagccatgattgcgccactgcagtccaacctgggtgacacagtgagatgctgtctcaaaaaacaaacaaaaaagatggagcttgaaagataagttggatttttaaataggcacaaaaggaaggataacatkgtggaaggggactgctgaactactactaaccaactgttcttgtgaatcaagttttaatggaacacaaccatgcccattcatttatgtattgtctgtgcctgctttcatgctacagtggcagagttgaataattgagaccatatggcctgcaaagcctaaaatagttactatctggtcctttacaggcagcttgctgatccctgcaagtagataggatgtaggtaggaaagcattactgataaatattgaagaaatgaaaatgagatatttattagagttgggggaggttcagtaataaaagggtggttggttgaagaggaggttagttttgaaggaatacaatagaccattataatagagaggaagtgaggggccatttcacgctggacagtagttgcttggtaaagcacagaggtggcttacttttaatcatgcttttctaatcttttccctgctagccaagaaggatcaagaaggtggagaagaaaagaaatctgtgcaaaagaaaaaagtaaaagagttaaaggtgttggattcaaagacagcccagaatctctgtgagtatctcttggtcccaactattcaaaatgtgaaggaattcttttaagaatttttaattctcttgaatctatggtcccttgatatggaactttaattgttcaattcctgctatataccaaccattgcacagtgaattttcagtatcatgtttaatttcttcaatagcactgcaagatttttaagtatccagttttatgtcaaggaaacaagctaagacttttaggaatttgcttagacataaagctagtaagaaggaggtctgggatttgagccttttttttttttttttttttttttgagacacagtctcaccactctgttgcccatgctggggtgtaataatgcgatcacagctcactgccacctcagcttcctgggctcagttgattcttccaccccagcctcccaagtagctgagactacaggtgtgcaccaccatgctcagctaattttttgtagagatggggttttgccatgttgctcaggctggtctcaaactcctgggctcaggtgatctgcccagctgtgtctctgactttcttatttaaaagttcttactatgtccattgcgttcacagaaagtctaccacagatggtctagccactggacatttccttgctcccacttttgcttttttattaaataaatagagaaggggtctcgctatgttgcccaggctggtcttaagctcctggcctcaagtgatctgcccacctcagcctcacaatatgttgggattacagatgtaagctaccatgcccagctttcactttctgataagtaaaggtactagcttggcttcaattaaatttaaaattactttgtgatttaaaataactaaggtaaattttgtacttctcagagtaggatcagtaactccagagaagggttctgttctgaagtttccacgtatactcgtaactctttggtagcaaaatttcaaatgagaaattcctctgcaaagttgatataggtagtacttatttgatgatcaggacaaatgttaaatttttgttctttttaattactcatctacctacttcataccaagaaatatagacttaaatatttatttgacaaatatttcagggtctgctatgttataggctctattaggcatgtgttccagagatgaaagggtattttccgtaaaacccactcatagtcttgtgatgcagttattgtccctgtttatccaaatgagaaaaccaaagtttaaatgatgcgaagtgcccagatcacacagccaataagtacacatacccataagtaaagtcagtgatacaatgagaccagtaaactgtcacattattcttgattatataatcttaaattattgtcaataactattactacatagtgtctgtggtgaagtcttatggagattaaagtattgtgagtcagttcctcttcccaagagtatctctaggaacataagacatgagtaattggtttaaaaaatgatacaagaaagacaatggtgtagtacattatgatttctagtgttatgatattgatatggaaaacagaatttaagaaaagaaaattgagagtagtataggataggatggtctggaagatggaatttagtgattaaatgtctctcatgtgctaatgatacaaagctgaataagacaatagtccctgtctgcatgagccacgtatttggtaaagacagaaaggcagatgataacagtgcagattaataaatgctatgatggaggtatgctagaatgtttatgagagtactaggaagggagggatctaaatcaagtgggggcagtgttggaggggcaaatcccagaagatattctaaaggaggtactacttaaactgagttgaaagaccaattaaggaattaaggaggctgggcatggtggcacattcctgtaatcccagcaggaagctgaggtgggaagattgcttgagaccaagagttcaagaccagcctgggaaacaaagcaagacccctgtytctacaaaacataaaatactagctgagcacagtggcgtgtgccagtagtcaactactcaggaggctaaggcagaaggatcacttgagcccaggaatttgaggttgcagtgagctgtgattgcaccactgcactgcagcctgggcaacagagtaagacccgtctcaaaaaaaaaaaccaaaaaattaagtgaaggcgggaaggttggcttgtttcaggagagggatcagcatgtatgagagcatgagataacattgtgcagttcaggaactgcaagtagttgagtacaactgagtaaagtttaaatcaggaaaatgagtgagattatcctgtgtaatttttaggaaggctgctttggcagtgattttgaggctggattgctttttatcctgtgtaatttttaggaaggctgctttggcagtgattttgaggctggattgctaaggtaaggggagactataggcagagatgagttatgtcattgttttaaactaggtgagatgtgatcagggcctgaaactaaggtgatgagaataagagagggagaggatattaagatggtagaattaggctaggtgcagtggctcatggctgtaatcccagcactttgggaggctgaggcaggtggatcactggaggtcaggagttcgagacgagcctggtcaacatggcaaaatgctgtctctactaaaaatagaaaaattagctgggcatggtggagcacgcctataatcccagctactcatggggctgaggcaggagaatcgcttgaacccgggaagcggaggttgcagtgagccaacaccatgccgttgcacaccagcctgggtgacagagtgagactcatctcaagcaataaataaattaaaataaaaaactagccagatgtggtgccgcatgcctatagtcccagccacttgggagactgaggtgggtggaggattgcttgaggctgggaggtccaggctgccatgagctatgactgcactgctgcactctagcttgggcaacagagtgagatgctgtctcaaaaaaaaaaaagagagagagagagagaaggtaaaattaatggaatttagtgattgacttgggataaaggagaaggtgctttgaggtttaggtcactctgcggaaagtggtaccatttactgaaataggaaaattcagcaggaacagattgtcttttcggggaggtggatgtgagaggtagcaggttggtgtcttacttaaagtatattctctaagtggctgccatcttttcattggctttgtggttatggaataaatcagagtcgtggaagtgagagagaataggctagtttagattgctataaagtgaaagaaagagaaactggtaatttagagaggaacattgagtaagatttaaaaaacttgattatgtatatatgatgaagggaaaggtctgtggggctgcctcttctgttgacacatgaggaaaggatgagtacatgggagtatatatacttagacgtaaatatatgaacacatgcctcctataagcttacgaaaatgttggtatagttttcttctaggcgattccaaaaggcttatctgagtcttttctagtctggctctaaccaagagccctagtgctttatttttaagtaggataagagaaagctgagcaagtaatttgaccagtggctttgatttttctcagtgaagaggagcagggtcttcctggaacaaatggggaagtggtggggcagtggggaaagtgggaatatgttggaggacctgccaagaagggtgggagaaagtggaattgggacacacaaagagaattgctaacagcgcggaggccccagttatcattggtgctactgcaaattcatagactccagtccgcatcagcctaggtgtcagagtagagaaatgaaatggctagactgaccagggacccagaaggagaaggaagcaaaagaaaggtaatagtaggagtaataatactaatgggagtcatagtagagagcaaatgaactgatggtttagaggctcctaatgaaataggaaaggcagagtggaactgatatatcagtgaaaacagaatggtcaggagactggaaagagaggtcctgataaggctgaagagtcaagtgagagattagaaagggagagttgaaaaaacaggatgtatttgttagggaataggatatggtggtttaaggtcaaggcagctttgaggatcacgtcctgagagtggggaactaaagtagagtggggtgaaagtctttgacgtatatatacttttttgagacgggtctcgctctgttgctcaggctggagtgcagtggtgcggtcacagctcactgcaaccttgacctcctgggctcaggtgatcctcccacctcagcctgccgagcagctgggactacaggtgcacaccaccacgcctggctagtttttgtattttttgtggagatgaggtttccccatgttgcctaggctggtctcaaactctggggctcaagcgatccgcccacctyggcctcccgaagtgctgggattacaggcatgagccactgtgcctggcctaaaagagccctgttaggaagattatccagcataggtttgcaggatgggttggaagcgggaacagaccgagaagaacatgtcttaatatctcattttctggcagcaatctttttgggttccttccgcatgccctatcaagagattaagaatgtcatcctggaggtgaatgaggctgttctgactgagtctatgatccaggtaaggagtaaggtggttctgctggagcaggctcttctgtgtcgctgggcactggcctcatctctgtgtagatgaagaggatcctcctccagcattgctgacttatgaatgctggctttgagaaactgccttttctctggtggtcagattacttctggtatattttgcaaaagtacccccatctcagtagctgcctctcttctcccaccatatgtttctttctgtatggtccttgagcagagtgtgggactgacaacagagtaaaagttgtttaggcttgagttgttagcgaattcccctccagctgagatgtctcttctgtctttcagaacctcattaagcaaatgccagagccagagcagttaaaaatgctttctgaactgaaggatgaatatgatgacctggctgagtcagagcagtttggcgtggtggtgagtgaggcctgtggcagtaagcggttttccacctcctgtattcccctcccctctagagagcagcctgggcatatgctccttgccgcttgtctgtttttgaacctgtcttaatctctctcttctccctgctctggagctgtgatcctcccataggaggctcaagcgtgtatctttttctgacttccccctcttttgactgtaatggaactgcttgtgttctttactagatgggcactgtgccccgactgcggcctcgcctcaatgccattctcttcaagctacaattcagcgagcaagtggagaatatcaagccagagattgtgtctgtcactgctgcatgtgaggagttacgtaagagtgagagcttttccaatctcctagagattaccttgcttgttggaaattacatgaatgctggctccagaaatgctggtgcttttggcttcaatatcagcttcctctgtaaggtgagccaaagaggtagggcaggacaacacaaggaaggctgtagcctctatgagttcagtgttggcaggaggccatcttggacatgtcaggatttaacagtttctcctctttctctaagcttcgagacaccaagtccacagatcagaagatgacgttgttacacttcttggctgagttgtgtgagaatgactatcccgatgtcctcaagtttccagacgagcttgcccatgtggagaaagccagccgaggtggggcagtttggaatgaagctagagcccaaaagtctctgcatggggagggaaataagacacagtctagatgtgagagcattttcagttcagactatttcaagtggaaatgagataggatttaggcatggtgcctaagtcacaagggcagagcgtatggctgaggagagatctttatgtgtagaaataggaagcactctttctcttcctaaggaaacaccaaacaccaaaaaacagctagaaaggcaggtgtttttagtctaggttaatagttcttttcattaagaaaacatagactacattaacaaaaattaggcctcactgtcctggaactagacmaagaaaaagcagcattcactggaaattggaacagatttctgcccccgcctctatatttctatgtatatctccttcctcccaaaccctgttctctaaaataaatgagaccaagatctcaggggatttcatagattcatgttaaattaaatgaagtctctcttctgttcctagtactgcataccttgtgaaggctggaggttcaatgatcaaataatttatagtttcactggaaagatgaaaacttaagtatgtgacacaactaaagtacataaggaactaaaattattaagtaccagaatgtgtgtatagactgaagctatrctctgaaaggtgaaacyaaggggtgttgaggctgggattattagtaagctcttgctgtctgtttttatggtttttttttttttttttttttttagtttctgctgaaaacttgcaaaagaacctagatcagatgaagamacaaatttctgatgtggaacgtgatgttcagaatttcccagctgccacagatgaaaaagacaagtttgttgaaaaaatgaccatatcctctcttgaaaggagggagttgttccctaggaagggaaagaaaacttcctgtagtgggggaaaaacaggatagatagggcagtatgcaatttttttctcttaaaaaactctttttctttaaatacatagttttttgggtttgttagtattttgagacaggctctctctgtgtcacccaggctggagtgcagtggtgccatcacgcctcactgcagccttgacctcttggactcaaacgatccttaccccctcagcctccttggtagctgggactacaggcatgtgccaccaggccctgctaaactttttgtaacctttttttctttagagatggggtctcactttgttgcccaggctgcatagttcctgagagcattccattgttgtggagtagaagcacaccatgcagatcaaccataaaagtcccascaactcccctgcctgtaccccgtctccactacacacgctcacacatgcttccctctctttcccctccccagaggtaaccactgccactggactttattctgatttgcacctcatacatttattttaaacaaaaactgcattgtattgtgttttgcacatatgtcttggccatgtttccataatagtatttatagaaaacctccttttaggtcaagagatggagaccatcctggtcagcatggtgaaaccccatctctactaaaaatacaaaaaaaatcagctgggcgtgatggtgcgcgcctgtagttccagctacttgggaggctgaggcaggagaattgcttgaacccaggaggtggaggttgcaatgagccaagatcgcgccactgcactcctgcccggcgatagaacaaaaccctgtctcaaacaaacaaacacaaacaaacaaacaaacaacagtttaaactgccaccttctttttttataggtgtaccatagttcatggtttactattcccctatttaggggtacctacatggctttggtttttgctgttataaacagtgctgtattgaacatccctttgcatgccagtactcatctttgagtaattccttgggctagagaagtgggtctgcttcttggtcttggtcttggtcctttactccttggctgcacagctttgtgaaggatgcacaggaacagtataacaagctgcggatgatgcattctaacatggagaccctctataaggagctgggcgagtacttcctctttgaccccaagaagttgtctgttgaagaatttttcatggatcttcacaattttcggaatatgtttttggtgagcaagggatacttgctgactgaatcttttgtgggcatttctcactttcccctgggttcctgttggctggtagtaggtatacaatgcccatgtrttccttcctcctcttccctgccccagcaagcagtcaaggagaaccagaagcggcgggagacagaagaaaagatgaggcgagcaaaactagccaaggagaaggcagagaaggagcggctagagaagcagcagaagagagagcaactcatagacatgaatgcaggtgaggagtraagacgggttgatgggctgagayaggaatgttgggaagacttctctgcctagagtctagaggcagagtctcatgtctgagctcacctcctggcaaatgatttttggcagtcttcactccgagatcctgatgccggactttaaccccaattctgatacatgcgcattccaacttgccctggttaaactattaccttttctctcctttgctcgctcttgcattctctctcattcccctgtgattgtggtattgctgtgatatatactgttttccttctgtccrtccaaaggttcctctggcctgttctcattccctccactaaatctttcgggtttttttctgtaaaatattttcctgacgctcctcccatcttttaattgtggcgtgtcttccctttctgcttatttcacaaagtactatgtccctagtaccttagcacagttgtaygcacaattagattttaaatggattgaacttttggagcgggtggggagccggtcaccctcttctttcttcagcagaatctctgtttcactaccagaagcatgtctttgttgaaacatatgrtttcaattactggccctctgtttcctgtctctgcttctttcttgctgcagattccctaccccttcgcccccactgctctctctgtgggcagcggaaatacagcatacrctgctcacacagcactgagcccatgccaccctcctctaaacctgaggggccacaaaccttctgcaaatgaagaggtgttcacagagctgctgagtttgttaggaatcagtattttacagagcacaggcacaagggctgctctgatacctcttgctaccagggactttttatacttttctgtaaagcaatttccttgcccttagttgtaagccacaacttcgtaatgctattaaagcccacaccaagtatccttcaccttcccctgggactccagggtttgtccccaggtactggctaggatgcagtgggggaaggtggagtcccgctgacaygtgggatgagggctgcacacggtcaacaggtggcgtaatggaccttgcccagtttccagtacccgggtcaagcaaatgagggtggaatgtaggtcagctgcactggtgrtgctcagccagcaggtggcgctgggagcagtgagccccagccttggatctggcagcctatggactttttgggatttcacagtttcagatttcactatcctaagctgttgtcatggaaaccgagccaggctagaacaaggattctacattaactctttgtattccagccaggctgctcctcttagatgcagaggacttagacatcaggaagacttagccactggaggcagtacttcaggaaagtgcactctttgatcagtggtctttcctcggccctgctctgaaacctaaccaggcaaaacactttaggataaaagggagtgatatagttgcttagtaatttcacaatcgtagtctctacttatcctggtcttggagttgggcagttgtataattttgttgctagtcctgattggggtggggaggatggcattgcgggaaaatatcccaaggtctgcattggataataggcaatgagatcttttgttttaaccattttttagcagatacaagyaaacatgagcgtgtgagacttaaggctgagctctctttgcctcttcttagctgccagctgctgtgggagaggggaaatcaagcaatagccatkcattttgtgtggggcttgatatttgccatgctgctctggctgaagagttcacatctccatcttgttctttataacagagggygatgagacaggtgtgatggacagtcttctagaagccctgcagtcaggggcagcattccgacggaagagagggccccgtcaaggtaagtaagcacatggagctcatcctgggtgtcraagggggtgagggctctctactcctgccagtctgcggctaaagagcaaataatgatgctctaagcatctttttagtccctgcatccagaacggattatctagtcctcttcttcccatgttacagagtagcgacttagaaaactggggtttaagggactggcaataaatcagttacattggattatgccgcatttctccccactcttgaagcagatatttggaacaaaggaactgagctgcaggacccagggatttgagttggcatttgtgtgtatgaacaaaagttgatctaaatacaaaatgtatattagatatagattgaaattcaaagaaaaaataagtcagagtccttactctggacttcacaagcagaagacatacgtagagagaactaataatagaaagtataaaattttgtagacaggtttaggcatcattattcccagatagaaaaatatagaggagcatctcagttgaaggattatgccgtgtctgaaaactaccttttccttgagtgcagttagcctctattgcccttgccttccccatcactgccctgcaatctcctttcatgtcctttggaagatctaagtggattacattgagctagagattctaaaaagaattatggagctaggacaagtgatccaggcattagtatgggaaaagattaatgaataagttccctttcagggaagcttacagtggccaagagactaattcaaaggaaggtataggcaagtctgcccctcatgtggagttgacctgcactatcgtgtctagtgaaggtcttttgaggctaggagtggtggcttctttactaatttgaagagtgggaattacwaaaaaaggcatcattagaggtttctacttcagagggacttaaatctatgttccctgtttcctggctgttgcattgtgtaggcccatttgatagttatactttgagattattgtaaacagaaggagttaacacagcttgctttggccagtgcttagctattaatacagtggtatctgtagggcctgtagtacctgccacagcctggaaagggggaccttagagcatgctagcctatgtaaactcagtattctggcccaacaacagccatcactgtgagtttcatctgtaatggctggctgcccatttctacctatactctgaataaccagagtgatactcccttctgagggttctcttgtatgacttcagaatgttccccaaactgaaagctcccgagtcaaagttcttacccattttctggcattctctgagtacaggctttctaaagcgtggggagaagtggatatgaagagctgagtactctctgggctcgagcatttagtcttatagataggtgtttgcaaggagagtacagctagaggtactattactcctgtattttgtctttataggttcttacaacattatttcctactgaccacacaaggtgatgtggccttaacattaagyatttctagccttacaaaaatacattgcatcttattgtkttttttttttttttttttgaccccgtcggctaagtgcctgcatcagamttttggtggggaattcccttttaagcctcttcctgtggaactatactagaatcccagatgcttcctgtccacaggtagccagacatcagtggcttccctctgctggggaagccccattcttcacttctttccaagtagaaaatcagaactcacaggtggaggaaggaggaattttgttggaaactaaccttccagcagaggacctgaattagtcaaagtactctctcccatgcaagagggaataggaggagacttatactaggagatactaaattggaaagtaggtgaaatgacaattacatatattttaagtggctctagcctataagcttatctttctaggctctgggtccactaaatacacttgaatatatctgggagaatctcaagggagacatttgtagttattctggtaactctttagaccctggtgcattcacatcatgtaaagtgatgtgatgcggtctcacattaaacaggaggatagccatcagagtagattacaaagaacacagggctaggtagggatcaaaagacctaaagtcacatctagttctgatgctgtctgtgttatcctaagcaagtcacttaatgtttctgggactcagttcctcaggtataaaatgagagttggactagaatgaatggtctgcagggtcccttccagctctaatattttttttgtgcagtgacaacaggattaagaggagagagaggctggacttagatggccccattctcaaaatacaaaggctccactggctataggtttctctatgcagctactgaatttggctgttccaccccttgcctggctgtctctgactattcctcttggctgattgctttgagctaaaaaaacagaggcactgtggaacatatctgcctcatagccctccttttttccagagaggcagctgtccctattcaaagacactagctttttccctagaatttaaaggaatgttaaattcttccggtctctggagacctgggggagtgaccagtatacaaagactcattgaggagttggaagaggagagttactatcaggcttggttcattaaaagcaacatgtaaactcctgtgatccgcagggtgtgggagaacaatggttggagtgtcaaggggaagaatccatgtgattgtattacagctgctatttcaggcccatgattgagtcagcttgtggttttaatgactcaactttatctccatgtctgaattgtggcctcttgtatacaagtcatttgctcactgggataaaagccaagggaagaaagaaattcaactcttcctttccttccctctaccatttcccagcttccctataagctccatccatctaacagaaccatagagttggaaagactctaaagacttccagtgattagtatctaaccttctcatagggaaagggattaaaaccagataaggtgactaacacggtgaaactctgtctctaccaaaaatacaaaaaattagccgggcgtggtggcaggcacctgtagtcccagctactcaggaggctgaggcaggagaatggcatgaacccaggaggcggagcttgcagtgagccgagattgcgccactgcacttcagcctgggtgacagaatgagactccatctcaaaaaaataaaaataaaaaacagataaagtcttgcccaggtctacatggctaatgacagagcactgtagcccacttttgtgactccaagtccaggcctgtttcccctcagcctgcgtgattgaacaggagacagcagtgaacccacagtatgggccggaaatattctttcataccttccagcaaggagagtcggacataatgacattgcttcaggaaggtgctctcatgaccacctgtgttagtctattttgtattattataaagaaatactggagactgggtaatttataaagaaaaggggtttatttggctgacagttctgcagactgtagagaaagcatggcgccagcatctgctgttgaggcctcaggaagcttccaatcaaggggggagaaggtgtatcacaaggcggaagtgggagctagagagatgccaggctcttttaaacaaccagtgcttgtatgagctcattactrtggggagggcaccaagccactcataagggatccaccccatgacccaagtgcctcccactaggccccacctccaacattgtagtccacatttcagcatgaggtttggaggggtcatacatccaaaccatatcacctcctatctagagaaggttgctaagaatatttcctgtaccactgcttattctcccccctacttttgtaaataggacaagaaacataattagsagagtttgagacaagaatgagttatttagtgtgatgatgattgccccatctgtcctagtttcctcttccctaaggaagcttaatgtattaacaagagcacttcctctttagtaatagttcctagcctacgttttataaaggtcttttttcaaatcactaacctttttaaaacttgcgttatatggttgattttgctggtgtttttatcctagcccacccctaacttctaggaatctgtcctcagagagcattcaccagtatctcaacattgttcccttttcccacacagcctgtgggactgttctcttgtagtcaaaatatttatctggttctatggctacttttcartagtctaataacaagtgagtaagttgggggaagcatggggaggtcagtttttcttgactgttcaacctgctgagcataatggtgagtgagtggaaagctgggagacctgttccaacaagagctttctcatcccctgaccttaggccaaatcacaccctccctggtgtrtaggctttcaaggcttaaaagggaaattttgatcttctccctacctactctctgctcctggttcttatgaagtttgtaatacatcagaagcttcttgagtccagaaaagtctagaaacaccacttggttaggtacaactggtatcttcttattttggaggaagaaaccacagaaagcagcagctaaagacctaccacatgggacctctgccttctcctgtgttgcccaggacaagtggcccagtgttcttttcccaaggtctggagtcagatgttatttcaacatatatataccactagagttacacacacacacacacatgcacagagtcgcagtgtcttctcaactgttggagactgaattcaaagaaataataaaatgataggaaactactacccttctggatatgagaaatggggtctagagagggagtacttcagaagagagtggaaatgtaggaggcctgaggaagattttggtggtaaggacagtatgagaaatgcacacatgtagaccatcatagtcacactcacgtaggctccttttcctcacttgtctcagtcacggggcattagtttatgttcataatccaataaatggttttgtgaaaatcccacagtctcgggcacatacctatgatctgtaactagataagtcctgtggytgtcagtcagggtcttcactattctttctcctcttggtagacaacctcttgtgcccctgggaagtagaggaggaggaggagacctttaaattggtaacctgtgtgcatgctgcgtgttccctgcttgatctatgggcagcctctcctgggatgaaaacagtagctctgggtcatggctctgcagggagagaagacctggttaagacttgggctttggcaggctgtggtgactcatgcttgtaatcccagaactttaggttccaaggtgggaggattgcttgagcccaggagttcaagaccagcctagacaacatggagagaccccatctctgcaaaaaaatacaaaaatagccagatatggtggcacatgcttatagtcccagctactagggaggctgaggtgggtggatcacttgagcctgggaggttgaggctacggtgagctgtgatygcgctgctgcactccagcctgggcgactgagattccatcaaaaaaaaaaaaaaaagacgggctatctgatcctgtttggcttctgcctacctaaagctttttgctggtccaaaaaggcgcttcattccagtcatgcagctgccccagtcttggtctttatttaggagtgctcggctctttcatctggtcctgcttctaaaacattcyggtactgctttctccactccagctttcccagatctccaggaagtcttttttttttttttttttyccaattgagctatcatttacatacctaaaattcaccttttaaaaatgtataattcaggggttttagaatatccacaagattgtataaccattactatctaattccaggacgtttcatcatccccagaagaaaaacttcataatccccattagcagtcactactgattctcccctccccttgcctctggcaaccaccagtctattttctatctctgggtttgcctgtgctggacatttcgcagaagctgacccataacatatggcctttcgtgtcaggcttctttcgtcccagacagctgtttgtgtatacacagttgctctgtgctgttctggggcatgggaggaggaaacatcatgagatgggcatggtctcaaggagtggccttcctgctgcagatactggggccataagcctagataccataaatgaatatgagagtcttggggatgaaacccagcagttagaacagaaactcgtggattgatttggttcttcttttctaatctggtatgacagccggaacttgaccatctcttagccacctgggctgagatttcttggtaggggtcctctcctgtccatctttatcccagttctgcttccctggcatagtttttattactacctcccccccgccatgccacccccacatactctacacaccttgtagggcccttggcatttgtattacggctgctacctttgaaggggtgggaaagagctaaggcatgtgggcatctgttgttggaggaacacgtgggagtgcggtgtcagtgcgtggctgctgttcctctttgcgggagtstctccagccacttacggaaggttgccttctgctagggacaaccctcccagggctgactgagaagtgttttggcctaggagtttcctgggacctgtcaagaaaacaaaaataatactatgtactaaactttagtctatttaattccaacatccctattacgagaaaatagactttgaatacttcatctctccttaagtcacatagctaacacttcagcccagttctgtctgtctgtgttcaaacttttgtgctgttttcacacagggaagcaagggggcaaggcttgctttcctgttgcaccacactctcttacattctttgccacccaacaatatattccacatgctggatctctgcccctttcttcaaagtaagggcctctgtgaagtggccaaggtagtcatgtctgcatggcttacgctgattatctgctgtagagtttgaaagaaattagaaatgaggccttccatagacagaatctctcgtcttctcttgcagccaacaggaaggccgggtgtgcagtcacatctctgctagcttcggagctgaccaaggatgatgccatggctgctgttcctgccaaggtgtccaagaacagtgaracattccccacaatccttgaggaagccaaggagttggttggccgtgcaagctaatgtgggtcctgtgaccgcggcagctcctcagcggagccgcagactgtcctgccctgcagcatgtgcctaaaggctcaaggggatattcctctggggtggccactcccaccaccctgaccctgtctttctctctggcctgctgctctctcaacatcacatacagcttcagctgcctggaggccagaaggaaagggcagtgcaggggaggcctgagcccgacttagccagccctggctgttgtattaccaaagcagggtccatgtttgctgccttaaccctgtctcctctctgttactcagagggcctcatctcagacaaggcccagcctgctttttctcagccctgactttctaatgggctttcccccctaggtcagtcttgctggatttgtgcttttcttttgtggtttctctggccctgagaatagcatggggcttgtaaacctttgggctagatccctcctttcattgctgttgtctctgctcttccctctcctggctgtggttatttattattagtggtgtggcactgggagctgctcctaaggaagcagggagcaaatcccacctttaccccaccttcctgggaaaggcctccaaagcaaaggatctggaccagtttccctgctgtgctgtggcccaggccagagcctgtgggcaggcaggcagggcatagcgacagtgtgggacctgcccccagcttctgccacgctttatgcccttgcctctctggacgctctgcaccaaccccaggctactgagccaccttccctcctcatgccttccctgagctttggtgcatctcatctggactatgggttgtactgtgaccatcccaacacctcaccctctgtctacaaggaaatgggaggtggagcctcctggctgagaaattgttttgcaaatggatctatttttgtatgaaaaaaaaaatttttttaaagaaaactgttccttccccctttcccctccataatgtaagaagctttggtggcaggttacagagttctgggatttcttctcacaggcccaatcctgaatrtgcccctggaccttctggacccttgagtccaaggcagatcctctctcccagggaatccgacacaggaggaaccccttctctggttgagctgggccaggcctaagagtagcaggaactctaagaccacagagttttttataaatgtataaatgtatcaagccaaatgtgcagatgctaactggacattctggggaactgggcaccaggagtgccttcatacactgtaccccagctctcttctaaaagagaagtgggtgggcacactgaactgtttggtggccccaaccacaggaagctgcaattctstggcttagggtgatacttttgccctccttgtgcccctctcagctttccatccccagctaggaagaaagaatggcactcttgggcttggcccagaattagagttattagagcaagagagagcttaggaagcatgagggcaactatagtgaggccttattgccaggagggagggttttggttgctggcgcttgtgtataaaggggcaagagcagctcctttggactattcctgggaggactctgatgcagggcgtctgttgctcccctgggtcacctcctccctgctcgctgacatctggggctttgaccctttcttttttaatctacttttgctaagatgcatttaataaaaaaaaagagagagagagagaggtgtgagggacaaaatgcaaacctatttcccttgcctcataggcttytgggatgtcatcacctccagtttgttggttttgtttccaactgttaataaagcattgaaacagtactgccttacagcttcctgtgtgaatttctgagctgttttcttttcactctagtccaggctcctctagtctttcctgcctcaaatccctggttgacctgacaaatcactgtgaaaaagctaaaggtgccagacactttacttgggcacagggctagagatgattaatacatggtggctgctgccccaccagagctcacctcagggccgtttggccacagtaaaggagtgggcgcctggttcagctccctgactcttccacattgctgctacttggtttggagcccttttttggaactcacttggaacctttcatgttcccagatgtcacgcaaggtttcctggcagtacctgtgtctcttgctgagggaagcatctggctcccattttctcatcccctctgctctgttggtggccacagaccacattccagagtagaggggyttaccctggggtggaaacctgagcctgcccagcagaggttgggagcctgaggtcatgctccagatgacttgccacttggagccatacttgtctgagcacgttatgacctgcacaaaaaagccagaccagcaatgagcaggcccaggatagacagggagaggcctggagaggaccacaaacccattcgggcgggctctggaactggaaataaaagccttttaaatagccctggagcctgggcagctgcctcctcagtatggcctgaggtgtggggatgggttgcctgccgcctccctcccgtccccccggaggccacgcctttctggttcagagctttataggcacacataccaattaggggacaaaccacagctgctcacgcgctctgccagtctgctgctgtgcctggaatagaacccaggcgcccggcaccccgcccctccgcagcctggctctgagtaacaaaaccctgcttccatctcagcaaccgtgcacaccacccttcctcccacgctagaaagtcgcccccagattcttaagttggaaggtttggttcccatgacaacagacttgagctggcagaatgggtgacctggctctgggagcctccgcagcgcggaggaagccgcatacccttgctgaccagccagataaccscagtggctctgtctttgtgttcttgggtccttccgggtagttccccttttaagtcccccttcacccccagctccgtgttyttctgcagcttctctggctgcagcaacctcggaatcccacagtgcttcgaggaggcaggcggagggggcggggagatgggagagcaggcgagtgagtggaaaagcaccgacaggaaggagggaggggagctgagtctgcgatggatctcatttcctgcacgtcctttcagtccccttgacccccgcaagaagaggatgagccctccaatttcttaggcttcgctacggagatgtcagcgggaaggcgaattccagatggggaaactgaggctcgagctgcagacttggctttggaagaatcacctcccgcattccctcccactcccgcggctttcccaaaacccctaggcagcgggggtgggggtgcgggggcaaaggagagtctaccctcctcccgtgaagccctccggggcgcttcgggtaggcaattttagtcaggaaggggcgggaactaacgaaacgtcctctcccctctacccaaggcgtttgcccggcgccaacccgcccccgcccgcgccggggtctcctcttctgcctggagacagccgcaagcttagactgcacactccactgcacaytgacacgccgcactcagatcccyacccccacagcggaccgatcacacaatggcacacggtacacagatccataggcacacaatcgcacactgtctcataggcacaacggcattgcaagcatacacaaccatattgcacagtcacacacacacacgcaattcggaaacatctagacgcgcaatgacacaragtggcctcccgattccgcccttcttccagcacccacctcagctcatcacttcatgcacacatgccaggagcttccatcgcttatacagaaacgttcagcttttcagaagaaacgttttattatttttttgtcgaagaaaaaaagccatataaatattagagtataaaacttgcgtgagacacaggaagagggtggggtgggagctacgtgactatgcgaagagaagcgcttataggagaagtcagtacgggggagggggtcgccttagcgcgtggacacagcacaaaacacaacacgggccgccgcgggcagatcaaggacagacggctgcgcggagcccgccgcccgctgcccacccgccatcacgtaaaagcacaccgcactacactactggctattctacaccagccgaaagagggagggggcgctacactactgtaagggcaggtctggggttctctggcagccccgctggatggccggggacccaggggcagaagggggtgggagaagaaggtctatgcacaaggaggcactggggaactttaaccaggctatggccactagggggcgcactggggacctgggcagtggccttcacggaagagaaacggcacctggcaaggtgaaggactgaggcttcaggagggcaggggccctgttgaagaagccccatcctgggctgagactttctgttcatttggtccctgccctagctccctgcctccccaacccagggactaagaatggcctggctggcccacccttcctgctggggctccgctgacccttccaccagtggcacctctggagtacccagcacccacagaggcccctctgacctctcaaggggacctggtcctaaacctgcttcgagcttccttggactgaaatgccagtttaatccattggtcctgttagctcagcccaaagctggctgcctgggctgagccctattatgtagtgggaagggtccagcctagttattggtttatggctggaatctggaggatgttgtcagtcccctgaggacatacagagcctcctccaaggccttgataacttgatgtgtcaagctttgtccatgcccccaccatccacatccacacacttcccttccttatcttaccaccccatactgtcttggaacatgcagtggagtctcttgtttgaggaggaggtgggggaagtcaaggcatgcagtggaaacgtcaaacaatgaaaaacaaaacagaagactggtccccagggcgttgggaagaggcttggtagcaaaatgccctccctaaatccagcaagcatcagtaccatggggatggtgatcatgtcctccaaaacttgagcattgatcttgggctctggaaggaggtgaaggggctggcaccaaaccatgctttgggggaagattgagaatcaaaggagaggccaagaggtcatgatgcccttscaacttttcagaactaggaggcttgtaggttacttggtacttcaacaccccaaccaccttactcgggaaagaggaactgttggagtggggtggggaggagggaggcatgggatggatgggcctgattgatttggaagatggaggagttcagctgtaactaaacggggtgtggcaaatggttcttggtgtctacagtaaccccactacccccatgggtacagcagttgattggatgggggttcccagcggaactgcttttgcatattcaaccccctgggggggaaggggtaggtgctgactgggcacttgtttctgtttcccaaggggagcatggccttggcccctaccagtattctgggggttagccctgaaactctgaggcctgggtgcaggtaaggagaagctgggctggttggggagaggcyrccctgtggctcttggcctggcctccatgttacttcttctccttcttgcccgacttcttcttgttgccattgccacctgctggggccttgccatcccgcttgccagctgcgttggtcagtgtggcattgctgcctgggatgtagacattctggyggtagtcgggcacgtgctgcagggtgaactggggyccgtagcgggcgctcaatcccatggtgccggcaccccctcccagggtggagctcccatcagcagcttctgcagagacagaggaagatcaggtgggagctaaacttagggtcctcaacagtcactgtcttatatccccagcagttaatgaatgcctatacagcaccctgggccttgaccacgctgagcactgggaatataggggtcaccaaggtagtctctcttcacaagagttgagggtagaggttaagaggctctggagtgagaaagtctargtttgattcctagctcctttccttactcactgtgatcctgggcaagtctacctaacctccttatgccacttcagttttctcatctgcaaaatggggatgataatggtaaccacctcttctggttttagtgaatgctaaataagaaaatgtatgtcaggtacgtaaaatagtgcctggtagatgtaagtgctcaaaacacattcgctggtatttctctcagggctgtgacacgggctctcagttccttgccctggctttctcaagggagcctctgactcccacactagaccatgggctcctggagggcagcagccatgaaaccatggctttacatgcccctagcctttgccaagcaaggcctggcacgagtagagattcggtagttccgttagtaagtgtgtggggtgrgggtgaagagtgctcttccaagcctccatttcaaaacagcatttttttttttttttttttaagatggagtcctgctctgtcgcccagcctggagtgcagtggcgcgatcccggctcactgcaacctctgcctcctgggctcaagtgattctcctgcctcaacctcctgagtagctgagattacaggtgcacaccactagcccagctaatttttgtatttcaaaacagcatttgagcacctactgtgtgccaggcactctgctggatgcttcacatgcacaatcacttttaacctctacataacagcccagccagctatgtggtatgaccctcattttacagatgagggaaccaagtgttagaaggaccaaggccatacccggtagcatttgttagaggggcattcaggcccaagtgtacctaagcgcatgctggaagggacagtcagtcaccatcaccaccagcagcttggaccttatccctgttctgagtgaatgggaggtagagagaagatggagaagagcycggctctatgaagctgaggagatgatgatctcggggactagacatctcagggacactttaggcacaggctcagagtgccacagctaggtgacatcagacagc

SEQ ID NO: 10047 - DNA, 13818 bp, Homo sapiens
ggaggctgagatggaaggattgcttgagcccaagaagttgaggctgcagtgagctatgatggtgccactgcactccaacctggatgacagaacaagaaactgtctcaaaaaawwaaaaawaaaaaaaaaaaaaaggtcaggcacggtggctcaggcctgtaatcccagcactttgggaggccaaggtgggaggattacttgagcccaggcagtcaagaccagcctgggcaacacaaggagaccctgtctctaaaaaaaattttaaaaattagccaggtgtggtggcacatgcctgtagtcccagttactcaggaggctgacaagggaggatcgcttgagcctgggaggtcaaagctgcagtagccatgtttgtgccactgcactccagcctggataacagaacgagaccctgtctccctgtctcaaaatattaatgtgtgtgtgcgtgygtgygtgtgtgtgtgtgtgtgtgtgtgttttggtctccatcctggctcctggccagacctcctaaagcccttgtaatttcctaaatgataaagtgaagggagcttttgttattcataacaagctcttttcaaccacaactgagtttatgttagtaagttgacttttagaaagcccctaaggttggggtttgttgccaaggtaggcaactgtgtgattagagagttagaacttttagctccaaccctctgacctccaactaatggctattgaatcaagtatgcctgcataatgaagcctccataaaaaaaaacaaaaaagatgagggttggagagctgccaggttgatgaacacatggaggtgcagggaggtgcccagagaggacaagaaarctccaaatcccccttccccgatactttgtccggagcaactcttccatctgactgttcctaagttttatccttcataataaactagctaacataagtaaagtgtttacctgagttctgcgtgctattccagcgaattactgagccagaagagggagtcataaaaacagttaggaggcctggacttgtttgtgattggtatctggagtgggggcagccttgtagaactgagcccttcaacttggggattagataactggtaattatgggtagagtgtcagaactgaattaaactgcaggactcccagttaatatctaccaagaactgaagaattgattggtgtgggagaagtctccacatgattggtgtaagaagtggtgttcttggccaggcgcagtggctcacgcctgtaatcccagcactttgggaggccgaggcgggccgatcatgaggtcaggagattgagaccatcctggctaacatggtgaaaccctgtctctactaaaaatacaaaaaattagccaggcatggtggcgggtgcctgtagtcccagctactcgggaggctgaggcaggagaatcacttgaacctgggaggtggaggttgcagtgagcagagactgcaccactgcactccagcctggccaacagagcaagactccatctcaaaacaaaataaaacaaacaaacaaaaaaaactgagattctttgcaaagagcctggaataacttccttttagtcctggactataatgatgatgataaatatacctcgatgtaaccctgagatcccaagattcactagcccttgaataaaaaaaaggaaaaagaaaaaaacagtatattttttcgttttgcaaatcacagttcccttattaagatgraattgctgccawttacagagaagctatttgcctaagccaaaaatccatgaggttcacatggacttayagttacacaaattagaaacaaatgttatatttaaaaccatagagaaatgcccaggtgatgaaagctggggtgaaggagtctgcacattcatttcaaactgttaaaggatttgtgggccatgcaatggtcccttgcattagagaagtcaaagagctttgtgcaatcctctcctgtctgtgatctggaagacacgtgctcatcacagagctccagctgctccgagactttactcctttcttcagctgcacgcactgctctctcgcttttgttaggaattgactaattcctcctcttcctcttcctcctcctccttgccatctctaggcccagtcagcatctcttgttcatcctctgatcccatgtccagctatggttctggattcaacactagcagcaacagtggcgctgactccactttaggatcaataaatatttttctggctaggcgcagtggctcacatctataatctcagtactttgggaggccaaggtgggtggatcacaaggtcaagagatcgagaccatcttggccaacatggtgaaacctcgtctccactaaaattacaaaaattagttgaacatggtggtgcgcacctgtagtcccagctacttgggaggctgaggcaggagagtcgcttgaacccaggatgtggaggttgaagtgagccaagatcgygccactgcactccagtctagcgacagatggagactctgtctcaaaaaaaaaaaaataagtatttttctttctagccgtatatccaccttacatggtccctcaactccccaagcccactctgcctgccccatctcctccttccacatcctctcctcaacctagcacttggttggcaatgccttcctcgatcctctgccaaagaccctctagccagtgcttaccctgtctgttctctctctttacccaaagaaatacataaagtttgaccagaatggaaacagagatatcagtgaaaaaaggtgatttggggaagtgtgcaggcctaggaagacagaggcttgttcctttgcttgcttaaaatctttgatcaaacggccaggcgtggtggctcacacctgtaatcccagcactttgggagggcgaggtgggcgaatcatgagatcaggagttcaagaccagcctggccaacatagtaaaaccccgtctcactaaaaatacaaaaaattakccagctgggcgtggtggcaggtgcctgtaatcccagctactctggaggctgaggcaggagaatcacttgaacccgggaggtggaggttgcagtgagtggagattgcaccactgcactctagcctgagtgacagagtgagactccatctcaaaaaaaagaaaagaaatctttgctcaaatatcactttttcagagaacgcttctctaaccactctatttattttattattttattgtattttttgagacagggtctcactctgttgcccagactggagtgtaatggcacrgtcatggctcactgcagccttgatctcctgggctcaagcgatcctctcacttcagcctcccaagtggctaggaccacaggcgtaagccaccgtgtctggccagaccaccatatttaaaactggggacaagtcaggctcacacctgtaatcccagcactttgggaggccaaggtgggaggatcacaaggttaggagttcaagaccagcctggccaacttggtgaaaccccatctctactaaaaatacaaaaattagccgggtrtagtggtgatcgcctgtaatcccagctattcrttaggctgaggcaggagaatcgcttgaacccgggaggcagaggttgcagtgagctgagattgtgccactgcactccagcctgggcaacagagcgagattctgtctcaacaaaaaaagctgggtgcagtggctcacgcctgtaatcctagcactttgggartccgaggtgggtagatcacctaaggtcaggagttcaagaccagcctggtcaacatggtgaaaccccgcctctacaaaaatacaaaaattagctaggtatgatggcaggtggctgtaatcccagctactcggaaggctgaggcaggagaatcgcttgaacccaggaggcggaggttacagtgagctgagatcaagccattgcactctagcctgggcgacagagtgagactccgtttaaaaaaaaaacaaaaaacaaaaaacaaaaaactggggaccattggcaataatactcctatgtcccctcttccctactttgttttcctccataggcacctggcgccttttttttttttttttttttttttttgagacggagtctcactctgttgcccaggctggagtgcaatggcgcgatctcagctcactgcaacctctgcctcccgggtttaagcgattcgcctgcgtcagcctcctgagcagctgggattacaggcacgcaccaccaggccctgctaatttttgtatttttagtagagatggggtttcaccatgttggtcaggctggtctccaactcctgaccttgtgatccgcctgccccagcctcccaaagtgctgtgattacaggcgtgagccactgcgcctggccacctagcacctttaatatacttatttatttgtattgtctgccttccccaattagatcaaccatgaagacaagagttttcatttgttgggttctctgggcctagaggcatgtctggcatatagtaagcattcagtaaatatctgttgagtgaacgtatgaataaagaagtgagttcctcccagcaggcactgagaacattgggagtacagggttgcagctctctctgcagcaggagaatgtagctgcaataaagggaagtcaagaagccagagtccagccaggtgcagtggctcatgcctgtaatcccagcactttgggaggctgaggtgggtggatcacaaggtcaagagatagagaccatcctggccaacatggcgaaaccccatctgtactaaaaatacaaaaattagctgggcgtggtggtgggcgcctgtagtcccagctactcaggaggctgaggtaggagaattgcttgaacccaggaggcagtggttgcagtgagccgagattgcaccattgcactcccgcctgggcgacagagcaagactccractcaaaaaaaaaaaaaaargcagcagcagcagccagaggccactccagcatctcccctacctggcttgggtcagggagasggcagtgagaagtgaaaactcccagctacagaaaaggaaatatgttgsggggaagggagaaggaaaggtgtcttcatcaatgccggggcagggtagatggagccctgggcagggagtttggaccaggaaatctcaatgagggaaatgtgctgtcctcacctctccaagaagcgactggccaaacagagtgacagaggggataaaggttatgcctagggaggcatgtgtcagaggctatcatccactctgttgaacccacagtgaccagcaccaccatcacacaaacatgcctgcatgtgtgcacgcacgygcagtgtgcaaacctgatgtcagcctcactccctggctcttctgtccacaaacgctgtttctttaagtaccactttcagttcctccaaagaatctacttaaactcttaaattcctgatctctatagattttactaaagatttcaaaggagataagatgagagggttacgttgcacattctaaagcaaacaaattaaaatgttttgttagacatttccatatttttaagggcctccttggagctgccaggctgggagtgaggtttctctccctttctaaaccctgtgcccatcttgtcaccctcctggagctgccagcagacttcagattcttctccgatctacagagcagaaaaattcagccagcccttccttgtcttcctatccacagctgcctgcccagactcatgaaacctgacaaaatgcaaggtcttatcattacctgaaccttggacctgttcaaaaatactagttcctgagaataaatatccctggtgtcttcctgcccttcctgcacacctccagtggcttatcaaaatatttgtttcatgcgcacactgggctctcatttaagaggaatttgggagaatgttattttctaatctgcatttcacaccaggctccccctccttcctggggtgctagtgtcagcagaacctgatggggaagtgaggtctgggaggcagaggaggaaggaatgaggggaaaggggaagtttgggaggaaggcttctgagaagactggtgggagagaaggagagcctgcagacagaggcctccagcttggtctgtctccccacctctaccagcatctgctgagctatgagccaaaccagggatttacagggtagggagggtgggataggcagcrgcattagatcrgaggaatgagatggacagacctgggctgtgggctaggagggcagtcagctggcctagggtagcccgggctggtgtcagggtaaggagaggaagggagggatgagggctgattaatttttttcaccccacaggaggaaaagctttcrgactgctgaaggcccagcaggaagagaggctggatgagatcaacaaggtagaaggaagaactaagggggcagagccagggggatggggcgtggatggggagggcctaccctggctcttattttcccctccatagcaattcctagacgatcccaaatatagcagtgatgaggatctgccctccaaactggaaggcttcaaaggtgagggggaaactgtaggcggtggagacagggctgggggtaggagggttaggatttccacaagaacaaggcaggaacagcagagataaaaagtttacttttgtggtagcaaaaggggaacctgcctttattgccctcctgccacactgcggtccctttcccgggcctgcctctctcagcatcccctctagctccttacamcctagcggggcccctcaactccccaaccccacttcctctgcctgcccctcctcctccttccacgttgtctcctccacctagcagttggttggcaaccccttcctcagtcccckgctgaaaaccctcsagtcagcgcttatcccttctgctctctcccctcacccagagaaatacatggagtttgaccttaatggaaatggcgatattggtgagaaaygggtgatttgcgggggcagggtggtgtgcaggcctaagaagacagaggtctctcctacatgctccattcctcatgatttgggagggggcccacctaccacagtgggaggaaggagaatggggatgcggaagtgggagaggagagagagggtctccccaccttytccccatccccatcctctgcccccagatatcatgtccctgaaacgaatgctggagaaacttggagtccccaagactcacctagagctaaagaaattaattggagaggtgtccagtggctccggggagacgttcagctaccctgactttctcaggatgatgctgggcaagagatctgccatcctaaaaatgtgagtgtcaatttccaacctcccctgtacttacctgttttctcctcccccatccctacccttgtccacaggctcaacatttctacacgttgcccatcatcccttcttccatccttagagggacccttccaaggtcccgaccccatccctatccatagtcctggtccccagaaactccaacccctgcccttcctcttcccccttccaccctcacatccccatccccttctagcctttcctagcaccctatgatttattcccttgagaggagtgttccctgatccctgtgcctcttcccatctcaaccaggatcctgatgtatgaggaaaaagcgagagaaaaggaaaagccaacaggccccccagccaagaaagctatctctgagttgccctgatttgaagggaaaagggatgatgggattgaaggggcttctaatgacccagatayggaaacagaagacaaaattgtaagccagagtcaacaaattaaataaattaccccctcctccagatcaagtcagcttagtttttatttgggtgatttttttcctgggtttgggaaggagagacaggtcttgagggaaaggtggcaaggatttggccatatgaacaatccatcaacaacgctatagtgtgtccactacagcagatggtttcacgcaccaagggggattccagctgtgtaagacagccttaacctcaaagaatgcaggcaggwcaaaaacacatgtccaaacaaggtactcaggcccatgacagatttcatgaagagcaaggaataccatgaaccaacattctccaycactataagctttgtcactttgacaaatcactcagcctctgtgaggcttttttctaaaaatggggataaagtgacctatgctattgtgcctgacatatcataagccctcaataatgtttaaaacttgaatgagcyggggccgatggcttatgcctgtaatcccagcactttgggaggatggggtgggcagatcacctgaggtcaggagttcgagaccagcctgacgaacatgaagaaaccccgtctctactaaaaatacaaaattagcctggtgtggtggcgcatgcctgtaatcccagctacttgggaagctgaggcaggagaatctcttgaacccaggaggtggaggttgtggtgatccgagatcgcatcattgcactccagcctgggcaactaaaaagcgaactccgtctcaaaaaaaaaaaaaccgaacatacaaacaaacaaaaaacacttgaatgggtagatgaatgaaagaactggtgctattaaataaagcaaagaatttacagctgggcgtggtggctcacgcctgtaatcycagcacttcaggaggccgaagcgggcagattacctgaaatcaggagttggagaccagcctggccaacrtggtgaaaccccatctctactaaaatacaaaaaattagctgggcatggtggcaggtgcctgtaatcccagctactcgggagrctgaggcaggagratcgcttgaacccgggaggtggaggttgcggtgmgccgagatcacgccatggcactccagcctgggtgacaagagtgagactctgtctcaaaaaaaaaaaaaaaaaaaaaaaaagactggaaggagaaactcattggagacaatgactatggacatcccttttaagaattttgctgcaaagggtaacaaaacggtatgtgtggtagccggccggggagaagggagaagagaatcattttggaagtttgaaaacagaagtcatcttaaatcttactgagcctctgactaaaattctcatctgatttcygcaaacttttctgccttcacttttcataatgaataagccgcctcctttatttagccatatcagcctaggcacaggcccccaaactcatgcctccactaatctgttctctgcacctgagatgtacaccttcttctgaaacttgggtaagttctaactcgttcttcatatctatttatttatatatttttgacagatatctactccgatcattcttcatatcatttttttttttttttcctgagatggagtctcatgttggccaggctggtctccaactcctgacctcaggtgacccacccaccttggcctctcaaagtgctgggattacaggcgwgagccactgctcccgctcccggccctttttttyttctttttcttttttttttttttttgagacgtagtctcactctgtcgctaggctggagtgcagtggcgtgatctcagctcactgcaacctccgtctcccaggttcaagcgattctcctgcctcagcctcccaagtagctgaractacaggcacgcgccaccagtccagctaatttttgtatttttagtagagacggggttttgccatgttggccaggatggtctccatttcttgaccttgtgatctgcccgcctcagcctcccaaagtgccaggactacargcataagccaccacgcccrgcctcatatctcttaataagagtttttctagaaacatttctcaatcaccccaggcataatcatattttatttctctacttctttcttttttttttttttttgagatagagtttcgctcttgttgcccaggctggagtgcaatggcacgatcttgsctcaccacaacctccgcctcccaggttcaagcgattctcccgactcagcctcccgagtagctgggatcataggcatgcgccaccacgcctgggtaattgtatttttagtagagacggggtttctccatgttggtcaggctggtctcgaactcgtgacctcaggtgayccgcccgcctgagcctcccaaagtgctgggattacaggcgtgagccaccgcgcccatccttctytttttttttttttttttttttttgagacgtagtcttgctctgtcacccaggctggagtgcaacctccgcctccctggttcaaggaattctctgcctcagcttcccgagtagttgggattacaggcgcccgccaccacgtagggcaaatttttgtatttttagtaraaatggggtttcatcatgttggccaggctggtcttgaactcctgatctcgtgatccacctgcctaggcctcccaaagtgctgggattacagscgtgagccaccgcgccaggccttatttctctacttctataatatcctgtgcattatctccagcgccttcaaatcatagtcattgaatgatctgttgaatgggtataactctgatgggagcagagagttctagaatcgggtagtaagagacaaasgagggtaacagtactgcatttcacaaaatgaaacccattgttaagaaattacaaattcccaataatttcaaatataaaaatttattcatgaaaattataggttataaaattaaatgtccgtcttagtcgatggttgcccatattttgatgaacgagtcattcctagcctatctttgttcaaatgatttgcatacattatgcaaataggtagaactgcccgaagaatgcctacgctgcgtggtgcggacgaaacgcttcccggggcctttggattggtctgtctagccacctcatttgcatgacgtaatwtaataactggaaggccccgcccctctggtgcatttccccgctccaaccacctcctcaaactcacggcraagggatgcgagagctggaactcttaccaggcctgcggaaactcagccctccggcagctaatcccgcccgccascccccgtcctctctctctttctccctagctgaaggcgccacgggccgtgtgtcgttgccttccacttttggcgtcccaacgtctctccgctcccatctttctactaacgtccgacgcacgctccgcctctttctcccamattcgtcgtgtaaattctgcgtcccaaccgcccagccgacctgcaccgcattcccgccccctcaacacggctcaacggccgacgctgggggcccgcctccttagccaatcggggtcctagtgcccttaagtccctcctctttatgcaaataacctccgcatgctccgcgcgcccggcccttttttttttttttttaaactaaagacagccctggaagtagagggttagggtakaaagtgccccgccctttatgcaaattaaggggcgtgtctaggcgcggagggaggtgggaggtgggagggggtgctcccgggggcggcggttgcccggatgggccgttagtcggggctcagccgcggagtgagcgagggagacgggaggagccgaacccggcgccatccgccgccatcctcccccgccccaccgccatcccgtcccggggagcccctaggcccgggtcccggatccccgcgcacccggccagktgagtctgggtgaaccgtkcsctgacgcccttttccggcgcgggagaggtggtggcggtggcggtggcggcggcggcggcgktggtgggccggggggaggagaagctgccattagccgccgccattttgtcctcctgctgccgggcctgcttgcccctccccctccggtacctctactccgggacccgcacctccggcagttcattcaggatccgtagtctgcccctaaccacccaccgtcttggcttcagggggtgacccctgcgcctgggtccgtaactccctaccctccgctgcgctcctggcttttcacccccatttgtgggccccctccccggctgccgccccgtggtgggccgcgcccgacggttctctcggaagggcgcttttcctccatattggaccccctcctatcatccagcgctgtgttcccccctctggacgcccctcttcgtgtcgagccactcccactctagaatcctgcttttatcccagcatctttgctttctatgttgctcagtcgccctatgtctgctttttcatttttcctkktcctcgtctcctttctcccccaaccccgtttttcttcttgggcctctgcccccttacttcgttgtctacatcstttttttttttgccattcctgtttccatatattttccacctgctttcgtattcattattttctgttagttttggtctattcgctacatgactcttgtattcgttttcccttcatatatttatcttcacagattggcctcctcaaacacctacgaagcaacatccatcttatctctagcttgtcataaagttctttctccccaattttagctttcattctgggcctgtctggatttccctgctttcttccccactatttctcatctctttacactgttcccgtccataaacgaatgcctggtcactctggaatggactgagagacctgtcgtccggcttgcttagggagctggaggtatcgagtaaagaaacactggtgatggacatttttaatgaggataggaaaacgragrtggctctggccttggccctctgttttctggcccatggttacagggtgctaaggtggctycataatgctttttctcagttcttcatatggtaaaacagtatttcatctggaggcgattttttccaggagccaatacaggagcaagtttaggaaaagatgggatatttcaaatacttgaggttcctatagcctgggagtatgtacagccctagttgttctatgaggatttctctggtaccaacccccattccggctgagcaagctcataaaatccttaaactcccagcataccttcctgcaaaccttcccagatggacacgaggctgctgggctgggagcctggggtacagggccctgggggcatgattagggagcttgtgtccaataaacagggaatctaaagtgttgtttcttcttctctgatggaattgtatgcttcttttttagttttctcttgcttgaatttgtcctgttgtaagtctctgaaacgattttggtggagagagaagagattattacttgtagggaattactctttgtagacaggcacaaagggcagagtgtttatactaggaggatgctggatttttacttagatttccttgacaaagktgtctgggggaaaggagggaacatggcatttgagctatgagggagctaagtagatcatggttgcttragaagagtgggcagtttacatagactggaggaaaagacaccagagggcctcatatctgagtccctaatgataatgcaatggagtttttaagtttctgttatggtctgtacaggggacagagactgagacacttgmtgtctggcccacaggctctggcacgttttgggggaggtgcctgcaggacccaacatactcaatgagcttccagcgcaatgtccgatcgctcggggccgactgccaagggaaaggatggaaagaagtattcctcgctcaacctgtttgatacgtataagggcaagtccttagagatccaraaacccgctggtgagagtcctgcaaagatgcttctgatggttgaaagctaggcatgcatggggcatacgttttagagctctttaaagggaagtggctgtagtagaaataccaaaagactagaggagatttcccaacttta

SEQ ID NO: 10048 - DNA, 17797 bp, Homo sapiens
cagcagcacccagaacctcgtagtagcgctgcaagaagggctggaggcgactctccagccgctgtagctcctggagcacctcgacatactccgcaggggaaggatggctgtggacaaacccaaggggcaatgagccaaagccttcctcagattcccaccctcacagtcaacagggaccacatgtgccctctttctccctggtctcccagagccctggcccaatccttctctggaccagcagagcttctattctcttcaacctccgcctcccaggttcaaacgattctcctgcctctgcctcccaagtagctgggattaagttgcctgccaccacacccggctaatttttgkttttttttkttttttttttttttgagacagagtctcgctctatcacccaggctggagtgcagtggtgcgacctcagctcactgcaagctccgtctcctgggttcacaccattctcstgactcagcctcccgagtagctgggactacaggtgcccgccaccatgcccagctaattttttgtatttttagtagagacggggtttcatcatgttagccaggatagtctcgatctcttgacctcatgatccacccgcctcggcctcccaaagtgctgggattacaggcgtgagccactgtgcccggcctgtattttttagtagagacagggtttcaccatgttggccaggctggtctcgaactcctgacctcaggtgatctgcccgcctctgcctcccaaagtgctgagattacaggcatgagccactgcacccagccaaagcttctattctttactcccacccatgagaggatagggagaagaaaatgaactgctcccaccctccccaccacaatcctgcacctacaatggtgaaagactaattctaagaaagagagcaggccttcgtgaactcagaggagaattccgatcaggctcaggagataccatttggatttccttgccrtagggagagcagcagttcttctcagctgcctgtcctagcgtcatttacctataccgagagagcccctcctcgcccctcaatgctaacccttcaactaagacctccaagtaatcctttccctcccttgccatggttcatttccttctccccatacttcacttaggattccccacccactaaagattccctccatctctcacttgggtgcatttgtttccggggcaggtgttgggcccgctggggctgggccakgagtgagctccgggttctgggctggggcacgctcctccacttcttctgcctccatgggctcccggggaggtgcttcactttcaactggttctgaygtttgagagctcaaggctactggctccggggtcacagccggtggctgcgggggcggctgactgtgctgcggttggggccctcctcgacactgaaggtaggggagagtcaggataccaaaggcagggtaagactgctgcagaggattactctacaggagactgaacagagaaagtatcctaactagactccctgaaggcatggctctgcaattttatctccgactcgctagcaactagcataagactgacacaaattagatgcataataagcatctgtaatttttttttttttttttgagacagagtctcgctctgttgcccaggctggagtgcagtggcatgatctcagctcactgtaacctccgcctcccaggttcaagaaattctcttgcctcagccttctaagtagccaggcctacaggcgcgtgccaccacacccaactaatttttgtacttgtagtagagacagggtttcaccatgttggccaggctggattggaactcctgaccacacgttatccccctgccatggcgacccaaagtgctgggattacaggcaggagccaccacacccggccacagcatctgtaatatttgtaaataaatttctaacaaagagtagagattgtggtttcctttcctccacaagttggtttcccagcctccacaagttaagagagtagaatcctttaattgaaaagagatgccatgagactaagtctgaaacaaactccccagataccaggcaccaagaggattggcagaaatgagagagcctcacaaagatactttttctgcccaaaagaatgaatactgcagagaagactagattatgaaggccaaaccctgtgratgtggccagtgaagccctaactcccaggctgagagaaaagggagagggagggtggagagagaccctagccagccttgcccacttacctccatccgggatagtaaggtctgtatatccctgatcatgtgctgagccatcaccagccgtacccggggctcactctacaatgagagaaggtttatcagggtaggttrcagatgaagccatgagttctaccacctactaaatcaggtcccagccatctctcagccaggtccaccccacctcccagcctccttctcccagatccccttccctgaccctcggaggcccctcaatacctgaatcggggcctgttccatgttgatgtgaacatccacagcagagccgtcactctggggaaagggtaagggaagttgttctgggagaagccaacactaaggcctccacacctccaattcattccctggagccctacctccttttctccttaaagactgagaccaatagcacaccacagggccccctgaacccaatctaaagatggaagcatctatcttattaattccctggtgctaccacaaccaaagctacccacaaaagccctcccctgtggaacataagcttacaggaagattgaaggttccaaccatgacatagctgttggcattccggtcatgaacagaggccccaggcccccgagtaccagggggggatcccccaccatgagtggctgaggcagaccccgtcccagaagatgccccagaagggaggtgagtctgaggaggagcccgttccaccaggtggataacctttcccccaacatctgcagaaaaatagacacacaccaaaacatagtatgaacaggtaaacccatggcctcagttcatccctccagacagtagccccaacctctgaactgcctccccagcccccttactgtattcctgaagcttcttatcatcttgcagaactcgtccctggtaaatgagccgttgtttttcagatgggatgctgacagaggcagcaatgtgctccttaaactcttttacattcatctgaaaagaagaggcatgcacaggaatggaaagaatggaggaaagaggaagaacaaagacagacaaccgagttgtggaggtgaggggtaaaaaccaccacagaatcactacccgtttgtcttgaccgtgagatcattactgtgcaaacccttaaactaaagtaacagctgtcaaaatacagacaataaatttggcttggcgcggtggctcacacctgtaatcccagcactttgggaggccaaggcaggcagatcacattaggtcaggagttcgagaccagcctggccaacatggtaaaaccccttttttaccaaaaatacaaaaaaataagccaggcatggtggtcgcctgtaatcccagctactagggaggctgaagcaagagaatcacttgaattcgggaggcggaggttgcagtgagccgagatcgcatcactacactctagcctgggtgacagagagggactccatctcaaaaaattaaataaataaacttaatgaagctcaggttatagatccaggaaaaataacacggatgaaaaacaaaaaaaaamcacatggacattatattatctgtctggcatccaagggagtatgtgtctagagacatcagtgacccctttccaaacacaagatgataccagtttatttaccagactctcctgtgatttccaagattaaaaaatggcaaagaagatggggtctggtatcaggttamtgaagaaagactaagaagataagaaagcaaaaaaggtcccagcacagtggctcacacctgtaatcccagcactttgggaggccgaggcaggtggatcacctgaggtcaggagttcaagaccagcctggccaacacggtaaaaccctgtctctactaaaaatacaaaaattagccgggcgtggtagtaggcgtcgtctgtaatcccagatactcaggaggctgaggcaggaaaattgcttgaacccaggaggcagaggttgcagtgagctgagattgcgccccagccctccatcctgggcaacaagagcaaaactccatctcaaaaaaaaaaaaaaaagcaaaaagagaaatatttttcctaactacaaactgactcttgggaagtaccagagtatttatatacatctaatcacaagtctatatatggctttcttatatccaggtartatcacattttagaaaaccatggaccaccccacatgcaatttgtctccaagtattacaggagtaaagacacagatagctatgtccaaggctttaagctcaagagactcaagctatgccataaaaattagtaatttcactcaacagtctatcaaggmcctatctccattatgggttctgatttctaccctttaaraacacagcatagacctgaccaatgtctatcagtaagacacacttgcttagggttcctgtgctgtttcccttcccaaaggccagagccatgcctgtccctttgggttggggtccacccatgatgatgacacacagattcttccttcctctgtatttccctctgcattaagttctatccatgtggaggacagaacaaaatcagcctcactcacaaaacatcagaaaacgttctactggaatacraacaaagggatcaataaaaakaaaatctgaggccaggtgcggtggctcatgcctgtaataccagcactttgggaggccgaggagggcacatcacctgaggtaaggagttcgagaccagcctgaccaacatggtgaaaccccgtctctactaaaaatacaaaaatcagctgggtatagtggcacacgcctataatcccagctactcaggaggctgagataggaaaatcgcttgaacccaagaggtggaagtttcagtgartcgagatcgcgccactgcactccagcctggaagacagggcgtgactccatctcaaaaaaaagaaaaaaaaagaaaatctggtgaccagaaaatcaagctcatctctcaggctaaggggcctaaacgaggaaaagctaaaggtgtcttccagaactagtgaggtgtctcacctgggcccccacaataaaggtacgagtttgagagtccaaggtcttcaccaacacctccaagctgtcaggctcctccacagcggtactggtactatcattaggctccatggccgacaggtctctaaagaagaacgaaggaaggarggcccgctgttgcccagaccagagtgtacccgaaagactccctagcattaatccctgccccaatacctaaaaagtwtctcctgcacacacacacattcacacctgtccccatcccccttctgattccggggcacagggagagaaacacaaagggcaggagatcgacggcttagggagctggaggacgagaggtgggaggggctccacgacgccaatcacaataagcagggagccagtcagattaggaaggaagcacgagaccagagactagtgtcatcaccggtcacggcaggacaagcgccccagaggtcggaaaatcctgggacaacgcgaaagcggtggtcgccccacactctgcggagaaagtggtttcgcgcacgcgcgccacgcccatcgaaccctcctaactcactatagacccgaaacggcactcacggggcgacrgacctgctagctgactgcccgcgtctactgccttcccacggtgttccagcagaacggcacaactaacccacagccaaacacacacacacacacacacacacacacacacacacmcmcacmcaccaccccgcggctccgcccccgacttccccacggaccgtcacttccggtctcccccaaacctgccaccgacggccacttccgtttccccgatagtatttggggatctcgaagcgatacttccggctccccccaggtccccaagctttacttttgtggggcacgacgagaaagtccgcagccccaaacagtgagtttctgagggcgagtcgggccggggccggcctakgtgggagggagccgagcaccccgaggagccgccaccgctgtcgcccgggggaccgtactacgcctgcgtgcgtcgcactacggatgcgtggacacttaagcatcgccccaccccctyccccctctggcggcgttcacgtctgtgcgcgcgctkgagcgctagaagattgaggtggctaccgtaaatgcctgaaaaacagtcaccagctgggactctaccactgcctcgagaggggctatggacggtcgtatggaccttggactttggagatgggggattatgccacattcatctatgtttaaatcttggcaggctgataatttcaggcggcactgtcctagccagctaaaactcttctccaccctattgccctcgctgcgccctttcttctgtgcctccggaagttactctttcagtaggcgtttgggggcggcactggtcaattttgttctcggttgcttggttgggctagatttcggttctgccgggtgggcgttttaagggctgtgggcgtcacattcgtcggtgtgtggccaaggggacatgacacgttttaggaaaagtaaacgtgctactaagttgcacgacttgtcaagaaaagaggcgcttccgagtttgagaattgggagcaaatggagtccgagtggacagaaagacaagaccctgaccgtggggaatttaaaggccggccagcgtgcttccgaaggccgggggtggaggcattacckcctctccgtgccctcttctcttaacctgccctgggccaagggcctcggccccgcgaaactgcgagtcctccagaaagacacatcgctgttggggtgtccaacctttctgggattcgtagtttatacccaggtcctggttatattttagttaagagttctaataagcagctgtttaatgagcacttgtgccagcccatatactacgggttttgtgtattattttaaaaagccttttaacgagcttttaacattttttaagtgagtacacttagacgaacataagtgtcagaattgacaaatccaggcctacaggactccagatcgagcacttgtactttactgccccaataaaaagctgttaacattttagcttatttttttgagagagggtctcgctttgtcgcccagsctggagtgcagtggcgcaatcacaactcactgtagcctctgcctcccgagcccaaccgatcttcccacctcagcctccctagtagggaccacagatgcacaccaccacacctggctaattttatttttatagagatggggtcttgctatgttgcccagcctggtcttgcagacttggcctcccaaagtgctgggattataggtgtgagctactgtgcctaaccacattttagctttttattacaaaaattttcggccgggcgcagtgactcacacttggraggatgaggcgggtggatcacgaggtcaggagttcaagaccagcctggccaaaatggtgaaaccccatctctactaaaaatacaaaaattagcctggcgtggtggcgggcgcctgtaatcccagctacttgggaggctgaggcagagaattgctttgaacccgggaggtggagattgcagtgagccaagatcgygccamtgcactccagcttgggcaacagaacgagactcccatctcaaaaaaaaaaaaaaaaaaatkcaaacattacaccaaaatagaacagtattaataaactctaatatactggtcacccaaattttgtttgttttttaactaaatcgcaagcctcagccctyggcaaattttttgtggcagtccatgggatataaatttatcaagctaggtgtggtggctcatgcctgtaatcccaacactttaggaggctaaggtgggccgactgcttgagctcaggagtttaataccagcctggggcaacatggtgaaactccgtgtctacaaaaaattagctaggcgtgatggcgtgcacctatacctcctactcgggaatcatctgagccggggaagtcaaagtcatgcctgggcgacagagtgagaccctgtcttaaaaataaataagtaaataaataatctatcgaggaagatccatctctcacagcattaactgctccagtcacttggtgctatccaaggacaacctatttggcaattcttactgcctattatttgagaacttattacccaccagaaactaagtgctttgcaaacattactattaattatagcaaatatatactttggamttaccatgtgcaagtctttgctaagggctttatgtgcattatttcatttaatcctrtaagattgatgatttgccaattttacagatgaaaaaacagacatagcagttaggggttggtggtgttttgtttgtttggagacagagtctctgtcgcccaagctggagtgcagtggcacaatcagggctcattgcagcctcgacatcccaggcycaagcaatcctccctcctcagcctccctagtagctgggactacaggcgtgtgccaccacatcggctaatttttgtaytttttgtagagacagagttttgccatgtagcccaggctggttttgaactcctgggctcaagccatccgcccaccttggcctctcaaagtgctgagattacaggcatgagctacctgccctgcctgtagttagggtttggacacattctgcctgacaccaacatctatcctctctaacagccagattacatagcctctttgtagtaataaatgttgagtgaatgtgtcagtgaacactgccagggtatacatatttttctaattgtaaactaaagagagcaatccaccgtgccccagcacctgcatcatacctgttctaaagcatttaccaagttgtattgcaatggtttgtctacacagctagttttccctctaacgacttcttcaagatcaggggctatgtcttattcgtttttttatgtccccggggattagctagttcttgggaaacaactgggacttgggattcaaaacagtttgctaagtgaatgaatgagaggcccagtcaagctacttcccttcagtgctgcacagtgcaacaaataaccagctcagatacaggttcaaagaccacaggcttctccctggacagctcagctctcctcataactcctgagaaaccctggacatgccagggtgtactatggagtggttgcatccggaagagggggaggaagtcccaaacactaagtaatccaggtttgggttggaaaacaaggttgaagttactcattagcaggtgaaagggtcaagggtcgaacgcaagggagctgaaagcagagtggactgagcagccagtaggggagagagcagttaaggcacacagagcaccagctccctcctgcctgaagatgttccaccaaatttgggcagctctgctctacttctatggtattatccttaactccatctaccagtgccctgagcacagtcaactgacaactctgggcgtggatgggaaggaggtatggactgagattrggggaagcctatggtggaggctctgagggacttgggtggatggcctaggatgactggagaccatcttgggaaaggaagagaggaagggggtgtgagtgttgtgataatgaaagcaagaagaaaaatatcagtactgtggccatcaatgcagaggcatggcagaattggggggtggggtggttacccaggttgactggggaggggcaaagaggaaaagtcatttaatgactctttgtcatggatccaatccccagttggaaagaggaaggcagccaacacctctacccctaaatcttgctgttttgactgatgaagaggttgaacccatcctgtgctggaacccaccctcttttgctcccttcattgtctctccagttcccagaggtccacttgggccagtggtactttatcgcaggggcagctcccaccaaggaggagttggcaacttttgaccctgtggacaacattgtcttcaatatggctgctggctctgccccgatgcagctccaccttcgtgctaccatccgcatgtgagtggtaaggaggcagaagcatcactgggttcagtctctgcccaaagtgtgagaatccacccaccaagagctggcctcttagctggtatatctactatgcttggcccacggaattcagtggctgtattaattgccctctggagaaagatgtgcctaaccaatgcttggtagcttgaaacccaaggagagctgggcttcaataacaaatacaatggagtaaatagaagccgggacaggccagacgtggtggctcacgcctgtaatcccagcactttgggaggctgaggcggacagatcacgaggtcaggagatcgagaccatcctggctaacacagtgaaaccccgtctctactaaaaatataaaaaactagctgggcatggtggtgggcacctgtagtcccagctactcacgaggttgaggcaggagaatggcgtgaacccgggaggcagagcttgcrgtgagccgagatggcgccactgcactccagcctgggcaacagagtgagactctgtctcaaaaaaaaaaaaaagaagctgggacactatggttggggtgatgctcattctttcctccttgccaccaccacctctgcaggaaagaygggctctgtgtgccccggaaatggatctaccacctgactgaagggagcacagatctcagaactgaaggttggttcttcccagccctcaccctcccttgagtttggttctgcatctctgttctcatacttctcccacctgccttgacaggccgccctgacatgaagactgagctcttttccagctcatgcccaggtggaatcatgctgaatgagacaggccagggttaccagcgctttctcctctacagtgagtagggatacaaggcaggaagggttggagggaaacaagggagggcaggagaactmctcactctgggtcctatgayaccctcccaggaagagctaggtgcttccaggggttttgactggcctgaccccaccttgcccttccagatcgctcaccacatcctcccgaaaagtgtgtggaggaattcaagtccctgacttcctgcctggactccaaagccttcttattgactcctaggaatcaaggtaaggkgttaaaatctcataaaacaggattaggactcacmaagtcttctggtgttacagggtgaaagaggctcgtgtgatgtcaccagagggatgtggctaagagctgtgatgtcacctgagggaggcaggatgggttctgggctactcaaaagagaggtttctgagtttgcactggataaagggggcagagggtcatacgtggagggaaaagagccttagagactcccctttgacacagggaatgaaagaacacgttctcccccaccccattactatcaactttgcttttctccctggacttcccttctgtccttctttttccctccccccatcacagaggcctgtgagctgtccaataactgacctgtaacttcatctaagtccccagatgggtacaatgggagctgagttgttggagggagaagctggagacttccagctccagctcccactcaagataataaagataatttttcaatcctcatctcattctggggtttgtctccagaygtcattcccactcctcccatttcaacattccccctggatcctctaccacctaaactcccagctggacggtgtcagtaagaacagagtggcagtaactctcactttgtagtgktwtatttaggatttgatgtgacacagttatttattgctgagtgagcaaacccctagcccccaagtggggactacaggcttcagtgcttcccccacactgcctgagctaccagcccttctgcactggccctcctgccaatactgcctgcactgtccccactccctctggctcccatgatcaccagatccgccctgcaggctccctgtcacctgtggggccctatccagaccccctaatccacttgcctagcagccccactcttccctcgatggctcagatcctgagatccaaggaacaccctgggtttcccaaccactctcttactgcagaggtctgtctatcctgccctggtctcctccaccccaggagagttttcaaaggtagagaggaccctttggtctttattcaccaccatcatacttttttttttttttgcttttaaaaagtggaggtggaaaaaaaaaaaaaactgaaggtgggagaaaagtaaaagcaaaaataacagctggtgaatccaagagcagtgccctcactgtccataaacacaaacaccctaaatagttctgttctctcctgtgtatgaaggggggccctgcaccctcgtactcgggtttcttccccatccctgaggtccctatgcttacaatttgggtcatgcctcacacttttctcctaaagcccacactctcttcaccctttgcccccaccccacggtcacagcccctttcccgggtctcccctctgctcctcaccttccctctccaacccctcactctcccagtcagtggccgcctcatccccattgggctcccggaggctgacagccagcaccaaggcctgcaggagaccaaagaggcaggcgaagtgcaaagggtgggcagtaagtaggctcagaacagcatggagcccatgcagggcagccaggaaggacagtaggccatgtagccagaggcccagcggtccacgcaggcccagtgtgtccaaggctgcccgcagtggtcgtgagcacagggccagcagggcagaggccagcagctccagaagatgcagggtcaggttggtggagatctgcagacactcttctgggccccccaagtaccgggagggagctcctggttccccccgcagccagcccaacagcttctcacgcctaccaggtttctccaatggggctcctggcccagggacgctcagtcccccttcaggggacacccctggtctcctggtgccacctgaatccacatgatcccatctgagtttgggactggcccctccagcctccagtctcccagactcttgagtgctagagataggctggtcccasttgagggaatccattcttttgctccctagctgctcaacttggggctcctccttgcttggttcggaagcagcccyagaaaccctcaatgcccccgagtccttagtcttgggatgccccacatcttccatggtttctggggcactatcccagtcacttcctgaattctccgaggagctgtccacccgtctgggttctgggtaaggcgggtcaggcctcattggtttccggcggccccaagggcgaggtagccagccaccaagccgtcgcaggaacatggctggggtgtgtaatgggcccccaaattctgaggctgcttcctggcactactcagactctcaggatctcctcagaagccagagtctttctggctcagaacaggtatttgcctggtgatgcagtcctactctgaattcagaagtggctcctcccttctctgaatagtcatgcagcctcaagtgtggcaagtagtttgcttcctcttcagttctggggtaaaggggggcatacccaaattcattcaccatccacacccccacaatctgagattccaagaatctcagatctgacaaggcctgggtcaccaccagagagtcctctctgcgtttccggatttccttcccagcaggcagcaccccaagtttcactcaccaaggccacaccccamggtgtcccagaaactggggaggcagtgctccatccaataaagcgggcaggaaggtggccccaggtcctaggtgctcctggatcgtgtagtctttaactgctgcccyaagggacctcaaggaataggaattctctttgttaggaggtggaatgaaagtgtccagcaaactccagccagcagcgttcgtcccttgatttagagggctatgatttctacaaagtggcccgactggcccgcgaacacgcagcagagacgcggcctccacaaggtcagaactaagatgtcctcagagatccccagttacgaagcaaagcgcgggcctacttcgggacctacgcgtccgggcgctgtgcgcggggaccgctcccgggcccagcgtcggggccgcggccttggggagccgccgggagccgcgaagcccggaagcagctgcaccaggactggaaggacccgcgggggcggtgccgcagctcatggggcggaccctgcgaatagaccgcccccgtataccccgcgctgtctgtgcgcgccggaccgccaaaccgagattagcaaggaccaggaccttaatataaacccagctccccattttcccgggtttctcatgcttccctaaactyggtcgccccctacagccccctgcccctgggttcttttccacatcccccaccactcctccatttcgcatccaagacttcatgaaaggctttcccagaaaagaaaaaatgaggagtcttgcgacttgaacagccctcccctgcccgtctgcaaatttgaattcctggatttcacaacagtgagctcttcttgtgcctaccacccggcatgagcaagacaagggggtgggtggtgggagagtggggaagtgtgggaaagaaaagtgtagacaaatgggtggaacaaagaagtytaaagtttagatttgggggctagagttctggtcccagttcaactaagtgtacaagcttgataatcgtgggccytcctatcacactggcctcttccagcaaaaccctacccattctcatctctagaggccttgacttcccttatcaccctgcattataatatttgataacatgggccgggagtggtggytcatgcctgcaaccccagcactttgggaagccgaggccggcggatcacctgaggtcgggagttcaagaccagcttggccaacatggagaaaccccgtctctactaaaaatacaaaattagctgggcgtggtggggcatgcctgtaatcccagctactggggaggctgaggcaggagaatcccttgaactcggggggcagaggttgtggtgagccgagatcatgccattgcactccagcctgggcaatgagagcgaaactgcatctcaaaaaaaaargaaaaaaattgrtaacatggcactttccctctccagctgtgaactctttgagggttgggaatgtctttacctgtattcttggcacatagtatatggacttatgtttgtgaaatcagtgaattggctgtagtcagggaactcctcctggggkaagtgagacttgcacgaagctgggcaattcttggtccagggggsttgaaagaataggtgggggactcccaggagggtctgggacctgaaagtgaacccagattggcagggaggtgaccttatcatgccacctggagaggctgccccttctgactcaggtgggacttgcatgtggctcccaggcttctgtttggcttcctcaaaatagcttccagaaaagtgaataaaccacaaatggttgatttatttctgactctcagcccgtctctcacgaagacagagcctattgaccaaaaacttcaggatctgcatctgrgcagatcccaggaaggggaagtcaaagggcccaggtcagagrcccaagttcagacttcagcagcagactagggtcagactttaccaaagtcagaactcgaggttcatgtaagtccttagatcccgctcccaagccctgtctttctcctccctccttctctcctccctccagctcagtgtggccacccgagggggtctctccctcccagccacagctcgkgtatcccaagctgggaaatgtgtcactcggggctggggtgctgatctgtagcctagtccttcctggtcyctcttgaggacagtggggatgggattggcacggccctcaccccggggtcccagccccattcctggctcccagccccccctcagcagcagtttgaagcccgggctggagatgggcaccccaagtggaaggttgggaggctgaggaccctgcgacagtgacagcaggtgarcagtggatgtgcggtggttggaatcttggaagtgggtgtcacagttctcgcagtactggagggagggagtaggagmcctgcagagaaagaagaaaaagcattaagggcaggggaaggaaaaggggaagagttgaggcctcagagggggctggcagggtagaataggatcttttcagcttttctgctaaggaacaaattgccagctaggcatagtggctcacgcctgtaatcccaacactttgggaggcagaggcgggcagatggctttgagctcaggagtttgagaccagcctgggcaaaatggcaacgcctgctttttttttttttttttttgagatggagtcttgctctgctgcccaggttggagtgcagtgccatgatcctggctcactgcaacttccaccttagcgattctcctgcvtcarcctcccaagtagccgggattacaggcacatgccaccatgtcccggcaaagcctgctttctacaaaaaatatgcttgagcccaggaagcggaggttgcagtgagctgaaatcacaccattgcacaccagcctgrgcgacagagtgagatgagtgagactttgtctcaaaaaaaaaaaaaaaaaaaaaagggacaaattgccttccttcctacttaacagtgagggatccaggctggtccaaaggtggtggtgagttatctgaattaattgttcactcagttacagatcaaactccttactccacttttcccctccttctcactactgcacttgacttgtcttaaaaacaaatttctttaaaccattgtgggatccagagcagaatagttgaaagaaaaaaatggtaaccagacctagcaaactcttgggcaaggggagggacattagtcataatgactatagctaacattcatgtattgcatactatgcggcatgcactattctagcattttacatatattaacccattgaatcctaacaacrattcttactacccccatttctaagatgagaaaactggaacatgtagacattargttgtttgcccaagtaagtggaatcaggctttaaatccagggagctcatgtttataaccacttgactatactaccctgtcaacctacacatgaggataaggaaagaactcttcagcactgtgctggggcgtctggtgtggtgtggctgggagaggcagaacacaatgagacatgggtctgagctaaagtttccccttaccggttttccgggctccttgtctctccatggctctccctgaccatgcgggctacctcagggaagccagcttcttcagcgagctgagccgcatccctgccactcagctcacagacccccacccaggcagccccacggcccaggagatagctcacagctgccccctggcccgctcgagcagcacacatcagtggggtccaccagaaggcatcccgggcgttgatattccccccagctcctcctgcctcatgcggttccagcagtctcctaagttctggcaggtccccctcctgggctgccctcagtatccggtgagtcatcttatcctcagcctcaagggatctcccttgtccatgtcttcct

SEQ ID NO: 10049 - DNA, 14915 bp, Homo sapiens
tggactctggcttctcgggctgtggctgctgctgcccatccttccagaggtcgctggggtcagtggctggggtgaaggtgatgagcaagggccgggacatggcttttgggagaactgagaaaatgataccaggcaagggaaggatgagacaagtaagccaagctcgtggtgaccctgtagcaaccacagcctcagagacctgctgggatgagaaaaagtagtcaaaaacactttcctgccactaaagtaaccccacaacttaggactctgcagggcctaagggagagagactttgcgtaaaaacatggaaccctacaataccgactttgctccttagtaaagattaataaaactccatgagactgttgtccagaggtcctgcgtccggcccccacccccatcctcaccaacaataaacaccagcctctttctgaaaccactttcccaccccgtaagacataccagtaggaaaaaaaaatcagcctggccctttaaktcttccgcgatcccatttcggagtttcctcttccyaaacaaaaatagatgggtcactccctagaagatctcggggagagtctcctatacgtgttgctgtgtagcttccgtaccgcaaaatggcgccattctaatcagaagagttgacacaatcaaawagccacacggcacgaagacgcatgcgtggcgacaacaacaacaaaaaccacaacccacattacttgagggctcgggcgtgcgcaaagctccgggttcagtttcccgcgctggaactttttcaatagtaaacgagcaaagctccgcgcgcccaggtggcgcgagcactaggatctgtcggttggggtcctacttttacataacgcccccacaatgcccttcgccttcctcaacgtggcccccgctccaagcccattttctggagccaggaatccactctgtgggttaggaaaggccctcaggaggcggagggaaacctgtggaatgccgagaagccgtgtaatgaaataacgtcacgmctgcccctcaccattactctgaccagggttcgaaggtcacacttagagcctaagrggaaatggagaagtgcaaagggacgagcagaatggctggcaccacctcaggttagcgcamtgggacgttccagttctcacaccgcccaccccaccccacccaagtccctacgcacggagccaagccgcacctctcccctcatgaggcaggagcccggaggaaacagtatgcccgtcaagggtctctggcgggactgattcgcactaggggcccaacaggcaataaggacccagcggattggccgaggataggccagtcccctgggcagcagcgcckcgccgggactagaggggaacgtgaggagagctgcggaaagagatccagcctggctycctcctttccccgccctaagtcagcctcttcacccagtgagcacaaaactgtattgcccagactcccgggccccgaacgccatacctggcttccgcttccggtggcttctcgttgtgccccgcccgcaagcgccctcctccgggccttcgtgacagccaggtcgtgcgcgggtcatcctgggattggtagttcgctttctctcatttagccagtttctttctctaccggggactccgtgtcccggcatccaccgcggcacctgacccttggcgcttgcgtgttgccctcttccccaccctccctaatttccactccccccaccccacttcgcctgccgcggtcgggtccgcggcctgcgctgtagcggtcgccgccgttccctggaagtagcaacttccctaccccaccccagtcctggtccccgtccagccggtgagtctgaagtcgtcgctgctccgagtcccttgtcgctgggagcggcacatggggtctccggactttgatgtgggggcgggggaggaagcgaccaggtccggcacgaaggagggagaggtggcctgaggagcggaggggggatgtgtggattccggtgaaagggacctgacaatcgcccccaacccgtgagaaaaggaggagcccrgttcttgcttgagaatgataaacttggaaacccttgggaaaggcgtgggggtcatgcagagacttgtattggtagggagcctgagtcgaggtccctgccggagttgacacagaggagagagggccctggccttcgggagctccagggatgtgggtcgggctggtgggtcaaagtatctgttggcttctttcaagtggtgggaccccaaagaatgtttaacttcaaagaaaaggggctgagatgtaaattagaggagctggagaggagtgcttcagagtttgggttgctttaagaaagggtggttccgaattctcccgtggttggagggccgaatgtgggaggagggaggataccagaggcagggaaggagaacttgmgctttactgacactgttctttttctagctgacgtgaagatgagcagctcagaggaggtgtcctggatttcctggttctgtgggctccgtggcaatgaattcttctgtgaagtgagttctcttcaacctccctacktgccagcttcacatatcttcccaccagacgttccttcacatattccacttctrcactgttctcttacatgctatttgaaaacttcctatcagcaaagagtcccccctataaaccccgacgaacctgtgctaaagtggcaaaactggggcccaagtcctgagtctgccaccgtccagcaatataacgttgggctagtcaatttgtgtctttttcttttttttgagactgggtctcactctgtcaccgaggctggagggtagtggtgcgatctcggcttactgccacctctgcctcccaggttcaagcgattctcctgctccagcctcccaagtagctgggattacaagtgcctgccaccatgcctggctaatttttgtatttttagtagagacagggtttcactatgttggccaggctggtctcgaactccagacctcaggtgatctgcctgcctcggcctcccaaagtgctgggattacaggcgtgagccattgcgcccggcctgtatcttttgttactaaagtggcactgctagtacttgtctcaggtggcctttaggaaaactgaaatgctacacattgaaatgttttgttcagaaaccatgctgttcagcttccaccttccttagccagctgagaggacaaaactggttcctagagacgggatacaggagtggagtagggacaaagatcttgaaaagaatgtctaagaaaaagattgctgtatctacttatccttagaaaagaaaagccaaagcttttatgggagagagtgtaggtgaactagggagagacacaagtacttctgctgagttgggagtgagaaacaagcacaacagatgcagttgtgttgatgataaggcatcacttagagcattttgcccaggtcaaagatgaggattttgatatgggttccctcttggcttccatgtcctgacaggtggatgaagactacatccaggacaaatttaatcttactggactcaatgagcaggtccctcactaycgacaagctctagacatgatcttggacctggagcctggtgaggcaccctcagggttgttttgtgtgtgtgcgtgcactatttttctcttcaaatctctattcacttgcctgaattttgaaatttcctttggttctctgatttctttaaccccaaattcatgctttattttgatcctccacctgactcttgtctagttttgtgacgtatatcacttgttctcatgttttctaartccgcaattcagacctattccaaaatgcgtttcctcatgggtctggtttgttgtctgtttctcctgctttgcaccttccagtctagartttcatcttctgcattgacattgttgcagttatgtattgaggagggagttgggagggagagcaaggagcagaggctgaaaaggtgtgaagggaaggcagagctgtcttcgtttgatgcaagggtcagaagcccaggtttctgggtcccatgcccagatgttggatggggtaaggcccaaaagtaggtgctaggcaaactgaatagcccgcagcccctggatatgggcagggcacctaggaaagctgaaaaacaagtagttgcatttggccgggctgtgtttcagatgaagaactggaagacaaccccaaccagagtgacctgattgagcaggcagccgagatgctttatggattgatccacgcccgctacatccttaccaaccgtggcatcgcccagatggtgaggcctctctgctcctacctgcctccttctgagcagtaagagacacaggttcctgcagcaagaagtcatgtttaagccctgtttaaggaagctagctgagaagaggggaagaaccccagaacttgggcctgggaattgaattctgattgggggtcatcctgaagggattgttttcagggagggagacagaccttgaatcagagagttgtgatagactgcctcttcctcaaggaacaaacaacaaatggctctgatggtttgtagcctgcctaattggaagaaaggcaacacagaagtttgagagcccrtctagtccagagaaggggcctctggacagaggtgggaggagtgggggacagagtggtatgggttgggctgcgaagggagttgcctcttctttacatctacctgccaaccccttccattgtattcacctcagttggaaaagtaccagcaaggagactttggttactgtcctcgtgtgtactgtgagaaccagccaatgcttcccattggtgagtgttgaagaagggaaaggaaagcaccgtgtggcagtcttatgggaaggagttggggctcaacacattggagcctgagtcctgaggggaggttaggtaggaatagggggatacctggcctgctgagtctggctgtctcccaggcctttcagacatcccaggtgaagccatggtgaagctctactgccccaagtgcatggatgtgtacacacccaagtcatcaagacaccatcacacggatggcgcctacttcggcactggtttccctcacatgctcttcatggtgcatcccgagtaccggcccaagagacctgccaaccagtttgtgcccaggtagggagcagggagagtcattaagggtcaaaggaaaggcccaagatcccccagagaggggaggacagggcatggccctttcttgaggtctgcttctcccagaatcagggcatctccctgctgagtgactgtgggaaagttatttgattatctgtgcttgagttaccttattgtagaatgttcttgagctgagaagttgggaaccacgaggctttagctctgarcaggtccatagaggagctcaggtggggaggtgggaatgcaggtgactggcagggcctggatggggctcatgctgctgcctctctgacctctgccctggcctaggctctacggtttcaagatccatccgatggcctaccagctgcagctccaagccgccagcaacttcaagagcccagtcaagacgattcgctgattccctcccccacctgtcctgcagtctttgwcttttcctttcttttttgccaccctttcaggaaccctgtatggtttttagtttaaattaaaggagtcgttatygtggtgggaatatgaaataaagtagaagaaaaggccatgagctagtctgctggtgcttgctgttggggaagggaaggtgatggtgtgttggactccaggggccctcatggcccagcccaccctccccagattgaaaaccaggacagatttgtgctcagtggattgggtggtgtttttagtatggagcagaacagaattcctaggactgcgtgtgatgaaatgcaaggtcaaaaggaaaagacaaagcatatttcaaagatgagaaatatttgtttggatatctatgactgtctgtttatactgtaaggggcttaatcagcagctccatcttttagttttagttctaaaggaaaagtagcctaaagtcagtmtaactaaagggtggaacgaggtgggacaaggtccggaattgctgctcagtgatgtgtgtgtgcctgccgctggtggagctgagactgctcatctcagaaggatggggatgcttgatttcctggccaggttgtcccagcacagtggggattggccctgttgtatgacgaagacagcacatggtggcagagatagatactaacccatggactttccaagggagggaataggtctttggagggtatgcaagacaaaggtagacactggataaagaacccggtagtgcccaggtattaccccatctgggccattactcccacactcaggaaccagacgttgtgggtgaggacatgctgtccctcctgccaagtaataacttccttcccagccaggatcctgccccaagtaggaatatagctctgcatttacagcagctcctgctcagaccttgtcaaaaccaccctgcagcttaggattaaggagcatggtcacaggaaggtggggtttcagggcatcccctcaggaactgcccatctccccagaattccaaaatgaaggtccatatgcttgtaggtgtgctggtcatggtgggcttcacagtaggaaagggtaagtggggcccaggggcagggagggaggaaggggtaactgagtccaggaagggggtggagcgtggccatggataatcgggcttcctactggcccagggtatttgagagtgacccagtgcctccatccctccttctgcctccccagttcctgttcccgacatccggacgtgccacttctgcctcgtagaagacccttctgtaggatgcatttcaggctcagagaagtgtaccatcagcagctcatccctgtgcatggtgatcaccatctattatggtaaataaggtcccaggaaggggctgctggtggggcagccaatggcttggtcttctctcctctcacaratcagggctgctccgggcatggggtacaagaagagaggaggggctgagtgcaatggctcatgcctgtaaccctagcactttgggaggctgaggcaggtggatcacttaagctctagagttcaagaccagcctaggcaacatagtgagaccctgtctctacaaaaaaatagccaggcatggtggtatgcacctgtagtcccagctactcgggaggctgaggtgggagatctcttaaactcaggaggcataggttgcagtgagccaagattgcgccaccatgctccagcctgrgtwacagagctagaccctgtctcaaaaaaaaccagaagaatcttggaaggaggggtctaaggttctagggggccagcagagctcacttttctagcctcttgaaggactctgggttagaagtaaattaggtctgggtgaaggatgggaaaagtcagtagcaggggttcttggactatgggaagctattggaaggggttatcagctttcccctctccctcagatgtcaaggttcgcttcatcgttcgaggctgtggacagtacatttcctaccgctgccaagaaaaacgcaacacctactttgcagagtactggtatcaggcycagtgctgtcagtacrattattgcaactcctggtcaagcccccaactccagagctctctgccggagccccatgacaggcccctggccctgcctctgtctgactmccagattcagtggttctaccaggccctgaacctctccctgcccctccccaatttccatgcygsgacggagcctgatggcctggaccccatggtcacactgtccctgaacctgggcttgtcttttgctgagctgygccgcatgtacttgttcctcaatagttcaggacttttggttcttccccaggctggactcttgacacctcacccttcctgaattccacagtgcaaatatctttctgtaacaccctcagcatcctgcactgccctctctgaaaacacccacattctttggtcactgtgatttcttaggcctccgtctgttgtaccactagcatctatatgacttttgtgtaattttctctcttgaactctggtgctgtttttttgtttgtttgagacaaagtctygctctgtcacccagggtggagtgcagtggcatgatctctgctcactacaacctccacctcccgggttccagcgattctcctgcctcagcctcccgagtagctgggactacaggcgtgcaccaccacgcctggctaattttttgtatttttagtagagacggggtttcaccatgttggtcaggctggtctcgaactcctgacctcgtaatctgccctcctcgacctcccaaagtgccgggattacaggtgtgagccacygtgcctgkctgagctctggtgctgttcttccccctagaaaagaatctctagtgtggattctgcccagacaggctgacctgagaaaggcacagtggttcctccattccttccccatcatctgagtgttccagtatcccccatccctctcaatccagtcacctgcctattgacatctagctctgtttcccctgtcttgtccatgtctctaagacccagtaccagactgaactagcagcaagaaggacgaggaggccgggcatggtggctcacgccggtaatcccagmactttgggaggccgaggtgggcggatcacttgagattgggagtttgagaccagcctggccaacatggtaaaacccgctctctattaaaaatwgaaaaatcagctgggtgtggtggcacacctctgtaatcccagctactcaggaggctgagacaggagaatcacttgaacccgggaggcagaggttgcagtgagccgagatcgcgccactgcactccagcctgggtgacacagtgagactccgtctccaaaaaaaaggatgaggaatagaattctgtgcagatgtcctgacttggcaattttgtgtccctgcctcactgtctccaccaacccccgcctgtcctrgtgttgttctgcctcctgtcctctcttgctctcttgtcagtctctggcttcctcggccccatttcacttcactgagtcctgacacccatctccctaggggcctgtgagaggagagggaagggtctgttctgctcagctccatgtcccccattttcctccacaataaactgggactgggctaaaactgtgtcacattgtttgtggggtcaggctcaggtgtgggcaggtaaacacagattaaagaggkttaatgcctggcgcagtggctcacgcctgtaatcccagcactttgggaggctgaggcaggcggatcacctgagattgggagtttgagaccagcctgacyaatatggagaaaccccatcgctactaaaaatacaaaattagccgggcttggtagcgcatacctgtaattacagctactcgggaggctgaggccggagaatcacttgaacctggaaggtggaggtggcgatgagccgagattgcaccattgcactccagcctgggcaacaagagtgaaactgtgtctcaaaaaaaaaaaaaaaaaaaaagggttagtgaggtttgggatccaaataggattgcagagccctctccattgcacttggcgtttgtcgcttcctctcggcctcctgtaaagggcacacatccctccccaccctctgcttagctggagatcaaagcatggggactgtgattcttcccagccttaaacataccctacaaaacctggaaagttagaccctgatgatgccaggtcttttcacctaagaaaagaaactttaggccaggtgcggtggctcatgcttgtaatccctgaactttgggaggccgaggtgggtggatcacctgaggtcgggtttgagaccagcctgaccaacatggtgaaatcttgtctctactaaatatgaaaaattagctgggcatggtggctcatgcttgtaatcccagctacttgggaggctgaggcaggagaattgcttgaaccggggaggtgtaggttgcagtgagctgagatcacgccattgcactccagacagggcaacaagagcgaaactctgtcttaaaaaaaaaaaaaaaagcctgggcgcggtggcttgcctgtaatcccagcactttgggaggccgaagcaggcggatcatgaggtcaggagttcgacaccagcctgaccaacatggtgaaagcccatctctactaaaaaaaaaaaaaaaaaaattagttgggcatggtggcacgtgtctgtgatcccagctactcaggaggctgaggcaggagaatcgcttgaacctgggaggcagagtttgcagtgagccgagatcgtgccactgtactccagcctgggtgacagaccgagactgtctccaaaaaaaaaaaaaagaaactttctctttaaaccagaaagactcaggaactcagagccacatgccagagttacctgctgctggggccctggactcctgccattccttagttcttttcaaggattctggcatccaggatgccctctcgaggggcccaatttgaggggcaaagtgctgagagcactgatgttgggctgcagtggttggatcttcatgctaatattttaattttgaaatagtgcaaacgtatagaaagcaaggatggatacaacagccttttccatacactggataaacatgctggacataacgctgctctgagtcaggcttggtattgagcagcaggactcccagatgagtatagccaggtgtctgcccttccaagtcttgcagcccagtgcttgggttatgaaacctttttctgaaaagcagtgcagctttgtggctgggaggtccaatcccagcccctctaccacttggatatgtcagtctcttcagccccaccttggtcacctgtcaagtagggatagtgcctcagatgattgagaaaacacatgtaaatgtgcatacacaagtagaagttaaggccttttccccctcaaaaaaatatatttgccctagagtcaaatgcatacacaatgttcagcttttttttctaaggttcttactatgttgcccaagctggccttgaactcctgggctcaagagattcttctgcctcagcctccaagtagctgggactacagwtgcacaccaccatgctcacctggctgatttacttattttcaaacctttttggtaaaacattcagaagcttgcacatatcacaagatggatttttgtaaaccacacatctgtgtaaccagccaccaaatcagcgtgaagacctttaccygcagccaagcctgcctctgttcccctctcccaggtgctcttcccagctctggggtagccgctgtcctgactggtagtagcttagatgagttctgtctgtgcttgatggaaatggcatcgtacrcatctgcttttacctatatagtgttttgcacacgtgttaacaaatctgtgtggcctgtactctgacggaaaataccaaaccaatgataattaagtcatgaggcagttggcgtacaaagagaggtacaaacccttaatgtgccccccaacccccaccttgctaagtccacccttctccatgacctctgacgtcagtataagacagagaaaggcccaggtttatagcaggtcaacctggaagacaccctcagaggctgaagaacttggcccagaattgaagagaccaggactccaataaggtctaacatctctttgagagtggccttctcggctcggggtgactcacgcctgtaatcccagccctttgggaggccaacgcaggcagatcacttgaagtcaggagttcgagaccagcctggccaactggtgaaaccccgtctctactaataaaatataaaaattagccaggtgtggtggcatgtgcttgtaatcccagctactcgggaggctgaggcagaagaatcacttgaacctgggaggcagaagttgcaatgagccaagatcacacsactgcactccagcctaggtgacagtgagactgtctcaaaaaaagagtggccttctcacccacctccttctacctgggcctggtcctttcgcagcccccttcccaccaacatagccctctaaacgcccctagcccccacacagctctggtctgacagcactgccgaggatgcccactaactttctggcattcrccataggagggctttcatttcctctttctctttttgtgtctagagcaaatcacataccaaggcaggacaagaggacagctcagcagagctgggggtcccttacctgacccatggtagggcagttaggcaggtgcacctccctcagccttcacctccaccagaagaaagagacataccaaacagtttacacacaaatttatttgggagaaacatccagggactaggggacaagagaggaaacctggtgggcagtagggctgggggtacagagtagcagtaagtgtgctgaagggcgtcaaccaagaggaagagccaaggctggggtccagtggctggagggaggcaaggagggctggtrtgagggactagaagtcctggccaagcccagatagaagtcaggaaggtggctggaaactggtggaattttacaccaaagtttgctgcagtcacactaaggagtatagagccctctgttttgagggtcattgcagaaatccaggaagcagtattgagagaatatccagaagccagacaccggagaagttcgggtatttgaacaatcactcatctgctccttacttcggcagtcactcaccatgacgtcagaaccgctgcctggggagggacagtgggcaccagtgatacggaagtccccaggaagagccccaaatcctctcatccccacactcataagtcaaaaaaaaaagaaaaagaaaagattcctgtagttaggcatgggtggacatgcccagtgttcaccagccatggaactccactgaagttcccatgcaaggctggaggaaaagagccatatgaaatgtaatggttggagggggagttgggagttactgagccaagtgaggagaactagcaccataggaccatgtgagaaaaagctgggaaatgttttggagattgggtggcaggaaggaggtgtattgttatttatttttcagaccaaaagagaataagatgatgtctgctgctgttatacataatagagaaaaatctttgtgcctgcatcccaagaagtcatgttcagggatgtttgctgctgccctgcttgagagaaatgaccaaaatgcccatcaatagtgggatggggaaatcagctgtgatatgcgcatgctatggagtagtatasagcaggtcaataaaacaaggaagctgtttacaaactgatatcggaacattcagttcccctaacttaaatgtggaataatgtttacagtgggatgctactatcttgggttggggcgggggaagaggtgaaaaaatagtaaacagcatatttgtgcagggtggaatgtgcataaaagattgcaggagggatcatccagaaagtaaaaaaagtggtcacatgtgcaggggagccaggtgggttagggtagtagcgggagactttggtttgatggtattgtatactctgatatttgacccacatctgtgcatcggctatgttaaaagggtagtaagaggacttgaacacaggcagctgcatgcagtggttgttgagagcaccatctctggagccatcacaaattctggctcagcatctgtgagactcaggcaaggttatgacctttctgcacctgtttcctcatctgtaaaatgcacatagtaataatacctgcctcagyggattgcaagtgtttagaacagtgcctagcacatattatgtgttacgtttttgctaacttaagaaaggtggggggtcggtggaagagcaggcatcgggaaggagtcaattttcagcgagggagatgtccagtggtcaacgggatatgaggagagcggtttgacataacattcagattcagaaggaagtggtatgtggctgctggttgaagccagcaaagcagataaaatcctctgcttttgagtatatgaagtgggaagacagctaaggaccaaaccttggtgaacatgaaccactaagggtcagagagaaaacgctccatgaaggagactgaagaagccgtggaggatgcaggagaagagcaacaccagcagtaactgcagacagatgcggaagcagacagcttgaggacaggcaagggcacctggagatctggagggtccccgtcaaagctgcgcaccttgatagggtagaagmtattcagctacagattgaggagagaaggttagtggaagtggagacagagtgtggctctgaagaaaagggaagagaggctgggcacggtggctcacgcctgtaatcccagcactctgggaagctaaggtgggtggatcacctgaggtcaggagttcgagaccagcctggccaacatggtgaatccccatctctactaaaaatacaaaaaattagctgggcgtggtggcgtgcacctttaatcccagctgcttgggagactgaggcacaagaattgcttgaactggrgaggtggaggttgcagtgagccaagattgcgccactgcactccagcctgggtgacagagcagcaaaaaaaaaaaagacaggatyggagcaatgtcttatgggattatgggaacaagacttggggtgcagcttaggaggctgagagagtttccgtttgggagagtgctgggcccatgacaggagaaggccacttactgttctttttgtggagagtgatgcagctgctgccagctggggtgaggcagatgtcagatcccagaaggcaccctaactccttggtctccaagaggcatcggtagcagcgcaggtatttggggaatggaagtggttgagggggttcccaattgacaggaacaaacttacctagaacacagagaagtgctgacc

SEQ ID NO: 10050 - DNA, 17055 bp, Homo sapiens
ttcaggaagggtgaggtgtcaagagtccagcctggggaagaaccaaaagtcctgaactattgaggaacaagtacatgcggcgcagctcagcaaaagacaagcccaggttcagggacagtgtgaccatggggtccaggccatcaggctccgtcscrgcatggaaattggggaggggcagggagaggttcagggcctggtagaaccactgaatctggkagtcagacagaggcagggccaggggcctgtcatggggctccggcagagagctctggagttgggggcttgaccaggagttgcaataatygtactgacagcactgrgcctgataccagtactctgcaaagtaggtgttgcgtttttcttggcagcggtaggaaatgtactgtccacagcctcgaacgatgaagcgaaccttgacatctgagggagaggggaaagctgataaccccttccaatagcttcccatagtccaagaacccctgctactgacttttcccatccttcacccagacctaatttacttctaacccagagtccttcaagaggctagaaaagtgagctctgctggccccctagaaccttagacccctccttccaagattcttctggttttttttgagacagggtctagctctgtwacycaggctggagcatggtggcgcaatcttggctcactgcaacctatgcctcctgagtttaagagatctcccacctcagcctcccgagtagctgggactacaggtgcataccaccatgcctggctatttttttgtagagacagggtctcactatgttgcctaggctggtcttgaactctagagcttaagtgatccacctgcctcagcctcccaaagtgctagggttacaggcatgagccattgcactcagcccctcctctcttcttgtaccccatgcccggagcagccctgatytgtgagaggagagaagaccaagccattggctgccccaccagcagccccttcctgggaccttatttaccataatagatggtgatcaccatgcacagggatgagctgctgatggtacacttctctgagcctgaaatgcatcctacagaagggtcttctacgaggcagaagtggcacgtccggatgtcgggaacaggaactggggaggcagaaggagggatggaggcactgggtcactctcaaataccctgggccagtaggaagcccgattatccatggccacgctccacccccttcctggactcagttaccccttcctccctccctgcccctgggccccacttaccctttcctactgtgaagcccaccatgaccagcacacctacaagcatatggaccttcattttggaattctggggagatgggcagttcctgaggggatgccctgaaaccccaccttcctgtgaccatgctccttaatcctaagctgcagggtggttttgacaaggtctgagcaggagctgctgtaaatgcagagctatattcctacttggggcaggatcctggctgggaaggaagttattacttggcaggagggacagcatgtcctcacccacaacgtctggttcctgagtgtgggagtaatggcccagatggggtaatacctgggcactaccgggttctttatccagtgtctacctttgtcttgcataccctccaaagacctattccctcccttggaaagtccatgggttagtatctatctctgccaccatgtgctgtcttcgtcatacaacagggccaatccccactgtgctgggacaacctggccaggaaatcaagcatccccatccttctgagatgagcagtctcagctccaccagcggcaggcacacacacatcactgagcagcaattccggaccttgtcccacctcgttccaccctttagttakactgactttaggctacttttcctttagaactaaaactaaaagatggagctgctgattaagccccttacagtataaacagacagtcatagatatccaaacaaatatttctcatctttgaaatatgctttgtcttttccttttgaccttgcatttcatcacacgcagtcctaggaattctgttctgctccatactaaaaacaccacccaatccactgagcacaaatctgtcctggttttcaatctggggagggtgggctgggccatgagggcccctggagtccaacacaccatcaccttcccttccccaacagcaagcaccagcagactagctcatggccttttcttctactttatttcatattcccaccacrataacgactcctttaatttaaactaaaaaccatacagggttcctgaaagggtggcaaaaaagaaaggaaaagwcaaagactgcaggacaggtgggggagggaatcagcgaatcgtcttgactgggctcttgaagttgctggcggcttggagctgcagctggtaggccatcggatggatcttgaaaccgtagagcctaggccagggcagaggtcagagaggcagcagcatgagccccatccaggccctgccagtcacctgcattcccacctccccacctgagctcctctatggacctgytcagagctaaagcctcgtggttcccaacttctcagctcaagaacattctacaataaggtaactcaagcacagataatcaaataactttcccacagtcactcagcagggagatgccctgattctgggagaagcagacctcaagaaagggccatgccctgtcctcccctctctgggggatcttgggcctttcctttgacccttaatgactctccctgctccctacctgggcacaaactggttggcaggtctcttgggccggtactcgggatgcaccatgaagagcatgtgagggaaaccagtgccgaagtaggcgccatccgtgtgatggtgtcttgatgacttgggtgtgtacacatccatgcacttggggcagtagagcttcaccatggcttcacctgggatgtctgaaaggcctgggagacagccagactcagcaggccaggtatccccctattcctacctaacctcccctcaggactcaggctccaatgtgttgagccccaactccttcccataagactgccacacggtgctttcctttcccttcttcaacactcaccaatgggaagcattggctggttctcacagtacacacgaggacagtaaccaaagtctccttgctggtacttttccaactgaggtgaatacaatggaaggggttggcaggtagatgtaaagaagaggcaactcccttcgcagcccaacccataccactctgtcccccactcctcccacctctgtccagaggccccttctctggactagaygggctctcaaacttctgtgttgcctttcttccaattaggcaggctacaaaccatcagagccatttgttgtttgttccttgaggaagaggcagtctatcacaactctctgattcaaggtctgtctccctccctgaaaacaatcccttcaggatgacccccaatcagaattcaattcccaggcccaagttctggggttcttcccctcttctcagctagcttccttaaacagggcttaaacatgacttcttgctgcaggaacctgtgtctcttactgctcagaaggaggcaggtaggagcagagaggcctcaccatctgggcgatgccacggttggtaaggatgtagcgggcgtggatcaatccataaagcatctcggctgcctgctcaatcaggtcactctggttggggttgtcttccagttcttcatctgaaacacagcccggccaaatgcaactacttgtttttcagctttcctaggtgccctgcccatatccaggggctgcgggctattcagtttgcctagcacctacttttgggccttaccccatccaacatctgggcatgggacccagaaacctgggcttctgacccttgcatcaaacgaagacagctctgccttcccttcacaccttttcagcctctgctccttgctctccctcccaactccctcctcaatacataactgcaacaatgtcaatgcagaagatgaaaytctagactggaaggtgcaaagcaggagaaacagacaacaaaccagacccatgaggaaacgcattttggaataggtctgaattgcggayttagaaaacatgagaacaagtgatatacgtcacaaaactagacaagagtcaggtggaggatcaaaataaagcatgaatttggggttaaagaaatcagagaaccaaaggaaatttcaaaattcaggcaagtgaatagagatttgaagagaaaaatagtgcacgcacacacacaaaacaaccctgagggtgcctcaccaggctccaggtccaagatcatgtctagagcttgtcgrtagtgagggacctgctcattgagtccagtaagattaaatttgtcctggatgtagtcttcatccacctgtcaggacatggaagccaagagggaacccatatcaaaatcctcatctttgacctgggcaaaatgctctaagtgatgccttatcatcaacacaactgcatctgttgtgcttgtttctcactcccaactcagcagaagtacttgtgtctctccctagttcacctacactctctcccataaaagctttggcttttcttttctaaggataagtagatacagcaatctttttcttagacattcttttcaagatctttgtccctactccactcctgtatcccgtctctaggaaccagttttgtcctctcagctggctaaggaaggtggaagctgaacagcatggtttctgaacaaaacatttcaatgtgtagcatttcagttttcctaaaggccacctgagacaagtactagcagtgccactttagtaacaaaagatacaggccgggcgcaatggctcacgcctgtaatcccagcactttgggaggccgaggcaggcagatcacctgaggtctggagttcgagaccagcctggccaacatagtgaaaccctgtctctactaaaaatacaaaaattagccaggcatggtggcaggcacttgtaatcccagctacttgggaggctggagcaggagaatcgcttgaacctgggaggcagaggtggcagtaagccgagatcgcaccactaccctccagcctcggtgacagagtgagacccagtctcaaaaaaaagaaaaagacacaaattgactagcccaacgttatattgctggacggtggcagactcaggacttgggccccagttttgccactttagcacaggttcgtcggggtttataggggggactctttgctgataggaagttttcaaatagcatgtaagagaacagtgyagaagtggaatatgtgaaggaacgtctggtgggaagatatgtgaagctggcamgtagggaggttgaagagaactcacttcacagaagaattcattgccacggagcccacagaaccaggaaatccaggacacctcctctgagctgctcatcttcacgtcagctagaaaaagaacagtgtcagtaaagckcaagttctccttccctgcctctggtatcctccctcctcccacattcggccctccaaccacgggagaattcggaaccaccctttcttaaagcaacccaaactctgaagcactcctctccagctcctctaatttacatctcagccccttttctttgaagttaaacattctttggggtcccaccacttgaaagaagccaacagatactttgacccaccagcccgacccacatccctggagctcccgaaggccagggccctctctcctctgtgtcaactccggcagggacctcgactcaggctccctaccaatacaagtctctgcatgacccccacgcctttcccaagggtttccaagtttatcattctcaagcaagaacygggctcctccttttctcacgggttgggggcgattgtcaggtccctttcaccggaatccacacatcccccctccgctcctcaggccacctctccctccttcgtgccggacctggtcgcttcctcccccgcccccacatcaaagtccggagaccccatgtgccgctcccagcgacaagggactcggagcagcgacgacttcagactcaccggctggacggggaccaggactggggtggggtagggaagttgctacttccagggaacggcggcgaccgctacagcgcaggccgcggacccgaccgcggcaggcgaagtggggtggggggagtggaaattagggagggtggggaagagggcaacacgcaagcgccaagggtcaggtgccgcggtggatgccgggacacggagtccccggtagagaaagaaactggctaaatgagagaaagcgaactaccaatcccaggatgacccgcgcacgacctggctgtcacgaaggcccggaggagggcgcttgcgggcggggcacaacgagaagccaccggaagcggaagccaggtatggcgttcggggcccgggagtctgggcaatacagttttgtgctcactgggtgaagaggctgacttagggcggggaaaggaggragccaggctggatctctttccgcagctctcctcacgttcccctctagtcccggcgmggcgctgctgcccaggggactggcctatcctcggccaatccgctgggtccttattgcctgttgggcccctagtgcgaatcagtcccgccagagacccttgacgggcatactgtttcctccgggctcctgcctcatgaggggagaggtgcggcttggctccgtgcgtagggacttgggtggggtggggtgggcggtgtgagaactggaacgtcccaktgcgctaacctgaggtggtgccagccattctgctcgtccctttgcacttctccatttccycttaggctctaagtgtgaccttcgaaccctggtcagagtaatggtgaggggcagkcgtgacgttatttcattacacggcttctcggcattccacaggtttccctccgcctcctgagggcctttcctaacccacagagtggattcctggctccagaaaatgggcttggagcgggggccacgttgaggaaggcgaagggcattgtgggggcgttatgtaaaagtaggaccccaaccgacagatcctagtgctcgcgccacctgggcgcgcggagctttgctcgtttactattgaaaaagttccagcgcgggaaactgaacccggagctttgcgcacgcccgagccctcaagtaatgtgggttgtggtttttgttgttgttgtcgccacgcatgcgtcttcgtgccgtgtggctwtttgattgtgtcaactcttctgattagaatggcgccattttgcggtacggaagctacacagcaacacgtataggagactctccccgagatcttctagggagtgacccatctatttttgtttrggaagaggaaactccgaaatgggatcgcggaagamttaaagggccaggctgatttttttttcctactggtatgtcttacggggtgggaaagtggtttcagaaagaggctggtgtttattgttggtgaggatgggggtgggggccggacgcaggacctctggacaacagtctcatggagttttattaatctttactaaggagcaaagtcggtattgtagggttccatgtttttacgcaaagtctctctcccttaggccctgcagagtcctaagttgtggggttactttagtggcaggaaagtgtttttgactactttttctcatcccagcaggtctctgaggctgtggttgctacagggtcaccacgagcttggcttacttgtctcatccttcccttgcctggtatcattttctcagttctcccaaaagccatgtcccggcccttgctcatcaccttcaccccagccactgaccccagcgacctctggaaggatgggcagcagcagccacagcccgagaagccagagtccaccctggatggggctgcagccckagctttctatgaggccctgattggggatgagagcagcgctcctgastcccagagatctcagactgaacctgccagagaaagaaagagaaagaaaagaagaataatgaaggcaccagcagcagaagcagtggcagaaggagcatcaggaagacatggacaagggagatcccttgaggctgaggataagatgactcaccggatactgagggcagyccaggagggggacytgccagaacttaggagactgctggaaccgcatgaggcaggaggagctggggggaatatcaacgcccgggatgccttctggtggaccccactgatgtgtgctgctcgagcgggccagggggcagctgtgagctatctcctgggccgtggggctgcctgggtgggggtctgtgagctgagtggcagggatgcggctcagctcgctgaagaagctggcttccctgaggtagcccgcatggtcagggagagccatggagagacaaggagcccggaaaaccggtaaggggaaactttagctcagacccatgtctcattgtgttctgcctctcccagccacaccacaccagacgccccagcacagtgctgaagagttctttccttatcctcatgtgtaggttgacagggtagtatagtcaagtggttataaacatgagctccctggatttaaagcctgattccacttacttgggcaaacaacytaatgtctacatgttccagttttctcatcttagaaatgggggtagtaagaatygttgttaggattcaatgggttaatatatgtaaaatgctagaatagtgcatgccgcatagtatgcaatacatgaatgttagctatagtcattatgactaatgtccctccccttgcccaagagtttgctaggtctggttaccatttttttctttcaactattctgctctggatcccacaatggtttaaagaaatttgtttttaagacaagtcaagtgcagtagtgagaaggaggggaaaagtggagtaaggagtttgatctgtaactgagtgaacaattaattcagataactcaccaccacctttggaccagcctggatccctcactgttaagtaggaaggaaggcaatttgtcccttttttttttttttttttttttgagacaaagtctcactcatctcactctgtcgcycaggctggtgtgcaatggtgtgatttcagctcactgcaacctccgcttcctgggctcaagcatattttttgtagaaagcaggctttgccgggacatggtggcatgtgcctgtaatcccggctacttgggaggytgabgcaggagaatcgctaaggtggaagttgcagtgagccaggatcatggcactgcactccaacctgggcagcagagcaagactccatctcaaaaaaaaaaaaaaaaaaagcaggcgttgccattttgcccaggctggtctcaaactcctgagctcaaagccatctgcccgcctctgcctcccaaagtgttgggattacaggcgtgagccactatgcctagctggcaatttgttccttagcagaaaagctgaaaagatcctattctaccctgccagccccctctgaggcctcaactcttccccttttccttcccctgcccttaatgctttttcttctttctctgcaggkctcctactccctccctccagtactgcgagaactgtgacacccacttccaagattccaaccaccgcacatccactgytcacctgctgtcactgtcgcagggtcctcagcctcccaaccttccacttggggtgcccatctccagcccgggcttcaaactgctgctgagggggggctgggagccaggaatggggctgggaccccggggtgagggccgtgccaatcccatccccactgtcctcaagagrgaccaggaaggactaggctacagatcagcaccccagccccgagtgacacatttcccagcttgggatacmcgagctgtggctgggagggagagaccccctcgggtggccacactgagctggagggaggagagaaggagggaggagaaagacagggcttgggagcgggatctaaggacttacatgaacctcgagttctgactttggtaaagtctgaccctagtctgctgctgaagtctgaacttgggyctctgacctgggccctttgacttccccttcctgggatctgcycagatgcagatcctgaagtttttggtcaataggctctgtcttcgtgagagacgggctgagagtcagaaataaatcaaccatttgtggtttattcacttttctggaagctattttgaggaagccaaacagaagcctgggagccacatgcaagtcccacctgagtcagaaggggcagcctctccaggtggcatgataaggtcacctccctgccaatctgggttcactttcaggtcccagaccctcctgggagtcccccacctattctttcaasccccctggaccaagaattgcccagcttcgtgcaagtctcacttmccccaggaggagttccctgactacagccaattcactgatttcacaaacataagtccatatactatgtgccaagaatacaggtaaagacattcccaaccctcaaagagttcacagctggagagggaaagtgccatgttaycaatttttttcytttttttttgagatgcagtttcgctctcattgcccaggctggagtgcaatggcatgatctcggctcaccacaacctctgccccccgagttcaagggattctcctgcctcagcctccccagtagctgggattacaggcatgccccaccacgcccagctaattttgtatttttagtagagacggggtttctccatgttggccaagctggtcttgaactcccgacctcaggtgatccgccggcctcggcttcccaaagtgctggggttgcaggcatgarccaccactcccggcccatgttatcaaatattataatgcagggtgataagggaagtcaaggcctctagagatgagaatgggtagggttttgctggaagaggccagtgtgataggarggcccacgattatcaagcttgtacacttagttgaactgggaccagaactctagcccccaaatctaaactttaracttctttgttccacccatttgtctacacttttctttcccacacttccccactctcccaccacccacccccttgtcttgctcatgccgggtggtaggcacaagaagagctcactgttgtgaaatccaggaattcaaatttgcagacgggcaggggagggctgttcaagtcgcaagactcctcattttttcttttctgggaaagcctttcatgaagtcttggatgcgaaatggaggagtggtgggggatgtggaaaagaacccaggggcagggggctgtagggggcgaccragtttagggaagcatgagaaacccgggaaaatggggagctgggtttatattaaggtcctggtccttgctaatctcggtttggcggtccggcgcgcacagacagcgcggggtatacgggggcggtctattcgcagggtccgccccatgagctgcggcaccgcccccgcgggtccttccagtcctggtgcagctgcttccgggcttcgcggctcccggcggctccccaaggccgcggccccgacgctgggcccgggagcggtccccgcgcacagcgcccggacgcgtaggtcccgaagtaggcccgcgctttgcttcgtaactggggatctctgaggacatcttagttctgaccttgtggaggccgcgtctctgctgcgtgttcgcgggccagtcgggccactttgtagaaatcatagccctctaaatcaagggacgaacgctgctggctggagtttgctggacactttcattccacctcctaacaaagagaattcctattccttgaggtcccttrgggcagcagttaaagactacacgatccaggagcacctaggacctggggccaccttcctgcccgctttattggatggagcactgcctccccagtttctgggacaccktggggtgtggccttggtgagtgaaacttggggtgctgcctgctgggaaggaaatccggaaacgcagagaggactctctggtggtgacccaggccttgtcagatctgagattcttggaatctcagattgtgggggtgtggatggtgaatgaatttgggtatgcccccctttaccccagaactgaagaggaagcaaactacttgccacacttgaggctgcatgactattcagagaagggaggagccacttctgaattcagagtaggactgcatcaccaggcaaatacctgttctgagccagaaagactctggcttctgaggagatcctgagagtctgagtagtgccaggaagcagcctcagaatttgggggcccattacacaccccagccatgttcctgcgacggcttggtggctggctacctcgcccttggggccgccggaaaccaatgaggcctgacccgccttacccagaacccagacgggtggacagctcctcggagaattcaggaagtgactgggatagtgccccagaaaccatggaagatgtggggcatcccaagactaaggactcgggggcattgagggtttctrgggctgcttccgaaccaagcaaggaggagccccaagttgagcagctagggagcaaaagaatggattccctcaastgggaccagcctatctctagcactcaagagtctgggagactggaggctggaggggccagtcccaaactcagatgggatcatgtggattcaggtggcaccaggagaccaggggtgtcccctgaagggggactgagcgtccctgggccaggagccccattggagaaacctggtaggcgtgagaagctgttgggctggctgcggggggaaccaggagctccctcccggtacttggggggcccagaagagtgtctgcagatctccaccaacctgaccctgcatcttctggagctgctggcctctgccctgctggccctgtgctcacgaccactgcgggcagccttggacacactgggcctgcgtggaccgctgggcctctggctacatggcctactgtccttcctggctgccctgcatgggctccatgctgttctgagcctacttactgcccaccctttgcacttcgcctgcctctttggtctcctgcaggccttggtgctggctgtcagcctccgggagcccaatggggatgaggcggccactgactgggagagtgaggggttggagagggaaggtgaggagcagaggggagacccgggaaaggggctgtgaccgtggggtgggggcaaagggtgaagagagtgtgggctttaggagaaaagtgtgaggcatgacccaaattgtaagcatagggacctcagggatggggaagaaacccgagtacgagggtgcagggccccccttcatacacaggagagaacagaactatttagggtgtttgtgtttatggacagtgagggcactgctcttggattcaccagctgttatttttgcttttacttttctcccaccttcagttttttttttttttccacctccactttttaaaagcaaaaaaaaaaaaaagtatgatggtggtgaataaagaccaaagggtcctctctacctttgaaaactctcctggggtggaggagaccagggcaggatagacagacctctgcagtaagagagtggttgggaaacccagggtgttccttggatctcaggatctgagccatcgagggaagagtggggctgctaggcaagtggattagggggtctggatagggccccacaggtgacagggagcctgcagggcggatctggtgatcatgggagccagagggagtggggacagtgcaggcagtattggcaggagggccagtgcagaagggctggtagctcaggcagtgtgggggaagcactgaagcctgtagtccccacttgggggctaggggtttgctcactcagcaataaataactgtgtcacatcaaatcctaaatawamcactacaaagtgagagttactgccactctgttcttactgacaccgtccagctgggagtttaggtggtagaggatccagggggaatgttgaaatgggaggagtgggaatgacrtctggagacaaaccccagaatgagatgaggattgaaaaattatctttattatcttgagtgggagctggagctggaagtctccagcttctccctccaacaactcagctcccattgtacccatctggggacttagatgaagttacaggtcagttattggacagctcacaggcctctgtgatggggggagggaaaaagaaggacagaagggaagtccagggagaaaagcaaagttgatagtaatggggtgggggagaacgtgttctttcattccctgtgtcaaaggggagtctctaaggctcttttccctccacgtatgaccctctgccccctttatccagtgcaaactcagaaacctctcttttgagtagcccagaacccatcctgcctccctcaggtgacatcacagctcttagccacatccctctggtgacatcacacgagcctctttcaccctgtaacaccagaagacttkgtgagtcctaatcctgttttatgagattttaacmccttaccttgattcctaggagtcaataagaaggctttggagtccaggcaggaagtcagggacttgaattcctccacacacttttcgggaggatgtggtgagcgatctggaagggcaaggtggggtcaggccagtcaaaacccctggaagcacctagctcttcctgggagggtrtcataggacccagagtgagkagttctcctgccctcccttgtttccctccaacccttcctgccttgtatccctactcactgtagaggagaaagcgctggtaaccctggcctgtctcattcagcatgattccacctgggcatgagctggaaaagagctcagtcttcatgtcagggcggcctgtcaaggcaggtgggagaagtatgagaacagagatgcagaaccaaactcaagggagggtgagggctgggaagaaccaaccttcagttctgagatctgtgctcccttcagtcaggtggtagatccatttccggggcacacagagcccrtctttcctgcagaggtggtggtggcaaggaggaaagaatgagcatcaccccaaccatagtgtcccagcttcttttttttttttttgagacagagtctcactctgttgcccaggctggagtgcagtggcgccatctcggctcacygcaagctctgcctcccgggttcacgccattctcctgcctcaacctcgtgagtagctgggactacaggtgcccaccaccatgcccagctagttttttatatttttagtagagacggggtttcactgtgttagccaggatggtctcgatctcctgacctcgtgatctgtccgcctcagcctcccaaagtgctgggattacaggcgtgagccaccacgtctggcctgtcccggcttctatttactccattgtatttgttattgaagcccagctctccttgggtttcaagctaccaagcattggttaggcacatctttctccagagggcaattaatacagccactgaattccgtgggccaagcatagtagatataccagctaagaggccagctcttggtgggtggattctcacactttgggcagagactgaacccagtgatgcttctgcctccttaccactcacatgcggatggtagcacgaaggtggagctgcatcggggcagagccagcagccatattgaagacaatgttgtccacagggtcaaaagttgccaactcctccttggtgggagctgcccctgcgataaagtaccactggcccaagtggacctctgggaactggagagacaatgaagggagcaaaagagggtgggttccagcacaggatgggttcaacctcttcatcagtcaaaacagcaagatttaggggtagaggtgttggctgccttcctctttccaactggggattggatccatgacaaagagtcattaaatgacttttcctctttgcccctccccagtcaacctgggtaaccaccccaccccccaattctgccatgcctctgcattgatggccacagtactgatatttttcttcttgctttcattatcacaacactcacacccccttcctctcttcctttcccaagatggtctccagtcatcctaggccatccacccaagtccctcagagcctccaccataggcttccccyaatctcagtccatacctccttcccatccacgcccagagttgtcagttgactgtgctcagggcactggtagatggagttaaggataataccatagaagtagagcagagctgcccaaatttggtggaacatcttcaggcaggagggagctggtgctctgtgtgccttaactgctctctcccctactggctgctcagtccactctgctttcagctcccttgcgttcgacccttgaccctttcacctgctaatgagtaacttcaaccttgttttccaacccaaacctggattacttagtgtttgggacttcctccccctcttccggatgcaaccactccatagtacaccctggcatgtccagggtttctcaggagttatgaggagagctgagctgtccagggagaagcctgtggtctttgaacctgtatctgagctggttatttgttgcactgtgcagcactgaagggaagtagcttgactgggcctctcattcattcacttagcaaactgttttgaatcccaagtcccagttgtttcccaagaactagctaatccccggggacataaaaaaacgaataagacatagcccctgatcttgaagaagtcgttagagggaaaactagctgtgtagacaaaccattgcaatacaacttggtaaatgctttagaacaggtatgatgcaggtgctggggcacggtggattgctctctttagtttacaattagaaaaatatgtataccctggcagtgttcactgacacattcactcaacatttattactacaaagaggctatgtaatctggctgttagagaggatagatgttggtgtcaggcagaatgtgtccaaaccctaactacaggcagggcagg

SEQ ID NO: 10051 - DNA, 16834 bp, Homo sapiens
gaacagcatggagcccatgcagggcagccaggaaggacagtaggccatgtagccagaggcccagcggtccacgcaggcccagtgtgtccaaggctgcccgcagtggtcgtgagcacagggccagcagggcagaggccagcagctccagaagatgcagggtcaggttggtggagatctgcagacactcttctgggccccccaagtaccgggagggagctcctggttccccccgcagccagcccaacagcttctcacgcctaccaggtttctccaatggggctcctggcccagggacgctcagtcccccttcaggggacacccctggtctcctggtgccacctgaatccacatgatcccatctgagtttgggactggcccctccagcctccagtctcccagactcttgagtgctagagataggctggtcccasttgagggaatccattcttttgctccctagctgctcaacttggggctcctccttgcttggttcggaagcagcccyagaaaccctcaatgcccccgagtccttagtcttgggatgccccacatcttccatggtttctggggcactatcccagtcacttcctgaattctccgaggagctgtccacccgtctgggttctgggtaaggcgggtcaggcctcattggtttccggcggccccaagggcgaggtagccagccaccaagccgtcgcaggaacatggctggggtgtgtaatgggcccccaaattctgaggctgcttcctggcactactcagactctcaggatctcctcagaagccagagtctttctggctcagaacaggtatttgcctggtgatgcagtcctactctgaattcagaagtggctcctcccttctctgaatagtcatgcagcctcaagtgtggcaagtagtttgcttcctcttcagttctggggtaaaggggggcatacccaaattcattcaccatccacacccccacaatctgagattccaagaatctcagatctgacaaggcctgggtcaccaccagagagtcctctctgcgtttccggatttccttcccagcaggcagcaccccaagtttcactcaccaaggccacaccccamggtgtcccagaaactggggaggcagtgctccatccaataaagcgggcaggaaggtggccccaggtcctaggtgctcctggatcgtgtagtctttaactgctgcccyaagggacctcaaggaataggaattctctttgttaggaggtggaatgaaagtgtccagcaaactccagccagcagcgttcgtcccttgatttagagggctatgatttctacaaagtggcccgactggcccgcgaacacgcagcagagacgcggcctccacaaggtcagaactaagatgtcctcagagatccccagttacgaagcaaagcgcgggcctacttcgggacctacgcgtccgggcgctgtgcgcggggaccgctcccgggcccagcgtcggggccgcggccttggggagccgccgggagccgcgaagcccggaagcagctgcaccaggactggaaggacccgcgggggcggtgccgcagctcatggggcggaccctgcgaatagaccgcccccgtataccccgcgctgtctgtgcgcgccggaccgccaaaccgagattagcaaggaccaggaccttaatataaacccagctccccattttcccgggtttctcatgcttccctaaactyggtcgccccctacagccccctgcccctgggttcttttccacatcccccaccactcctccatttcgcatccaagacttcatgaaaggctttcccagaaaagaaaaaatgaggagtcttgcgacttgaacagccctcccctgcccgtctgcaaatttgaattcctggatttcacaacagtgagctcttcttgtgcctaccacccggcatgagcaagacaagggggtgggtggtgggagagtggggaagtgtgggaaagaaaagtgtagacaaatgggtggaacaaagaagtytaaagtttagatttgggggctagagttctggtcccagttcaactaagtgtacaagcttgataatcgtgggccytcctatcacactggcctcttccagcaaaaccctacccattctcatctctagaggccttgacttcccttatcaccctgcattataatatttgataacatgggccgggagtggtggytcatgcctgcaaccccagcactttgggaagccgaggccggcggatcacctgaggtcgggagttcaagaccagcttggccaacatggagaaaccccgtctctactaaaaatacaaaattagctgggcgtggtggggcatgcctgtaatcccagctactggggaggctgaggcaggagaatcccttgaactcggggggcagaggttgtggtgagccgagatcatgccattgcactccagcctgggcaatgagagcgaaactgcatctcaaaaaaaaargaaaaaaattgrtaacatggcactttccctctccagctgtgaactctttgagggttgggaatgtctttacctgtattcttggcacatagtatatggacttatgtttgtgaaatcagtgaattggctgtagtcagggaactcctcctggggkaagtgagacttgcacgaagctgggcaattcttggtccagggggsttgaaagaataggtgggggactcccaggagggtctgggacctgaaagtgaacccagattggcagggaggtgaccttatcatgccacctggagaggctgccccttctgactcaggtgggacttgcatgtggctcccaggcttctgtttggcttcctcaaaatagcttccagaaaagtgaataaaccacaaatggttgatttatttctgactctcagcccgtctctcacgaagacagagcctattgaccaaaaacttcaggatctgcatctgrgcagatcccaggaaggggaagtcaaagggcccaggtcagagrcccaagttcagacttcagcagcagactagggtcagactttaccaaagtcagaactcgaggttcatgtaagtccttagatcccgctcccaagccctgtctttctcctccctccttctctcctccctccagctcagtgtggccacccgagggggtctctccctcccagccacagctcgkgtatcccaagctgggaaatgtgtcactcggggctggggtgctgatctgtagcctagtccttcctggtcyctcttgaggacagtggggatgggattggcacggccctcaccccggggtcccagccccattcctggctcccagccccccctcagcagcagtttgaagcccgggctggagatgggcaccccaagtggaaggttgggaggctgaggaccctgcgacagtgacagcaggtgarcagtggatgtgcggtggttggaatcttggaagtgggtgtcacagttctcgcagtactggagggagggagtaggagmcctgcagagaaagaagaaaaagcattaagggcaggggaaggaaaaggggaagagttgaggcctcagagggggctggcagggtagaataggatcttttcagcttttctgctaaggaacaaattgccagctaggcatagtggctcacgcctgtaatcccaacactttgggaggcagaggcgggcagatggctttgagctcaggagtttgagaccagcctgggcaaaatggcaacgcctgctttttttttttttttttttgagatggagtcttgctctgctgcccaggttggagtgcagtgccatgatcctggctcactgcaacttccaccttagcgattctcctgcvtcarcctcccaagtagccgggattacaggcacatgccaccatgtcccggcaaagcctgctttctacaaaaaatatgcttgagcccaggaagcggaggttgcagtgagctgaaatcacaccattgcacaccagcctgrgcgacagagtgagatgagtgagactttgtctcaaaaaaaaaaaaaaaaaaaaaagggacaaattgccttccttcctacttaacagtgagggatccaggctggtccaaaggtggtggtgagttatctgaattaattgttcactcagttacagatcaaactccttactccacttttcccctccttctcactactgcacttgacttgtcttaaaaacaaatttctttaaaccattgtgggatccagagcagaatagttgaaagaaaaaaatggtaaccagacctagcaaactcttgggcaaggggagggacattagtcataatgactatagctaacattcatgtattgcatactatgcggcatgcactattctagcattttacatatattaacccattgaatcctaacaacrattcttactacccccatttctaagatgagaaaactggaacatgtagacattargttgtttgcccaagtaagtggaatcaggctttaaatccagggagctcatgtttataaccacttgactatactaccctgtcaacctacacatgaggataaggaaagaactcttcagcactgtgctggggcgtctggtgtggtgtggctgggagaggcagaacacaatgagacatgggtctgagctaaagtttccccttaccggttttccgggctccttgtctctccatggctctccctgaccatgcgggctacctcagggaagccagcttcttcagcgagctgagccgcatccctgccactcagctcacagacccccacccaggcagccccacggcccaggagatagctcacagctgccccctggcccgctcgagcagcacacatcagtggggtccaccagaaggcatcccgggcgttgatattccccccagctcctcctgcctcatgcggttccagcagtctcctaagttctggcargtccccctcctggrctgccctcagtatccggtgagtcatcttatcctcagcctcaagggatctcccttgtccatgtcttcctgatgctccttctgccactgcttctgctgctggtgccttcattattcttcttttctttctctttctttctctggcaggttcagtctgagatctctgggastcaggagcgctgctctcatccccaatcagggcctcatagaaagctmgggctgcagccccatccagggtggactctggcttctcgggctgtggctgctgctgcccatccttccagaggtcgctggggtcagtggctggggtgaaggtgatgagcaagggccgggacatggcttttgggagaactgagaaaatgataccaggcaagggaaggatgagacaagtaagccaagctcgtggtgaccctgtagcaaccacagcctcagagacctgctgggatgagaaaaagtagtcaaaaacactttcctgccactaaagtaaccccacaacttaggactctgcagggcctaagggagagagactttgcgtaaaaacatggaaccctacaataccgactttgctccttagtaaagattaataaaactccatgagactgttgtccagaggtcctgcgtccggcccccacccccatcctcaccaacaataaacaccagcctctttctgaaaccactttcccaccccgtaagacataccagtaggaaaaaaaaatcagcctggccctttaaktcttccgcgatcccatttcggagtttcctcttccyaaacaaaaatagatgggtcactccctagaagatctcggggagagtctcctatacgtgttgctgtgtagcttccgtaccgcaaaatggcgccattctaatcagaagagttgacacaatcaaawagccacacggcacgaagacgcatgcgtggcgacaacaacaacaaaaaccacaacccacattacttgagggctcgggcgtgcgcaaagctccgggttcagtttcccgcgctggaactttttcaatagtaaacgagcaaagctccgcgcgcccaggtggcgcgagcactaggatctgtcggttggggtcctacttttacataacgcccccacaatgcccttcgccttcctcaacgtggcccccgctccaagcccattttctggagccaggaatccactctgtgggttaggaaaggccctcaggaggcggagggaaacctgtggaatgccgagaagccgtgtaatgaaataacgtcacgmctgcccctcaccattactctgaccagggttcgaaggtcacacttagagcctaagrggaaatggagaagtgcaaagggacgagcagaatggctggcaccacctcaggttagcgcamtgggacgttccagttctcacaccgcccaccccaccccacccaagtccctacgcacggagccaagccgcacctctcccctcatgaggcaggagcccggaggaaacagtatgcccgtcaagggtctctggcgggactgattcgcactaggggcccaacaggcaataaggacccagcggattggccgaggataggccagtcccctgggcagcagcgcckcgccgggactagaggggaacgtgaggagagctgcggaaagagatccagcctggctycctcctttccccgccctaagtcagcctcttcacccagtgagcacaaaactgtattgcccagactcccgggccccgaacgccatacctggcttccgcttccggtggcttctcgttgtgccccgcccgcaagcgccctcctccgggccttcgtgacagccaggtcgtgcgcgggtcatcctgggattggtagttcgctttctctcatttagccagtttctttctctaccggggactccgtgtcccggcatccaccgcggcacctgacccttggcgcttgcgtgttgccctcttccccaccctccctaatttccactccccccaccccacttcgcctgccgcggtcgggtccgcggcctgcgctgtagcggtcgccgccgttccctggaagtagcaacttccctaccccaccccagtcctggtccccgtccagccggtgagtctgaagtcgtcgctgctccgagtcccttgtcgctgggagcggcacatggggtctccggactttgatgtgggggcgggggaggaagcgaccaggtccggcacgaaggagggagaggtggcctgaggagcggaggggggatgtgtggattccggtgaaagggacctgacaatcgcccccaacccgtgagaaaaggaggagcccrgttcttgcttgagaatgataaacttggaaacccttgggaaaggcgtgggggtcatgcagagacttgtattggtagggagcctgagtcgaggtccctgccggagttgacacagaggagagagggccctggccttcgggagctccagggatgtgggtcgggctggtgggtcaaagtatctgttggcttctttcaagtggtgggaccccaaagaatgtttaacttcaaagaaaaggggctgagatgtaaattagaggagctggagaggagtgcttcagagtttgggttgctttaagaaagggtggttccgaattctcccgtggttggagggccgaatgtgggaggagggaggataccagaggcagggaaggagaacttgmgctttactgacactgttctttttctagctgacgtgaagatgagcagctcagaggaggtgtcctggatttcctggttctgtgggctccgtggcaatgaattcttctgtgaagtgagttctcttcaacctccctacktgccagcttcacatatcttcccaccagacgttccttcacatattccacttctrcactgttctcttacatgctatttgaaaacttcctatcagcaaagagtcccccctataaaccccgacgaacctgtgctaaagtggcaaaactggggcccaagtcctgagtctgccaccgtccagcaatataacgttgggctagtcaatttgtgtctttttcttttttttgagactgggtctcactctgtcaccgaggctggagggtagtggtgcgatctcggcttactgccacctctgcctcccaggttcaagcgattctcctgctccagcctcccaagtagctgggattacaagtgcctgccaccatgcctggctaatttttgtatttttagtagagacagggtttcactatgttggccaggctggtctcgaactccagacctcaggtgatctgcctgcctcggcctcccaaagtgctgggattacaggcgtgagccattgcgcccggcctgtatcttttgttactaaagtggcactgctagtacttgtctcaggtggcctttaggaaaactgaaatgctacacattgaaatgttttgttcagaaaccatgctgttcagcttccaccttccttagccagctgagaggacaaaactggttcctagagacgggatacaggagtggagtagggacaaagatcttgaaaagaatgtctaagaaaaagattgctgtatctacttatccttagaaaagaaaagccaaagcttttatgggagagagtgtaggtgaactagggagagacacaagtacttctgctgagttgggagtgagaaacaagcacaacagatgcagttgtgttgatgataaggcatcacttagagcattttgcccaggtcaaagatgaggattttgatatgggttccctcttggcttccatgtcctgacaggtggatgaagactacatccaggacaaatttaatcttactggactcaatgagcaggtccctcactaycgacaagctctagacatgatcttggacctggagcctggtgaggcaccctcagggttgttttgtgtgtgtgcgtgcactatttttctcttcaaatctctattcacttgcctgaattttgaaatttcctttggttctctgatttctttaaccccaaattcatgctttattttgatcctccacctgactcttgtctagttttgtgacgtatatcacttgttctcatgttttctaartccgcaattcagacctattccaaaatgcgtttcctcatgggtctggtttgttgtctgtttctcctgctttgcaccttccagtctagartttcatcttctgcattgacattgttgcagttatgtattgaggagggagttgggagggagagcaaggagcagaggctgaaaaggtgtgaagggaaggcagagctgtcttcgtttgatgcaagggtcagaagcccaggtttctgggtcccatgcccagatgttggatggggtaaggcccaaaagtaggtgctaggcaaactgaatagcccgcagcccctggatatgggcagggcacctaggaaagctgaaaaacaagtagttgcatttggccgggctgtgtttcagatgaagaactggaagacaaccccaaccagagtgacctgattgagcaggcagccgagatgctttatggattgatccacgcccgctacatccttaccaaccgtggcatcgcccagatggtgaggcctctctgctcctacctgcctccttctgagcagtaagagacacaggttcctgcagcaagaagtcatgtttaagccctgtttaaggaagctagctgagaagaggggaagaaccccagaacttgggcctgggaattgaattctgattgggggtcatcctgaagggattgttttcagggagggagacagaccttgaatcagagagttgtgatagactgcctcttcctcaaggaacaaacaacaaatggctctgatggtttgtagcctgcctaattggaagaaaggcaacacagaagtttgagagcccrtctagtccagagaaggggcctctggacagaggtgggaggagtgggggacagagtggtatgggttgggctgcgaagggagttgcctcttctttacatctacctgccaaccccttccattgtattcacctcagttggaaaagtaccagcaaggagactttggttactgtcctcgtgtgtactgtgagaaccagccaatgcttcccattggtgagtgttgaagaagggaaaggaaagcaccgtgtggcagtcttatgggaaggagttggggctcaacacattggagcctgagtcctgaggggaggttaggtaggaatagggggatacctggcctgctgagtctggctgtctcccaggcctttcagacatcccaggtgaagccatggtgaagctctactgccccaagtgcatggatgtgtacacacccaagtcatcaagacaccatcacacggatggcgcctacttcggcactggtttccctcacatgctcttcatggtgcatcccgagtaccggcccaagagacctgccaaccagtttgtgcccaggtagggagcagggagagtcattaagggtcaaaggaaaggcccaagatcccccagagaggggaggacagggcatggccctttcttgaggtctgcttctcccagaatcagggcatctccctgctgagtgactgtgggaaagttatttgattatctgtgcttgagttaccttattgtagaatgttcttgagctgagaagttgggaaccacgaggctttagctctgarcaggtccatagaggagctcaggtggggaggtgggaatgcaggtgactggcagggcctggatggggctcatgctgctgcctctctgacctctgccctggcctaggctctacggtttcaagatccatccgatggcctaccagctgcagctccaagccgccagcaacttcaagagcccagtcaagacgattcgctgattccctcccccacctgtcctgcagtctttgwcttttcctttcttttttgccaccctttcaggaaccctgtatggtttttagtttaaattaaaggagtcgttatygtggtgggaatatgaaataaagtagaagaaaaggccatgagctagtctgctggtgcttgctgttggggaagggaaggtgatggtgtgttggactccaggggccctcatggcccagcccaccctccccagattgaaaaccaggacagatttgtgctcagtggattgggtggtgtttttagtatggagcagaacagaattcctaggactgcgtgtgatgaaatgcaaggtcaaaaggaaaagacaaagcatatttcaaagatgagaaatatttgtttggatatctatgactgtctgtttatactgtaaggggcttaatcagcagctccatcttttagttttagttctaaaggaaaagtagcctaaagtcagtmtaactaaagggtggaacgaggtgggacaaggtccggaattgctgctcagtgatgtgtgtgtgcctgccgctggtggagctgagactgctcatctcagaaggatggggatgcttgatttcctggccaggttgtcccagcacagtggggattggccctgttgtatgacgaagacagcacatggtggcagagatagatactaacccatggactttccaagggagggaataggtctttggagggtatgcaagacaaaggtagacactggataaagaacccggtagtgcccaggtattaccccatctgggccattactcccacactcaggaaccagacgttgtgggtgaggacatgctgtccctcctgccaagtaataacttccttcccagccaggatcctgccccaagtaggaatatagctctgcatttacagcagctcctgctcagaccttgtcaaaaccaccctgcagcttaggattaaggagcatggtcacaggaaggtggggtttcagggcatcccctcaggaactgcccatctccccagaattccaaaatgaaggtccatatgcttgtaggtgtgctggtcatggtgggcttcacagtaggaaagggtaagtggggcccaggggcagggagggaggaaggggtaactgagtccaggaagggggtggagcgtggccatggataatcgggcttcctactggcccagggtatttgagagtgacccagtgcctccatccctccttctgcctccccagttcctgttcccgacatccggacgtgccacttctgcctcgtagaagacccttctgtaggatgcatttcaggctcagagaagtgtaccatcagcagctcatccctgtgcatggtgatcaccatctattatggtaaataaggtcccaggaaggggctgctggtggggcagccaatggcttggtcttctctcctctcacaratcagggctgctccgggcatggggtacaagaagagaggaggggctgagtgcaatggctcatgcctgtaaccctagcactttgggaggctgaggcaggtggatcacttaagctctagagttcaagaccagcctaggcaacatagtgagaccctgtctctacaaaaaaatagccaggcatggtggtatgcacctgtagtcccagctactcgggaggctgaggtgggagatctcttaaactcaggaggcataggttgcagtgagccaagattgcgccaccatgctccagcctgrgtwacagagctagaccctgtctcaaaaaaaaccagaagaatcttggaaggaggggtctaaggttctagggggccagcagagctcacttttctagcctcttgaaggactctgggttagaagtaaattaggtctgggtgaaggatgggaaaagtcagtagcaggggttcttggactatgggaagctattggaaggggttatcagctttcccctctccctcagatgtcaaggttcgcttcatcgttcgaggctgtggacagtacatttcctaccgctgccaagaaaaacgcaacacctactttgcagagtactggtatcaggcycagtgctgtcagtacrattattgcaactcctggtcaagcccccaactccagagctctctgccggagccccatgacaggcccctggccctgcctctgtctgactmccagattcagtggttctaccaggccctgaacctctccctgcccctccccaatttccatgcygsgacggagcctgatggcctggaccccatggtcacactgtccctgaacctgggcttgtcttttgctgagctgygccgcatgtacttgttcctcaatagttcaggacttttggttcttccccaggctggactcttgacacctcacccttcctgaattccacagtgcaaatatctttctgtaacaccctcagcatcctgcactgccctctctgaaaacacccacattctttggtcactgtgatttcttaggcctccgtctgttgtaccactagcatctatatgacttttgtgtaattttctctcttgaactctggtgctgtttttttgtttgtttgagacaaagtctygctctgtcacccagggtggagtgcagtggcatgatctctgctcactacaacctccacctcccgggttccagcgattctcctgcctcagcctcccgagtagctgggactacaggcgtgcaccaccacgcctggctaattttttgtatttttagtagagacggggtttcaccatgttggtcaggctggtctcgaactcctgacctcgtaatctgccctcctcgacctcccaaagtgccgggattacaggtgtgagccacygtgcctgkctgagctctggtgctgttcttccccctagaaaagaatctctagtgtggattctgcccagacaggctgacctgagaaaggcacagtggttcctccattccttccccatcatctgagtgttccagtatcccccatccctctcaatccagtcacctgcctattgacatctagctctgtttcccctgtcttgtccatgtctctaagacccagtaccagactgaactagcagcaagaaggacgaggaggccgggcatggtggctcacgccggtaatcccagmactttgggaggccgaggtgggcggatcacttgagattgggagtttgagaccagcctggccaacatggtaaaacccgctctctattaaaaatwgaaaaatcagctgggtgtggtggcacacctctgtaatcccagctactcaggaggctgagacaggagaatcacttgaacccgggaggcagaggttgcagtgagccgagatcgcgccactgcactccagcctgggtgacacagtgagactccgtctccaaaaaaaaggatgaggaatagaattctgtgcagatgtcctgacttggcaattttgtgtccctgcctcactgtctccaccaacccccgcctgtcctrgtgttgttctgcctcctgtcctctcttgctctcttgtcagtctctggcttcctcggccccatttcacttcactgagtcctgacacccatctccctaggggcctgtgagaggagagggaagggtctgttctgctcagctccatgtcccccattttcctccacaataaactgggactgggctaaaactgtgtcacattgtttgtggggtcaggctcaggtgtgggcaggtaaacacagattaaagaggkttaatgcctggcgcagtggctcacgcctgtaatcccagcactttgggaggctgaggcaggcggatcacctgagattgggagtttgagaccagcctgacyaatatggagaaaccccatcgctactaaaaatacaaaattagccgggcttggtagcgcatacctgtaattacagctactcgggaggctgaggccggagaatcacttgaacctggaaggtggaggtggcgatgagccgagattgcaccattgcactccagcctgggcaacaagagtgaaactgtgtctcaaaaaaaaaaaaaaaaaaaaagggttagtgaggtttgggatccaaataggattgcagagccctctccattgcacttggcgtttgtcgcttcctctcggcctcctgtaaagggcacacatccctccccaccctctgcttagctggagatcaaagcatggggactgtgattcttcccagccttaaacataccctacaaaacctggaaagttagaccctgatgatgccaggtcttttcacctaagaaaagaaactttaggccaggtgcggtggctcatgcttgtaatccctgaactttgggaggccgaggtgggtggatcacctgaggtcgggtttgagaccagcctgaccaacatggtgaaatcttgtctctactaaatatgaaaaattagctgggcatggtggctcatgcttgtaatcccagctacttgggaggctgaggcaggagaattgcttgaaccggggaggtgtaggttgcagtgagctgagatcacgccattgcactccagacagggcaacaagagcgaaactctgtcttaaaaaaaaaaaaaaaagcctgggcgcggtggcttgcctgtaatcccagcactttgggaggccgaagcaggcggatcatgaggtcaggagttcgacaccagcctgaccaacatggtgaaagcccatctctactaaaaaaaaaaaaaaaaaaattagttgggcatggtggcacgtgtctgtgatcccagctactcaggaggctgaggcaggagaatcgcttgaacctgggaggcagagtttgcagtgagccgagatcgtgccactgtactccagcctgggtgacagaccgagactgtctccaaaaaaaaaaaaaagaaactttctctttaaaccagaaagactcaggaactcagagccacatgccagagttacctgctgctggggccctggactcctgccattccttagttcttttcaaggattctggcatccaggatgccctctcgaggggcccaatttgaggggcaaagtgctgagagcactgatgttgggctgcagtggttggatcttcatgctaatattttaattttgaaatagtgcaaacgtatagaaagcaaggatggatacaacagccttttccatacactggataaacatgctggacataacgctgctctgagtcaggcttggtattgagcagcaggactcccagatgagtatagccaggtgtctgcccttccaagtcttgcagcccagtgcttgggttatgaaacctttttctgaaaagcagtgcagctttgtggctgggaggtccaatcccagcccctctaccacttggatatgtcagtctcttcagccccaccttggtcacctgtcaagtagggatagtgcctcagatgattgagaaaacacatgtaaatgtgcatacacaagtagaagttaaggccttttccccctcaaaaaaatatatttgccctagagtcaaatgcatacacaatgttcagcttttttttctaaggttcttactatgttgcccaagctggccttgaactcctgggctcaagagattcttctgcctcagcctccaagtagctgggactacagwtgcacaccaccatgctcacctggctgatttacttattttcaaacctttttggtaaaacattcagaagcttgcacatatcacaagatggatttttgtaaaccacacatctgtgtaaccagccaccaaatcagcgtgaagacctttaccygcagccaagcctgcctctgttcccctctcccaggtgctcttcccagctctggggtagccgctgtcctgactggtagtagcttagatgagttctgtctgtgcttgatggaaatggcatcgtacrcatctgcttttacctatatagtgttttgcacacgtgttaacaaatctgtgtggcctgtactctgacggaaaataccaaaccaatgataattaagtcatgaggcagttggcgtacaaagagaggtacaaacccttaatgtgccccccaacccccaccttgctaagtccacccttctccatgacctctgacgtcagtataagacagagaaaggcccaggtttatagcaggtcaacctggaagacaccctcagaggctgaagaacttggcccagaattgaagagaccaggactccaataaggtctaacatctctttgagagtggccttctcgg

SEQ ID NO: 10052 - DNA, 19486 bp, Homo sapiens
tatgtctgtttccctctggtcagccattggagggaggagaggggctgtggatttcttgaaggcgtcccactcacctgagggctggggtctaggaggttgtgaaggcagcattgggakccatgcycccatccccacagtgcggggctagcaggagaggaggaggtagrtctcattgtacacatccgtcttctggagagaacaacctctcctaccatcccttccttctacaccttctctgcctgtcataggtggctgcaggaggggtccacgttgggagggacaggtgagctggcctttggtgctgacacactcctgactttgccctttctcctgcagggggtgccattcccgcagaatgaggctaatgccatggatgtggtggtccagtttgccatccaccgcctrggcttccagccccaggacatcatcatctacgcctggtccatcggcggcttcactggtaccagcctccctcccatcccccactgtagacacattcatgaccacccagccccacccgggagaggtggggaaatggggtggggtggaggctcaaggaagaagagagaggaagtagaatctctgagtgggcctggaagaagctatcctatttgcatacacttcacctttccttcccctcttgtgcccagtcattaaaaggaaaagcagacccaggtcctgggtggggagatcagggaaagtgaatgtttcctgcccattatcttcagtgcactatctccagtgttctatccccatcctctccagatagtyccctaaccaagtgaagtaggttaagaaaaaaacaagggataacatagggggaatggggttggcctatagggtcagtgggatgagagcatgggtggtggggagaaaggagcctttctcagttcttactcttcttccctgccctggtaccagccacgtgggcagccatgtcctacccagatgttagtgccatgatcctggatgcctcctttgatgacctggtgcccttggccttgaaggtcatgccagacagctggagtgagtgcagctcccaggcctgcccttcctgggaaggggtgggctggaactgggaactgttctgagatggctcccttttcttgggtggggagtaagtcgccccattgttggaagcaggaggaytcctttgtctgggggcctcagttttctttctccgtgaatagtgaggacctttatgttgggcaagggctttgtctctgccatcccttcacctttatcccactctagggggcctggtgaccaggaccgtgaggcagcatctcwatctaaacaacgcggagcagctgtgcaggtgagggccggccagcgtccggcattgaacacctgccccccatacagctctgctgggcgctcaaaccctgaaactagtactaaagtgcaagttggtaaaaggccactggctcacatcctgagtgaccctgccaccacctcaactggcctaacccctcccaggtcccctgggactctggaccacctcaggatctggcaaccaaagggttaaggcctggcacggcaggggtctcccagcagggccagactgaaccatgccccttaaataatcccctctcacccctgagtgaagggctaggtcaagggctgtgctatagcaaggggagggtaagaatgctaccagtgcagggataggggtgggccagttgtcacccgtctccctctgagctctcccttcccactgctctgttctctgaagataccagggtcctgtactgctgatccggagaaccaaggatgagatcatcaccaccacgtgagtgcgtgggaatctcggccctcaggaaccccagagatggccaggaacttgtcccttctacctctgcccaccagaaacctgggtatctagacccttcctcctaacctccagcccctccagggtacattcttctcacccccagggttcctgaggacatcatgtccaaccgaggcaatgacctcctgctgaagctcctgcagcatcggtgagagccagggtgtgtgcgcgctgggggcagtgtacacacacagatactgataccagcacagggaaggagggaggaaggttcagggatggtgaatgaaaaaaaatcagccctgacctgtcctggcacttcctccgtaggtatccccgggtgatggcagaggagggtcttcgagtggtgaggcagtggttggaggcctcctcacagctggaggaaggtgagaagggatccagtgaggcttggggcgggggcccagcaaggtcaggttgctgactggctgtcatctctctccctgaccagcctcaatttatagccgatgggaggtggaagaggactggtgtctgtctgtcctccgctcctaccaggcagaacacgggccygacttcccctggagcgtgggtaaggagctcctggggcaggagagagggtgggaagggcctaggaaggggatgaatacccagatgtgtggcctattttgagcgcctcctctctgcaggggaggacatgagtgcagatggacggcggcagctggctttgtttctggtgagctaaggagtgggaagtgggaagggttcttgaatggccagggctcacatagggggactggggataccctataagcattggaagtggcagcttttgtagagtgggtggtggatgcggaagtggagggtggggagggagtccagtggctgcccctcccaacagtgctctgtaccccacctgtcccacctcctttcctcaggctcggaagcatctgcacaactttgaggccactcactgcaccccactcccagcccagaacttccagatgccctggcacctctagggaccaactgggactcattatggaagaatggggtgagaggagacatgaggaaagaccctcttatttgtgattctctgtgttcatgttgctgtttatagtttgtgkaaagtgggggaccatcccccttctcaccactgttcctcttgcacgtttcccctcattcatgtggctgtacttaaccttctccaayatacatcctgcattacatgaatggattattcctaataattaataaaaaggtattttttctactatcwggctaattgtataacttctcaagtgtccagggagccaggggcaggtagtggggagagcagaggccccaaagagctgggctttgggaaaccctaactctagacaatctagctaatctaacccttcccatctctgtgtccccctaggccttcagcccctaacctgagctttcctcaggcagcaggtccccaaacctccccggtccctgatgtgcctactgttatcacaactgtgcagcctccytggcccctcccgcctccttcttcagttcttcctgcatacaacmaccccaggagcccatggttgccccctcctgcttacggctcatgagctttctaggatccgatttcacctacccagtgcttctgctggtttccaggttcaacctgcatggtgttactagcagtacccccaattttcattgctcacctcttgttatcttggtgaagagtgaggaagggcctgctccccacgtcttatgcagcaaaccctgcacacccaccttgccatgtcatcaagtctctgtcctcacagcctttttgcagttcaacaaacacaggccctgccagggacggagggccaggtgccaaggactcatgtcttctcagagccatactttgccttttggacggctctgttaggagaagatgcttaggttgtacctgaggaaattggttccctataactgccatctatctctaactttggaccttgtggaacacagtgaataaatccctcttccacccattggtttgttgcctggcagttttttttatttttttggagatggagtcttactatgttgcccaggctggagtgcagtggcacaatctgagcttgctgcaacctccacctcccaggttcaagtgatcctccagcctcagcccctctagtagctgggattacaggtatgcgccaccatacccagttgatttttgtatttttagtgaagatgaggtttcgccatgttggccaagttggtctcgaactcctgacctcaggtgatccaaccgccttggcttcccaaagtgttggggattaaaggtgtgagccactgcgcctggccgctggccactttcttcatttggaaacttctcttttccagatgaaagaccccaaagtttatcgccctgagtccatttttgttttgttttattttgttggggatggttttttgtttgttttttgagatggattctcactctgtcgcctaggctggagtgcagtggcacgatctcagctcattgcaacctctgcctcccaagttcaagcgattctcctgtctcagcctcccaagtagctgggattacaggtgtgtgccactacacacagctgatttttcgtattttagtagagacaggtttcaccatgttgcccaggctggtctcaaactcctgagctcaggcaatccacccacctcagccgactccattctttttttttttttttttttgagacggagtctcgctctgtcacccaggctggagtgcagtggcacaatctcggctcactgcaagctccgcctcctgggttcacgccattctcctgcctcagcctccctagtacctgggactacaggcgcctgccaccacgcctggctaattttttgtattyttagtagagacggggtttcactgtgttagccaggatggtctcgatctcctgacctcgtgatccacccgcctctgcctcccaaagtgctgggattacaggcgtgagccaccgcgcccggccaactccattcttttgagcaagatacttaacgtgggcgacaatgttctaatgtcctagatggagtctctggctaaatttctgtgtcttctccaaacccagtgcatgaagctcttcttgaaaccccagggcagaggctgtgtgtgcccccattagcgctgcaactccttaagggaagatatactgagtctccactggaagtggagatctgagacttaatcaggtgatgtgatgcctgaaatttggagttagaagaggcaggtgaccacagctccataatgctccaccgttagcaaacaggtggatagctgatactggtgccctctcctctatcccattccaggggggcaaacgatgggaagtgtggaacatgaagctctggagccagctgcacagttctgaatcccatcctcccagatccaacagaagagttaatcccctgaaaactaaatttttgttcagctaagggaagctccttaaatgcaaagaggagctgggcatggtggctcacatctgtaatcccagcactttgggaggctggggcaggaggatcacttgagcctagaagttcaagactggacagggcaacatagggagactccatcagtacaaaaaatttaaaaattacccaggcatggtggcatgcacccgtgttccaagctactctggaggctgaggtaagaggatcgcttggctgaggatcacggtaggttgaggctgcagtgagctgtgatcgtgccaccggactccagcttgggtgacagagtgagactctgtctcaaaaaaaaaaaaaaaaagcaaataggggtgcccagtctcacctcccataccctggggacaaaggacacccctccctggacatggccattagggactctgctgaactgcccctactgccactttcccccatcttactgcatgtaattgtagacaacagtggatgacctgaggggcccttagatacctgaaattgggtagggaaagaaaggtaggctcaacatgtgaattctgaacccccccatccaggggcctcagcctacttcagattactccctatgcaataaggttcagagcagctgtgtttgttttcagaactaatccccacccaggggtggaagcaggcccctgtccactcctcaccctatatagcaaagttccagcagttccaggggatgatcagcagagatgcagaccttcccagttgctggggcgctggaccctgctatactggacacaaggtgaggcctgaaagtccaggcaccctgaggagctgggcaaactagcagaaaagatggcgctgggagaaaggaaagttagactctggacgggaaatctggaaagaagtggttcccagctgggccaaaaagcctcatcctacgccgtctcatcgacctgggctccaccctgagtgcctccagtgtgaggtgctggactggctctgtgctgcctgtttgggttgagggtttgctcctaggagaggcatgtatttctcgtacagctgtcacaagcgagtgagggctccggaggtggagggcccaagagggtggggagctcaggcgtcagtgatagccagatttccatccatcggtccgtccgtccgtccatccatccatccatctatccaatcaacaagccattccggattcttcaggaatccagtcattcatttatatttaggttaaagaccctctctctggttcctctctagaacgcaatctcgagccgctcccccaacaaaccgtggccctctcccgaycgggtcatctacagccccgcccctcgtttgcctggctccattcccctaacctkggcgttctgtcctcaggccccgccttctttgtttcgtcactcggttgcttaccctcaggtatcccttaactctaggtaggagcactcagaagggacaccgtcatctgctgctgtcgccatggcgattattcaacgccctgcctcttcaccccaggaaaaccttcgcggaacccgtcaccatggaaacsaactctctggactcttagcgcgccctgggctggccctgctgggtggacaggagaggagcaaaacgcaacaaagacgggattaattactcggaggccgcgccccctccgaagaaggccccaccctgccccggcctcacccctccccgaaataattcgaggaaatattccgcgaatgctgggtgggtgtcttgccccccggttccctcaaggcccacggtcgcttgaattccacagcaagtcctcccggacctctcagggcaatcccctcccgaagcccagcctcagcctcgcaaagcctctagtcgttggccttttcgttgcgattatattcgagagggagcttcagagggcgccgcgaagttcccctgtgcttcccctttgccctttgccctcttcgcttcaagaggagccctggctctctttttttttttttttttttttttttgagacggagtcttgctctgtcgccaagctggagtgcagtggcgcgatctcggctcactgcaacctccgtctcccgggttcaagcgattctcctgcctcagcctcctgagtagctgggactacaggcaggcgccaccactcctggctaatttttgtatgtttagtagagacggggtttcaccatattgtccaggatggtctcgatctcttaaccttgtgatccgcccagctcggcctcccaaagtgctgggattacaggcgtgagccacggagcccggccctctgattctttttgtctatcactctgtgcactcattcattcaagacatttatgtaggtgccccgcgttcctctgcagttctccactactctggcttttctctaatacaatttattttgtgttattatttctttaagacagagtctcactctgtcgcccaggctggagtgcagtggtgcgatctcggctcactgcaacctctgcctcccaggttcaagagattctcctgcctcagcctcccgagtagccaggactacaggcgtgcgccaccacacctggctaatgtttttgtattttttgatagagacggggtttcaccatgttgctcaggctggttgcgaactcctgacctcgaatgatcccccaccttggcctcccaaagtgctgggattacaggcatgagccgccacgcccggctaatttttggtatttgtagtagaaacggggtttcaccatgttagccaggctgggtgcgaactcctgacctcaggtagtccacccgccttggcctcccaaagtgctgggattacaggcgtgagccaccgcagtccggccctaatatagtttttaaattcattcattccaaggcttttgggaggcgctcagtggcgtgcagtttcctctcgaatttctttcttcccgcagtctttctgggcgggcgtctcccgtctgtttcttcccatcttcccccttatcatcctgggactggataattcttgaatagtctgggaggtagcagggaacccgagttcggagcctcgaccagaacctccagacgggaaattggagcaggtggtgtcgttccaggacgctgaggaccacctcctcccctaacgcacagcccaacgatcctaaaagtaaaaaccctgagtttctgagtcaagactgagctggtggggtggggaccgagtaggcgtggatggggagcccagcgggtccccagcggagaaaatgggtgagacgcctggggccgcggtctccagaattcgcctgggagggagagtggcgctacggcgccgccttcctggggagccgcttcgggctccggatgtccgctggggcccgacgcttgggtcccgacgcgcggttcgcactttccaggtttcttccccagggaacagagcttgagcsgggggccacccccccgtcctaccggagttctgaggtgcggtcaggcgcggagagcggacgcccagcgccagattctgtgggctccggagttcaggcccactgagccgcagctgagcacaggcggggcaggaaaaaggatgaggtgagggaaggcgctgggttcctggaaccccaagggagcactgagctgagtacgtatcgcttgggatccaggtgtccttgttttaggatgtctgacaggtgtccccagggtatgagaagtgggactgggcaccccctatttgctttttttttttttttttgagacagaccacatgtttcctatcttggaaaatggtaccacttccttgtgcaagcctacccctgttccctcacccctcgttcagtccaacagcaaatctgtccagtcttctaactgtatctcaggttcattagccccgcttcctcgtccctgctcgtcttctgccggaccagtccgccatcttgtgaccggactcgggaatagcgtcctacttcccggcggcctccactcttgacccaaatgcaatgtgcagccatggcaatcttttataaacagaaatccgatcaagttactcctctgccgaaatccctctggtcagtggtttaactgtcgaggtgctcctggcagcactctgccctccccacatcattgctggtggacttgtctcccctactagactgtgccctgtgagggtggagactttgtgcagggttgtatccccarcatctgatgcagtgattcaataaacatctgtccaattaataggaaagacagttccttttctcattcccctattgctggtcccctgccctcaagcaggatgttatgccccagagtggctgtgggtgcgaacattctgcccctctggctggtctggcactgatttccaccctgagctggtgttgcctctctccttcctcttggccaacctctcttccaccaatataagcccaaactggaggccagcaggcagtcatgcgttttatggcaggccctgcagggagccagagtctgggtcccctgtgcttccacagcagcccccaagccctctacacggtcctcttaatagtgctggtcatgatgagcttggtgtttggtaagtggctccaagggttcagaagggtctcctggcctggatggagaaacccacagacaccaagtgtctgggtacacctgtccaggatgctcaggtaaacccatgcaggaggagagatgggacagatgggtttggtagggaatgcctgctcatggactgatgtgcaatctgaagatttttaaaaatttattattattattatttttgagatggagtctcgctctgtatcccaggccggagtgcagtggcgagatctcggctcactgcaacctccacctcccgggttcaagcgattctcatgcctcagcctcccgaataactgggattacaggcataagccaccaagcccagctaatttttgtawwtttagtagagayggggtttcaccatgttggccaggctggtctcgaactcctgacctcaggtacctgcccgccttggcctcccaaagtgctgggattacaggcgtgagccaccgcacccagcctctgaaggagatttctagtgaccaccccagggctgtctcacttcacagcagtgacctgaatagagatactgaaggaatcctctctggatctgagggcaacatagaatagggagggttagggagtgtgctggatgagaaaaccagaatccacaggatagaacaagactgagtccagcctgctgggctccccacttggctgcaaagcaccagccacagagacacaggattcaaagtgttggtttagcactttcctctgcctaacaccaagtgctctgctgggtctggggatttgttaacatgtggtctggccttaggaccagaggaaaagggggatgtatgtgtatgcagttggggaaggaagcagagaattggggctttgatggttttctgagacaggaagggagggaggagtggggctgagtggcctggaatcaggcagtggtagggtgtgaggtagaatggggtgtgagtggggtcagcacttctctgtgttctaggtaagtttgttcctgtcaattgggaaccccctcaaccacttccaytccccaaatacctgygctgctaccgatgcctcttggagaccaaggagttagggtgccttctgggatctgacatctgcctcaccccagctggcagcagctgcatcactctccacaaaaagaacagtaagtggccttctcctgtcatgggcccagcactctcccaaacggaaactctctcagcctcctaagctgcaccccaagtcttgttcccataatcccataagacattgctccratcctgtcttttttttttttgctgctctgtcacccaggctggagtgcagtggcgcaatcttggctcactgcaacctccacctcyccagttcaagcaattcttgtgcctcagtctcccaagcagctgggattaaaggtgcacgccaccacgcccagctaattttttgtatttttagtagagatggggattcaccatgttggccaggctggtctcgaactcctgacctcaggtgatccacccaccttagcttcccagagtgctgggattacaggcgtgagccaccgtgcccagcctctcttcccttttcttcagagccacactctgtctccacttccactaaccttctctcctcaatctgtagctgaatakcttctaccctatcaaggtgcgcagctttgacggggaccctccagatctccaggtgcccttgcctgtcctcaagctgtctgcttccgcatctgtctgcagttactgctggtgttgctcttctcctgcatcctccacggcttcttcagtctccttcatggagcgttttctctctgacccttagtggttcatgttcaccaaggtttggtccttagctgtcttcccacttcatatactcaaaagcagaggattttatctgctttgctggcttcaaccagcagccacataccacttccttctgaatctgaatgttatgtcaaaccgctctcctcatatcccgttgaccactggacatctccctcgctgaaaattgactccttcccgatgcctgctcttccaccgaccccccacctttcttaagttagcaaaaacgtaacacataatatgtgctaggcactgttctaaacacttgcaatccrctgaggcaggtattattactatgtgcattttacagatgaggaaacaggtgcagaaaggtcataaccttgcctgagtctcacagatgctgagccagaatttgtgatggctccagagatggtgctctcaacaaccactgcatgcagctgcctgtgttcaagtcctcttactacccttttaacatagccgatgcacagatgtgggtcaaatatcagagtatacaataccatcaaaccaaagtctcccgctactaccctaacccacctggctcccctgcacatgtgaccactttttttactttctggatgatccctcctgcaatcttttatgcacattccaccctgcacaaatatgctgtttactattttttcacctcttcccccgccccaacccaagatagtagcatcccactgtaaacattattccacatttaagttaggggaactgaatgttccgatatcagtttgtaaacagcttccttgttttattgacctgctstatactactccatagcatgcgcatatcacagctgatttccccatcccactattgatgggcattttggtcatttctctcaagcagggcagcagcaaacatccctgaacatgacttcttgggatgcaggcacaaagatttttctctattatgtataacagcagcagacatcatcttattctcttttggtctgaaaaataaataacaatacacctccttcctgccacccaatctccaaaacatttcccagctttttctcacatggtcctatggtgctagttctcctcacttggctcagtaactcccaactccccctccaaccattacatttcatatggctcttttcctccagccttgcatgggaacttcagtggagttccatggctggtgaacactgggcatgtccacccatgcctaactacaggaatcttttctttttcttttttttttgacttatgagtgtggggatgagaggatttggggctcttcctggggacttccgtatcactggtgcccactgtccctccccaggcagcggttctgacgtcatggtgagtgactgccgaagtaaggagcagatgagtgattgttcaaatacccgaacttctccggtgtctggcttctggatattctctcaatactgcttcctggatttctgcaatgaccctcaaaacagagggctctatactccttagtgtgactgcagcaaactttggtgtaaaattccaccagtttccagccaccttcctgacttctatctgggcttggccaggacttctagtccctcayaccagccctccttgcctccctccagccactggaccccagccttggctcttcctcttggttgacgcccttcagcacacttactgctactctgtacccccagccctactgcccaccaggtttcctctcttgtcccctagtccctggatgtttctcccaaataaatttgtgtgtaaactgtttggtatgtctctttcttctggtggaggtgaaggctgagggaggtgcacctgcctaactgccctaccatgggtcaggtaagggacccccagctctgctgagctgtcctcttgtcctgccttggtatgtgatttgctctagacacaaaaagagaaagaggaaatgaaagccctcctatggygaatgccagaaagttagtgggcatcctcggcagtgctgtcagaccagagctgtgtgggggctaggggcgtttagagggctatgttggtgggaagggggctgcgaaaggaccaggcccaggtagaaggaggtgggtgagaaggccactctttttttgagacagtctcactgtcacctaggctggagtgcagtsgtgtgatcttggctcattgcaacttctgcctcccaggttcaagtgattcttctgcctcagcctcccgagtagctgggattacaagcacatgccaccacacctggctaatttttatattttattagtagagacggggtttcaccagttggccaggctggtctcgaactcctgacttcaagtgatctgcctgcgttggcctcccaaagggctgggattacaggcgtgagtcaccccgagccgagaaggccactctcaaagagatgttagaccttattggagtcctggtctcttcaattctgggccaagttcttcagcctctgagggtgtcttccaggttgacctgctataaacctgggcctttctctgtcttatactgacgtcagaggtcatggagaagggtggacttagcaaggtgggggttggggggcacattaagggtttgtacctctctttgtacgccaactgcctcatgacttaattatcattggtttggtattttccgtcagagtacaggccacacagatttgttaacacgtgtgcaaaacactatataggtaaaagcagatgygtacgatgccatttccatcaagcacagacagaactcatctaagctactaccagtcaggacagcggctaccccagagctgggaagagcacctgggagaggggaacagaggcaggcttggctgcrggtaaaggtcttcacgctgatttggtggctggttacacagatgtgtggtttacaaaaatccatcttgtgatatgtgcaagcttctgaatgttttaccaaaaaggtttgaaaataagtaaatcagccaggtgagcatggtggtgtgcawctgtagtcccagctacttggaggctgaggcagaagaatctcttgagcccaggagttcaaggccagcttgggcaacatagtaagaaccttagaaaaaaaagctgaacattgtgtatgcatttgactctagggcaaatatatttttttgagggggaaaaggccttaacttctacttgtgtatgcacatttacatgtgttttctcaatcatctgaggcactatccctacttgacaggtgaccaaggtggggctgaagagactgacatatccaagtggtagaggggctgggattggacctcccagccacaaagctgcactgcttttcagaaaaaggtttcataacccaagcactgggctgcaagacttggaagggcagacacctggctatactcatctgggagtcctgctgctcaataccaagcctgactcagagcagcgttatgtccagcatgtttatccagtgtatggaaaaggctgttgtatccatccttgctttctatacgtttgcactatttcaaaattaaaatattagcatgaagatccaaccactgcagcccaacatcagtgctctcagcactttgcccctcaaattgggcccctcgagagggcatcctggatgccagaatccttgaaaagaactaaggaatggcaggagtccagggccccagcagcaggtaactctggcatgtggctctgagttcctgagtctttctggtttaaagagaaagtttcttttttttttttttggagacagtctcggtctgtcacccaggctggagtacagtggcacgatctcggctcactgcaaactctgcctcccaggttcaagcgattctcctgcctcagcctcctgagtagctgggatcacagacacgtgccaccatgcccaactaatttttttttttttttttttagtagagatgggctttcaccatgttggtcaggctggtgtcgaactcctgacctcatgatccgcctgcttcggcctcccaaagtgctgggattacaggcaagccaccgcgcccaggcttttttttttttttttaagacagagtttcgctcttgttgccctgtctggagtgcaatggcgtgatctcagctcactgcaacctacacctccccggttcaagcaattctcctgcctcagcctcccaagtagctgggattacaagcatgagccaccatgcccagctaatttttcatatttagtagagacaagatttcaccatgttggtcaggctggtctcaaacccgacctcaggtgatccacccacctcggcctcccaaagttcagggattacaagcatgagccaccgcacctggcctaaagtttcttttcttaggtgaaaagacctggcatcatcagggtctaactttccaggttttgtagggtatgtttaaggctgggaagaatcacagtccccatgctttgatctccagctaagcagagggtggggagggatgtgtgccctttacaggaggccgagaggaagcgacaaacgccaagtgcaatggagagggctctgcaatcctatttggatcccaaacctcactaaccctttttttttttttttttttttgagacacagtttcactcttgttgcccaggctggagtgcaatggtgcaatctcggctcatcgccacctccaccttccaggttcaagtgattctccggcctcagcctcccgagtagctgtaattacaggtatgcgctaccaagcccggctaattttgtatttttagtagcgatggggtttctccatattrgtcaggctggtctcaaactcccaatctcaggtgatccgcctgcctcagcctcccaaagtgctgggattacaggcgtgagccactgcgccaggcattaamcctctttaatctgtgtttacctgcccacacctgagcctgaccccacaaacaatgtgacacagttttagcccagtcccagtttattgtggaggaaaatgggggacatggagctgagcagaacagacccttccctctcctctcacaggcccctagggagatgggtgtcaggactcagtgaagtgaaatggggccgaggaagccagagactgacaagagagcaagagaggacaggaggcagaacaacacyaggacaggcgggggttggtggagacagtgaggcagggacacaaaattgccaagtcaggacatctgcacagaattctattcctcatccttttttttggagacggagtctcactgtgtcacccaggctggagtgcagtggcgcgatctcggctcactgcaacctctgcctcccgggttcaagtgattctcctgtctcagcctcctgagtagctgggattacagaggtgtgccaccacacccagctgatttttcwatttttaatagagagcgggttttaccatgttggccaggctggtctcaaactcccaatctcaagtgatccgcccacctcggcctcccaaagtkctgggattaccggcgtgagccaccatgcccggcctcctcgtccttcttgctgctagttcagtctggtactgggtcttagagacatggacaagacaggggaaacagagctagatgtcaataggcaggtgactggattgagagggatgggggatactggaacactcagatgatggggaaggaatggaggaaccactgtgcctttctcaggtcagcctgtctgggcagaatccacactagagattcttttctagggggaagaacagcaccagagctcagmcaggcacrgtggctcacacctgtaatcccggcactttgggaggtcgaggagggcagattacgaggtcaggagttcgagaccagcctgaccaacatggtgaaaccccgtctctactaaaaatacaaaaaattagccaggcgtggtggtgcacgcctgtagtcccagctactcgggaggctgaggcaggagaatcgctggaacccgggaggtggaggttgtagtgagcagagatcatgccactgcactccaccctgggtgacagagcragactttgtctcaaacaaacaaaaaaacagcaccagagttcaagagagaaaattacacaaaagtcatatagatgctagtggtacaacagacggaggcctaagaaatcacagtgaccaaagaatgtgggtgttttcagagagggcagtgcaggatgctgagggtgttacagaaagatatttgcactgtggaattcaggaagggtgaggtgtcaagagtccagcctggggaagaaccaaaagtcctgaactattgaggaacaagtacatgcggcrcagctcagcaaaagacaagcccaggttcagggacagtgtgaccatggggtccaggccatcaggctccgtcscrgcatggaaattggggaggggcagggagaggttcagggcctggtagaaccactgaatctggkagtcagacagaggcagggccaggggcctgtcatggggctccggcagagagctctggagttgggggcttgaccaggagttgcaataatygtactgacagcactgrgcctgataccagtactctgcaaagtaggtgttgcgtttttcttggcagcggtaggaaatgtactgtccacagcctcgaacgatgaagcgaaccttgacatctgagggagaggggaaagctgataaccccttccaatagcttcccatagtccaagaacccctgctactgacttttcccatccttcacccagacctaatttacttctaacccagagtccttcaagaggctagaaaagtgagctctgctggccccctagaaccttagacccctccttccaagattcttctggttttttttgagacagggtctagctctgtwacycaggctggagcatggtggcgcaatcttggctcactgcaacctatgcctcctgagtttaagagatctcccacctcagcctcccgagtagctgggactacaggtgcataccaccatgcctggctatttttttgtagagacagggtctcactatgttgcctaggctggtcttgaactctagagcttaagtgatccacctgcctcagcctcccaaagtgctagggttacaggcatgagccattgcactcagcccctcctctcttcttgtaccccatgcccggagcagccctgatytgtgagaggagagaagaccaagccattggctgccccaccagcagccccttcctgggaccttatttaccataatagatggtgatcaccatgcacagggatgagctgctgatggtacacttctctgagcctgaaatgcatcctacagaagggtcttctacgaggcagaagtggcacgtccggatgtcgggaacaggaactggggaggcagaaggagggatggaggcactgggtcactctcaaataccctgggccagtaggaagcccgattatccatggccacgctccacccccttcctggactcagttaccccttcctccctccctgcccctgggccccacttaccctttcctactgtgaagcccaccatgaccagcacacctacaagcatatggaccttcattttggaattctggggagatgggcagttcctgaggggatgccctgaaaccccaccttcctgtgaccatgctccttaatcctaagctgcagggtggttttgacaaggtctgagcaggagctgctgtaaatgcagagctatattcctacttggggcaggatcctggctgggaaggaagttattacttggcaggagggacagcatgtcctcacccacaacgtctggttcctgagtgtgggagtaatggcccagatggggtaatacctgggcactaccgggttctttatccagtgtctacctttgtcttgcataccctccaaagacctattccctcccttggaaagtccatgggttagtatctatctctgccaccatgtgctgtcttcgtcatacaacagggc

SEQ ID NO: 10053 - DNA, 12854 bp, Homo sapiens
cccataatttctttgaacattccatatacctttatgtgcatatattctcatccgcccctagtccctccagaatgctgtatggtaacaagcagcatggctcctgggattaaaatctcagctggaagttgctgggccagagattatcaccagatgtgtctccagtcctggctcacaggaggaccactttctgattagctccacaggcagtgctggctttgcttgtttctgttaactccctctgcagagccagaggtggcttttcctgatgtctrtaatggtctggaatgggcagggaaccatcccatcggccacactgtctgtctgggtcaagtccacggtcattcagtgccgctggcattgttggaaagcaggaccctgggctgcagtctgtggagacctgaaacaacctgtgtcagttttcaaccaaagccccagcttggaaaaatgagaactccatttctttccagcttcagaaaacagagtgcatacctctttgatagtggaaaaaagatttacacaattagtttagatcaggtgaggacccactgaacccttgacccaaatgcaagctgaactttctggaggttcacagtttctaatttttcggttttcaagtgcttctgggtctcagccttgattagcagtagaaatgttgatcccttgcagggagagccatccctgcactagcccgcactgctgggagccagtggaatgagtctccaagcattcctgctcctgagcttttggcatttttggtcatgttttttaaacatgaggtactgatggaatatatttgcaaattagcatatttttgcctctgttcacagctctatttttaactgtatcatttatttacttgtctcatcaaaggcacagcaagaatatacccagaaccaagccctatccttggggacaaagagaaaacattctccccaccacccccagacacttgatcatgtaatcaktccttagaggaccttgttgggaggtgttaacagcccctgatgaagccatcagttaaacaaatgagtcaacctctgatctctccaggaacctaaaacagctcttgccatttggtaatgctgggaactcactaccttactaaaataatgcactaaacattgaaaatggatgagttgttgtctattcggacttagtctcaaaaatctkccattgttgtgtttaggtgagtgagtggcctccagcatctagaagtcgatatttgtctgggagtgtcagtcagagctttgtttcttctcaggaatgtgttcatataagcaacattgaaagcattgctgcaaactgagcttgaattcttctcacctcttatgtagcctccgaaatccaagggaaaatgctatcaatgaacggattcagctttcaaatgcctaacttctagtcatcttggcagtctgayaaatttaagttttttaagtgaatttgtcatagagtggggtttaggatgccaaatacataactcatttatatttattttttaaaagcttatgatcatcttcttcaacccataaaacatttttcgaatgacaaaacagaaaatgtatacttttataatccagtttttaaaaagtcaaagctatgataatcttgtcatttcagaaaggtaatcccagtgcatatttctccatgcagcttattgacgtaacctaagatgagaagacactactattcatgcctggtcagaaagcacagactggctatgtaacagccccagcaggraagcactgggtgcaagacactggattaaaytgagacaaatgtttgcttctcagaatggcagtgaccatgggtgcttgactgtgggtggggatgacagatttcatgctttcctctttcagaatcatgtctccaacctcctttgtatatggcgagtccgtggacgcagccaacttcattcagctggatgacctggagtgtcactttcagcccatcaatatcacccttcaggtacccactcctggagacctcctctgtccgtgggggctaacggaagggcacatgggatgtctctcctacagagggctaagctcttgtcaggagaaacccttctgtggttggctggtgtggtgtgtgtgtgagatctgtaaccacacacagaatgaatccttttcgatgcctggtactctgctgtgcaggcccctctgctttttcaggatttggaaggacaggtccacgtcatgaatgccagttttccccaagaagccctctgygtggtggaggcctcagccaatgtcccagcccagatgaccccatgaggacccctttctgttctccatcattccccaccttctgggcagggctgcctcagaggatttgctgtgtcccttcctcctgagattttcttgccagctcatccaggagcccactcctcctgcaggggaacagcctttcggaagggcagttttataagaacagaggagtgtgagyccctgtgagcccccacgggaggcacgctgctccctcactgagccatggctggcttgcccaggcacacaggcatcatttccagcaagtccacttggtgtagactgtggacctcatgaaggacactgtttcttctcttagttgggggtsagcaaactttttctgaaaagagccatggggtaatttaggctttgtgggccatttggcctctgcagcatctattcaaccatacttctgtagttcaaaggcagccatagataacacagaaacaaaattttagttccttatagacaatgaaatttgaatttcgtataattttcacatcatgaaatgtaggcccaagcgagaaaggatatcctgaaggtcccagagctgggagaagccgggctggggccaagacctggcggcactggccggaccctgtgtggatgaagtgaaggagatgggcccaactcacccataggacacaacagtccatatctcctcactctctggttctacctcccagaactcttctctgcctcttgcgtccttccccatggagagatggtttcccactctggcattcactgctgtggctaaataataattattttctttccttgtggcctctcctaggtggacttaggggatgacaaataatgacagggtgagggtctagagaatgtggcagtaaaacatttgtgggctctgacaaacaatggtcttcctctccccagagtattctcccagcaacagactgcgaaaccatgatacataacacatgtccccagctcacagaggatgtgccttctgaccaactaagcccctgctgtcacaccctgctcttgatttacaggggagaaagggaaggatggggttagagcttgtttttgagacagtagagtgattgctgtgaacagcacctctgcatttctgaattgcttctcagagttattttmtttttctcctttgcttttcgtaattgggtaggamatagataaagacctgatgggtttatttcatcttagttgtttctactctttcctactcttatagttttgggggtgtcttgcaattaaagatgtagttcagaaaattatttagaagggttcaagtaacacagaccatgtaatgaagagggtatgagtgttgaaagaaggaaaagaagaacaggggttgcacagaakataccaaatgttcttatcaccctctggggaacaaaagaaagaaatctgagggtatgcagcttatccttccagttgtttctctgaaggtaatttttacagtgagtttaaagtttggtattcaggcaaatagttttcttcacatctgacctgaaataggactcaggctagagaatccagccctggggaatgagtgattggcatgtcccttagataaactcctccgtgatccattgcctcaggaagtgcacagcattcaatccagggttgagagagttgggtctgaaagattgatagtgtgtgccattgattagaaggagatccttctgtgctagcaaagcccactttttccttgagaattgtctgactacttatttattggtataatggttgttattgtggttgtcctgcaggaaggtcactaaccagcttggcagtgataatgaccagaaggtgaaaatactgtggaaggaggccaggaatacggagaaaatgtttctatatttccttattccagtaatattgttcctgaaggagaacataagactttccatatgaacagatttttctatgcttttaaaaatcggttattcaacaagctacataattgtttaaaggctccactgccattgtacacaggagaaaggcagaaatactagycttgggcctgctttttacatttcatcatagtttttaaacagacacattaatttctcgacaataagaggcttttttggcatcaaaatttaaagcatttccccacctgaaaaacaatggccaaaaataatgcagatattacacatgaacatttgcagagaatccagtataaagacatttgtkaaaaataaagatggtaatacaagctcwcctgtcctcctggctctgatgagtgaaatagtgcaaatcagcatccttttcttcattgcttaccccattcatgcttgaaatgggatttcccagacatgccaggatgtttctttttaattctgtgcactcatgtttcactkcaaattagttatttcagctatggtcagatattccttccttttctatgtcttcaggttgtttggtgaatattgttcttttttgaatcaggagttggcaacccactcatctgctctrtcagttkttatctatttattctttgaagtggaaccaactattgcagaaaaccaaagacacagttttctagggaagagctagctggagctagatcttcatacatcctgtcatgtgtgaagacctggtaagatttctggctttttgttggctctgcccttctgacctcaacttcagagttgcagattccctggattctctctctagtgcccaggccaccaagcagcatgtcattccttcctctctcctacttatcctttttaaacatttagttttaaattgacaaaacttatatattttatattttactcatctttttaaaaataacacctttattgagatatgattacataccttaaagttcacccatttaaagcatacaattcaattattttaatatgtttacacaattgtgaacctgtcatcatcatctagttgtagaatatttttaaatttttttcattttaatttttgtgagtacatggtaggtgtatatatttataggatacatgagatgttttgatacaggcatgcagtgcataataatcatgtaaaatgggggtatccatcccctcaagaaatcccttgtgtttcagacaatccaattatactcttttagttactttaaaatgtactattaaattattattgactatagtcaccctattgtgctatcaattgctaggtcttattctttcaatttttttaatccattaaccatccccaccaccccccgccacagccatccccccattatccttcccagcctctggttagcatccctctactctctgtctgcatgagttcaattgttttggttttgagttcaattgttttggttcaattttgtttgattttcacaaataagaacatgtgatgtttgtctttctatatctggcttatttctttccttttttttcttttttttttttgttttgttttgttttttgaggcagtgtctcactgtcactcaggctgctggagtgcagtggtgcagtctcagctcattgcagcctcaacctcctgggctcaagcaatcctcccacctcagcctcctgagtagctgggactagagttacacaccaccacgcctasctaattttttttgtggagagggggtcgggttttagatacggggtttcaccacgttgcccagctggtctcaaacatgcctgcctcccaaggcttattttacttagcataatgacctccagttccgtccttgytgttgcaaaattttggaacatttcaatcacccccaaaagaaatttcggccttttggccagaaccaccatcttccagtaattcgccaaaatgtcgaacacaaagggaaagaggaaaggcacctgatatatgttctctaggctttttagaaaacatggagttgtttttttggccacgtgtatgcaaatctataagaaaggtgacattatagacatcaagggaatgggtactgttcaaaaaggaaggccccgcaagtattaccatggctaaactgaaagagtctacggtgttacccagcatgctgttggcattgttataaacacacaagttaagggcaagattcttgccaagaaaattaatgtacgtattgagcacattaagcactctaagagccaagatagcttcctgaaacacgtgaaggaaaatgatcagaaaaagaaggaagctggcggcacagtagctcacgcctgtaatcctaacactttgggaggccgaggcaggcggatcacctgaggtcaggagtttgagaccaacctggccaacatggtgaaatcccgtctctactaaaatacaaaaattagccggggatggtggcagccayctgtaatcccagctactcaggaggctgaggcagggagaattgttcgaatccaggaggtggaagttgcagtgagccgaggttggcccactgcactccagcctgggcgacagagcaagactctgtcttaaaaaaaaaaaaaaaaaaaagaaggaagccaaacagaaagatacctgggtccaactgaagcaccagcctgcaccacccagagaagcacactttgtgagaaccaatgggaaggagcctgagctgctggaacctgttccctatgaattcatggcataataggtgtctaaaaaatgaaagacctctggactgtttaaaaaaaaaaaraaaaaagaaaaatccttaacccattgacatagcttcttgtattaatttcttattgctgctgtaacaaattactacaacatttgtggcttaaaacaacacaaatttgttatcttacagttctgaagaacagaagtccaaaatgggccycgctgggctaaaaccaaagtatcagggcctgtgttcttgccagaggcaccaggggaaaatccacttcttgcctttgccagcctctaagggctgcctgcattctttggctcatggcccccttccatcttcaaagccagcaatggctggtcaagtcttaggatgttctctttctgatctgacttctgcctcttccctatataaggactcttgtgagtacaatgtgctcacctggataattcaagataccctctttattttgaggtcgcttgattagcaaccttaattccccctggccacataacattcacaggttccacagatgaggacatggacatctttggggggcctgtcatgctgcctgtcctactccctattcttcctgctccccagccctaggsaaccgctaatctactttctgtctctagagatctactcactttttttattcctctgcatattctgtttcttcctcgagtttcatgttcagctttttcctctccctccttgctcttactggtctctgygacctccatctttttcctcatttctcaggaaatgrttgacttctgaagacagaaaatggagaaatgctagggaaaacaagagaggcaaagttttatagaaccaaatgctgagacagaagaggggtacagttgtgcaagtgatgagctgcagattgcctggaaaccaaatcagctggctcatgtagtaaaaacagccctttctgtatattcgatcgcttggttttgggatgacccacttggtccttgagggcctcagttacctcaaactggcaaaggaaagaggttggaccagatctgtgggtctcaagtggtggttcctggaccagcagcagcagcatctcctgggaccatgttataaatatgaatctgccagccccaccctagacctactgagtcagaaactcggcatgacccccactccatacccccccaccaaaatgtgttttaacaagcccctcagatggttctgatgttttgctgaaatttgagaaccactggactagattatgatgtctgagttctcaccaagtgtaatagtctatgagtaaattcctatrcatgtaaaaagaaaagttttagcaggaagaagacaaaatgctgaaagagaatatggtartttcaaagtttgagatttttagatgcatgttagaagtgtttctattttgttgaaatttcccgtcattcagtagttcactttacttcaagttgtgaccttccagatccgaaccttagagtttctgtatgtgatttcaaagaatcttagaatatatattgcatgacaggaaatggaggtctgctattttccactgagacttgctgtgtgtgttccacacccacaggtctacaacactggcccaagcacccttccagggtcatctgtcagcatctctttccctaatcgactctcatctggtggtgcagagatgtttcatgtccaggaaatggtggtgagttctccatttgttttcactattgctttcagctttgagccagcccattcaaattttgtattccaccctaccctgacatccaccttgagggtttggaaaattcaactcattctaccctttggagacatatctggagaggccaggggacctgtgatacctgaatttctacattgagaccatttggttaatgctgtaagaagacctctttggagatggggaagagttaattacgaaccagctcctgggatggacttcgctggctctgggaacccccagcagcatctgcagttgcatgcgtctgaatgcattttgctgagtgcattttgcacagggaaagtgcctgcagtccatgttgagaggattgtgaaagcattgctctctataggggcacgtgaaggacattcagccaaagggacagtttttccatagatagcttgaaaatcagggcagcaaggccmhtatggagcaggtgaatatctgagccgagagttgaagaggacacagcccacagggtggaggttcagaaaacattgtgtgatggtgacagtaatttctggcattgctgccctctgggtcatgtggactgaaaaccagacgcatgtgaatgttgaatgtagaacaggtcactcctcccgagatgccagctcagatgttaacatccctcatgatgttccattccagttccatggcatccccttgtctttgggctctgctgacccagcagaagaaagccgccagtgttccgcacctatgatgtactatggttggaacttagcatgaggtgaacaaaccacacaggcttctggctaccctcttaaatattattaaccatgctgaccatgccacatttccccagcatctaggagtgttctcttcctagagcatgctttctgagttgttcacrtgaacatctacartgttgcaggagcctttttttttcctatgggcaaaatcatctattgaccaaaacaagacatttaagtcactcagattctgaaggtaccccaaaaccagggataccccttttcctctttactgatcatcgagccaaggaaaagccactggaagggacttgggctcacacttacaaatagctggcttgcatggaaggcattagaagtggtttcctgaagacctggacaactgcctggctatcgttctggctgagtggaccctcagatacccaagtggtgtgagctggctgcactctgttctttgggctctgagaaacaaatcctttggattttcaaaactatatttagaattttcataaagtctgtaacagacttggccctaggatggccaagtctccatctggatagcccagcctgtgatcaaaggctgtgggcatcttcatcgtatggaaaagtaaattcactggcacatctcactaagcaagtaggaaagctctctgtgttcttataaacgatcaccactgagcccagaatgacaacaagagtagaagcataaaagcgagtgcatgaggtgctgtagtgaagaggcgagagtccccagatacttgtttcagaggcccacagctggcacaccctctgccttaaagccctcggcaagggcctcctgtggctccgcccctcccttgctcagyagggcctgagaatgctcactgggtcaggtgtgattcagagctcatgacggtttccactttggccttatgggactttgaatggagcagggctttcattctggggatttgggtggcttggtgcaagtgaaattcagtcctattaggagaaaccagcactcattctctgtactgcactaggaggtgaccctttggcctggtggcattccctccccacccccactctcagccaccaccattccccaacctccaaaggctactgaacagctgggcaccagctggacatgttaagccaactgaagcagaaacagattataggcatggagggaaggctcatctgtcattcctctccacacccttgggaccctcaaattgtttctccctctctaacagtgcccttggtgtctgtattgcctgtgatcatcatccatagagcataatgaggawkggcttactcgccctatgggccctgggctgtcaccctacctacggacccacgtgtggcacagttttctgacttggttcagaattcatttagaagtctctggggctgcttctggggtccctgggcaggaccaacctgcctctagctttcaccaaagagtcttttgtgtttgcccaaagcatttcttgaggtccagctgtctgtaagtggagagtgtctggcttatatatgggaggtttttacggggagcctaatgaagtgtaaccactccaaactcccagccttggctcgtgatcttctttccttgtagctaatgtctctgagcccctctgctgtgcttgtatttaccttaaaaacagagccacggtggtsgcytgaggaaagactatcaattttcactgcttcccacccacgggggttgtgtggaccctactctgacttcccacagcacagaaaaaaaaggaaacaggtcactgtggacctagtgtctgtccatcaggaagccaggttgtaatgatcatgaaaataatagaggggaagaatgacagacctttctagtctatctgaaatagcaaaattacyagtaacaaatcattcttgatttgttcacaaacactggctcagcaagtacctattacgtgccaggctccaaggagaggaataagtcccacatctgccccagaactcactgtcttgcaggaaacagatacataaaatgccattgtaataccgtataacaaatgcaataatggaggcatgcccagaccccaggatgctacaaaggttcagtgcttcacaaaggaacctcttcaagtcagggcttagaggatgtctagttcaccaagagaacaggtgaagaagagaacattccagatagaggaacagtcaccacttgtgagtgtatgatgagtatctgctgtgctgggagctacacccggttctccattctgttwgcctagctcttatacaaataggcaagagtaagtgttccgtatgccttctgcagatgtacagcagatagatattttggcagaatgacagagagtactgaaccacagtcatttcctctgtcagtttgtaaattaatcactcttcttgggtacatcgtgtgtgtgctgtagacctgaaccttcctacctgctgacttaggcatggagaaggccaagctccctgtttgatactagagtctaactacatgtcatggacattgtcagcaaaccacccttggcctgctgcaatgagcagtagctactgacctccctagcttacttttttccttctattggacagtcattctaaaaaactcacctgatttccaggaataaaatgagtgagccagacagcttatgggaggcaggctgtgtccacttgctccttagagatttctttttgaagtgaagatagatcatcttctcaatttttcagaacagacctgaaaaattgaaccacttcactttattgccattcttctgcagaggcgagccgtgtagcatagcccctgagcacaggtctaagattgcaccaagataacacatctgtcacaagcttcatggcttatgaagggragagggtagtggtctttccaaagttaagttttactcacaatttctgaaggttcaatggaagagatgggagctttatctcagactgcaagcttcacttgatggagttaaaaacctgtatctgtgagcagctttctcacactggaggagaaggctttgggatttggctcttgttaatatgcaagaaggggaaaagtcagaaatgatagctaacagggagtgaagggctagaacttttattccaggtgaaagtactggatttttgaaagaactctagtgttagtccagaagagatataaaataaatatcrtaccattcattcctcctcctgcaaaaccaattgaaaatattggcctctctggcttgttgttttcttgctatggggcagtgattctaaagaactgacctgatttccaggaggtaaaattgtagggatgaatgataattttctaaggagatayatcaatgtctttgccatagggtaccattaggacattgacttcaatatggcatgaataccaacatctgttagaatattccaagttggtgccaggactcatattttagtaaactrtaaaatcttccctccccatgcttgtacagtagacargsctacccatgatgtacgatgggtatcccacaatgagtcagttgatgtgggaacttcaattaatttatagtgggactgctcacatccctatgaagaaaatatgcacctgatacatcactgaccataacagg

SEQ ID NO: 10054 - DNA, 16823 bp, Homo sapiens
tgctcaaaacaaaatactaactaactaaacaaaacaaacctctaaattcagaaaacagtatatgttattgtctctatagcttttgtagtctcctcctgagtggcagtgaartggcactgaatctgattctgtgtggcaaatggaaatcatttttagttgattaatactaaaataagtgtttataaagatatgtgattaatactcatttgcaacctgtaaataacctttcaacatgaaccaatttatatgccaagtactttttttggtatgtaaaagtaaagccaatttccatgatggcatgaatagaagtattctaatatggtctcatatgtccttagaaactagagtaaattctctggaaactgaacagaattgagaaggctagttaaagtatctataatggacacagctaaacagacttatgttggatcaaacccttttagaaattcatgtaatttgggtttccccttttgtatatactagaagattaaaatcctaaaataaaggcaatgtgctatgtattacgcaagtatgcctatcattacttaaagacttagagcttctaaaatgacctactgcataattgcaggtattctgggtaaagcagaaagcttcccttcacacacatgcttccttgtagccattatgcttaacatgtatccccatccacagaaagggtactttctccacccctgcaaaaaaaaaagtagtttctgtgtccttatattatgcacatacaggtattttttccttaggatatcatgcatattcatttttgagtcacactaaggaaataaaatactggtgatgccaaaagacatcaggagtcaatattctaaaattgtcagtgacctgaggacaccatgattctcttgtccaagggaaccagycctcattttaaagtctgattgtaacatggaattcaacgggagctcatagcacatagcattcagatgatgcttgtcagcttttgagggtgtaagcaggcagcagactacactgctagtatgctctcacttaaaatctgcctgaaaaggccagcaacaattttctaatccctttaacttgccttcccctaaagatttcaagacagtgcttccaattttattggagtcataaatcatatatttactttcttgcgactggtatccaatagagctagagtttttaaggtttgtctgctggatgtattatgctactgaaatataaaaatggctgctgtgcacgccagtggttagtaaaattcaaagacgtaacattatctttctcaattgatttgaggaaagaatgttcataaaatatatactgcttttggttaggagcttatttctaaataaacagactcagcaatggaaattttagagacgggcaaaaacaaaacatgcgtccgtaaatgtacgttttaaaatcaattctctcacaatctttgtcttttgcaaactttctgaagactgtaaaatcagttgcattaagtttatgatttatagctttctgatttaacttctttttcagttgttgaaggaaaatctcttactcctctgaaatatttctcctttattttacaggctgatgttgcatctctgcctaagaaggcacttcactgcagtgatttgagggaagccatttgtttgtgattcaggaaagggaagaaaagtggaatgctctgctacaacatatctattcctttgagccctaacaaaataggaaatgcaggagattaggggactgcattgcctccaattaaaaaaaaaagtgctaatctacacaacataaagccaaactaagtggggctatcttctctaatttgcaatgaactaaggtcagctagatttttatcttagatacaaactgggaaggagaaaacaacaagaaaggaaacactacaacttggttagatcctgcttttcacacaagattatatcactggtagctgcacaggatgcttccagaacattagaaggccaaaaataagcaaggaaatatggttggytcaatgtttacatttatttcaaaaagaatagttcaatctggtgcgtagctgcagacacatatataaatattaaaagcacactatgttttttatttatgatttttttaagagagctgtaattcttaagttattatcatgacgaatatttgaccagaaaccacatgcataccatatagctctttactcattcttttaacagtttactaaatggactaccatcagccagtcaaaaaaaaaaaaaatacaaatatattgttcctgccttcaattagcttatattttatctaggaaaaaaaagtttaaatacataaaataacagtacaggtaacrtcttagtacaaaactgtgaaagcgcagcagataattaattggcattttaacaacaggaaatataagcactataagaattcggtaggggaacaagttgtttctgtaggttgacaatatycttctgagcacagaaaaaaactgagtttttccatttgtggactctgatgaaataatgtttaagctctctgagctttaattttatcatcaataaaatggggatgataataatagctacactataggattattataagaaacaaatacgttgtacatgaatggattttgtaatctgtaaagaagctgtaaaatgaccattgagaaagtagtcaaaggaatcatgccaaacagttaccattagtttgggaagacagaaagggttaagaagttggaagggataatgatgattaagaagttggaatggataatgatgattaatttttttcttgacatacctctctattgtttgaacttgtgcactaatcttgtaacaaaaaaaacttaaggctataaaatattagctgaagtacgcatatctggatatcacaaaataaytgtaaacactagtaaccctgcccctttagaggtacacagaaagaagcctcagtcctggtttcaatttgagaatttccaaagtcataaaaatgtgccaagattgggaacaataactaactgaaacagcgtttccttttaataaccctttataatagagcaaattttgtagtcacccaaaaccatctattgattcaataatcactttggtcaacaacttttgaaataagcaaattaaataactttagttcctcaaagtcaaggatttgtcatgtccaaccttgctttctagggcccaatacattttgggtattcaagtgataactttacagacgtaagaaaagttattaaggcatttccaaatcaatgccaaggacttttcagagcagaatgaccaactttttaaactgcacttggtaacagatgtgtattcctaactttttatgtaagtgtgagctttttgagggcaggagtcaggtcttaatctttgtatgcccagttgctggtattgtgactagcaggtgagtaggcaagaataaatattcgttgaactatttggaggcaagagcacccacaaacacttcagttaactggaaactcaaggagatggacatatattctaaggggaactcaatttctatagctgtctctggagaaaattccttaaaatgtttcacgagtcataatgattagtataaagttaagtcacttgatggaaatattgtaagattctatttggtgtaggtagtagaaccatttgagggcatatagatgtacagactaaggtgaaatcatggtgcagtctgatcaaaaccaccttttgtttgccttgacaaaaatttccaaggcatgtcttatggacataaatgaaagtgggcagaaaaaaaggctttcactttctgtggcagaagcaggtctacacctggaatactggctgactactggttcagtggtttatggctcctctatgaggacttcatgtgagtaaacacacagatactttgaaaagaatggagttggtatccacatataatacaagtattagattgtatttagtcacacttagatcatttccagtaatatgcaagcagtgacagggaaaaaagggaggtgagtcttatgggcttgtgcaagcactattgaataggtcctaaagacacaaatatggaagcaaaagtacagagatataaagtcattcctctgactcctattgatgatataaatatttctatgaatggtgtacccagtgctaacctctgttccatcctaagatgccagataattcatgtttatcttatttaatcttcctcacaagataacaagggcttgtcataacttttgaactcttcagtagtgtgctatttaatgattcaaaagaggccattttatgaaaagcaaatgctttaggacagtactcacttgaagctttttgaaatatacaatgcagcgtataaaaaagagatatatttttctacttctaaaaagtatttcagaaggccagtggaaatgaattgctttggctgtactttctttaaagaaggctaagtttcttagtctggttggtcaaattaaatttggaagctacctagaaattttctcacattttgatcttcagaagggcaattaatcaagctcttgtttgaggcractctagctttgatcagaatcctatggagggaaagtgagagaactacatattcagaatattcaagagtatatawaattgaaaacagccacaacagggaaagaaaagtagatgccagtgggctgatatcttataacctttggtcaagcggtacttggcaaatttcaacagatttagttaaccagagataaaactaagccacagaataccatgaaaacaaaacaaaagtatcaaaacagaatcaggaattacaagtgaaaaacaatgctatacctaacagcatggatctaccagaggcgatttgttagaagacctgagtcgttgtttcgtagtggatgcttcaaacaaaaactgtaacgtttctttaggtcaaactatagcacagcattcagagacccagccaaaatagctgagggaaactaggaaggccacatgtggaactaattactcatgtagaggccatgacaaagaacatttctccagacttttcatgggggcttcactttcaggaagttgctataattactgtycaagtctagagcagcctgcaagctgctgacagattcaacagacaggagaaggagggagagagagaaggagagaaagagagagagagcgggagggaaggagggagggagggagagagagggagggagaggggaagagggggagagagagagagagagagagacagacagacagacagacagacagaaacttatctgccctttttgacgagtgaaataccagaaaataaagtgccacaggaaagctcaaaaaggtttccaaatgagctctgccttccagtgttcaactttctgtttactatttcatctaccctctatcttcaaattacttctctagcctgggtcagacagtaaatttgtacttctacactaactcactttcagttggccacagccgaactgtacatcttgactcttttttttttacagcttttccatactggggcccacttcctgcccagttgaggaaaaaaatctggcctgaagatgaaatgactgcttaacgttacactaaaacatctggtaccattttatgcacagacccatgtctgagagcaggcgattctagcggtctctccagcggcacagcgcatacccaaacctccccagggtgacatcatcccatatatggactctccagcccagccctcccccttttcctggtcctaaattcattgccagttccccagtctgcagcaaatgtgccacgtcaagactggaaatcacagcccttgagtgtgtctcagtcagcgcagcagaattcaggggggaaagctgaatgcaacccctggtgcaggaagggaggcttttcctgaggaccgggagaggattttaagtacatagaaggaagcttctggagatcctgctccgtcgccccagtgttcagactacctgttcaggacaatgccgttgtacagtagtctgcacattggttagactgggcaagggagagcaacgccatggaccgctggggacaaaatgggctgtttccaaggagaagacatttgtttgctccttttttgaatctcatatccagtgtttttcttcacaggttttgcacactagggaccaagaagccctcggggacactgctgagaaaagactgccgaagggaagaccagcgggtaaggccttcttgactgctcacctggtctgtgaccaagggaacctaggtggggagcccatgatttgtgttaacatgcaagggaaacagaggtacatgtgtgatgggtagagatgtatttaattttaaaagagcaaaagtgtgtggtatatagcgatttactgttttttttttttttatttctgaagattgataattcaagtgttttcttaaaggttttcccacttcaaaatgaaatatgaaaaaactcattccagacacttaagaatagtttaatgaggctacttttgaattgtttaataataattcaaagatttaaaaacttatatggatgaaggctgtatgtataacttttaacatcccaggactgaagtcatttttccccaaagtaaagaatacttgctggtttttaaatgctatatggatagtgcttttctgaagatttccttctgtaatataaacaacaggaataatagtacstaacaataaaagaagaacctgccaagtcttgcctaccagacaatgcagatgggatttgcccagagaagagcrccgacccacaacttattgagtcagcaactgagtaaatcagggaataaaaacctctatctttagatacccctgtaaatatctgttttacattttttttaaatcaaagagtggttaataattgctgctcagctgagccctcttgcctatagcttacaatgcttccacttctctgagcatttaaaataaggcactttgtctagaaacccactgataaaaaaggaatttgtaaacgaaggcagaagttttctttggtcagtttccagctgtcctggaggtgaaagagggtgggagagggggaggaaggtgggagggaagaaaaccctcaagctgaatgaaatcctaatagagaaaataatagagcaagtctggattgcaatgtgatctgtgctgaactttagaggtcggccccttaaagaaagttctggaaaaatgttattgcctcatccctaattttcttaacccccattaatttctattccgaaacaattctatataatgaaaacatctcttctacagggtttgtgaaaaataaacataatctcttttgtcctcctttaaagttacagtggttcctgaacaaattcttttctaagttatacattttgcaacaattcaaaaattgactcaagttctctttagcaaaatattttattataaaagattccctaagttttcttttgtcaaaacaacttactttaaaaattacccttctgatcaccccaaaatgtgtataaagaaaacattaagtattctcatatattcatgattattagttaaaatataaacagcaaggagaaatttagctactttcacttagatgatatagtaaagttawcctttcattttctattgtgacttggagagttccatattaattatttttagtagaacaaatgagatgttaaaaatctatatagtttcttttacataagaaaactaaaaaaagtaacttagaggagctcattttttcaagaaatatattttttctaattgatacaattactgaagaggaaaaatagctaacaaggtaytttggtaatgtttttctcaaattttctgggttttttttttttttttactctagaaatgattacatttcaaaatttgctttcatttaatgtatatttaatttcaatttctttcttcatgttaaacggtctttttgtttcaaagaaatgaatccctatgggtccctcacctattttctccctcaggatgacttttagtctggagatagaagggacataagggtgcctctggcataagtacaggagtagaaatataagaattactttgtaaaaggataaccaaggagttcctgcacatgcttgatgtggctctagcgacttattttcgaggcaaagttttaacaaatgaaaacgaatagtacttatttttcaattatatgggctaaattaaagatcaaaggtaaaagctcattttataaagctctgctgaatgaaggcaggattgtagtttatgcgctggtacacacgcccacatttatatacattatagccatatctatatccaggtaaattrgaaaaatgtttaattttattttcatattactttataaggagatatacaaatattttagggatcatggaatctattccagaggaaactaaccaacagtgagcatcttcaactaaaactacccctggatgtaataagtgtaagtattaaaattaaacattatatgtggtcatgaagagaaaattrtttcagggtctgtccaaactacacttcatagaaatttcataattatttttcattttagcatgtgaatgattgataaattggactaggtactgggttaaaaggacttttccaccatctaagagaaaggaagttcagagccttagcttcaacaccacaatttcttaactggaaaaggatcaatctaaaacggtggacttaaattttcaaactcatttttcttttaggccacagatctcaaaatcaaagaaagactgtttactataggacaaagtttcacactgatcactttcctgtagttagtcaataggcttaatatccttcctgcttggcattcgggctttcggcccagataatatgtttatgtttgtaaaagaccaaaatatactatctacccccacctctcgcctacagaccacccatgtatttcactctgtgggaaacagtttaggcataaaaatcctaaygaaagaattctccccacttttttggttgaagtcttaagctgttataagatataaaaagtacaacttggtaatgtgaaaaaattcactcatccacaagcatccatgctcggtaaagagacgccaaagctttcacttactctgtaagggatctgctctttataaacaatgcactttactctgctctaaggagaatagcccacccatcacaataacgtcaaaataataactaagagaccatcactcagaaatcctggcttaaaataactagaaggtcaggctttaacctgagacaggaaattcctgagttaagatagaaactttcttacttcaaatcccttcttactttcatgttctgtaaattaagtagaaataaatatttactcattttcaaaggtctcttacaaataatttttatcagttttaatagttagagataacgaagtaaattaggaaaaataattaaatcttcattttgaattttttgacttagcgtgacagccagtttcctggagttgctttggtttaatttcactacagaagacttagaagacaattcttttcttacatttttttccttaagaaataaaagacaaaaagaaaacaaggtgtaataaccacactaaaaattacatggtatgataataatacaaatagctcttttatgttttagctagtattttaagtaataataaactaatattcaacctataatttgggagattaaaaaaaggtcaatatggttttcagtctttcatctttttaacaagtttaggggcaggttcaacataacaatgaagtgtgcatatgtcacatagttactgtaagtgtgttttaaaaatctatcagaaacataaattgtccaaaarccttatgaatagaacaattgttttcagcaagattttttttttcccctgaaaaactgttgtggtttttctggctcaaaaaatttttatatcttgccttaataaaactgttttatattaaagcataacatacaaactcacaaatatttctttttattttttcaggttgcatgcatcattcctttaattgagcagagttaactggatcaaattatttatgggagagagaggaaaagttataaagaattatagtaatttttaatttccaccaatatactctttgtaagtgaatcactctataattactttctgttgcactgaatgcagcaacaataacacaatagtattttaaggcactggtttttggcatactctaaccttgtaattatttaaataacagccaagtttactcatgtttttgattctgtcaagaaaaaaaaaaagttcctttactcgaaagtgatggccgaaacagaatcggaaatttgttttcttgaaattacataaatacacagaaaatggcacttattagcttttgttaaaacattaccttacctaatcactgcataaaagtccagatttgtagaaaattgtaattttctcagtatctaaaactattttgctttccattaagtttctatttgctattttctcagaattttacaattaaagataaatcacaaactgtttgtttttcttaaagttctttgagaaaatgtctaattatacaatccttggacaatactgtgtttttttggtgctgtgttttttaagaagtcctacttactggaattttgactatttggatatttttgtttttaaaaggggaggggaatttgcttaatacttctaaagatgtgaattgataattgatattaaaatagaattactctcaactcaccagaattaaattttatatctgcatatttaacactattagctcatataaattataagaaaaattttcaaaggatctggttttaattttttggatatgaaatgaatttgccttttctgccttttcttaagtactattttgtaactatattgcactaactatatccaaaacacattctgagcatcactgtgagtaacagccttccagtttgtacccttttgattcacagcatggccctatagttaattaagaggtggataacttaagctcacaactgcctttaatttgatttcacatccacagttataaactttgcatttaaaaggaaaatgagacatttaaataggttcctgttgtttcacatataattggtaaaaacatattcccttgtaggatcctattatcagagcatcaaataccaaagtcagcaacttgggttgccaaataaattaggctcattaattattttgaaaagggctgctgtttccatgtaaatgataattttctttttcatggacaaggttatggtacttatctactaaaagaaacatgcataaacatagtttttatctttaacttcagtattaaaatatgcagttttttgcaaagaggaaaaacatctggttcaattacgctgaactctgactacatgtgggccagtaataatatgaattggacttaagaataaaccttgwgtttaatctctttttttccttaaaattttaatgtgagttttctgttacgcaaattatccatgttagcacatttggaacaaatgtataaatgtactttctgaataaagtcaaaagtctaacttgtttttagttccataatgttttaatgtttaattatattgtgtatttttctccctttccccttactctccaaaatcaccaaatctggaaaacaggctgattgtatctgtctatgagcaaaggaaacctgaaggaaccaagggcctggctggacagagttgtcatgtgtctgcctgtctacacttgctgtgcagaacatccgctcacctgtacagcaggcacagacaggcagtcacatgacaacccagcctgaatgacaaccagccattgaaagaaagcagccctcacaccatagcatctacaccaagagctacaaccaaaatgaggggctcgggggcctggggttttaatctgttggtttaatacttaactcatgtattattttattttgattcaagtattaaaacccaccaaaagtaaagtgagtggtgcctatgaaatataataaaacccatttctgaaaatgttcctgtgcattctatagttctcttttcctaattgttgtcagcaaatcactacccttgacctttattgtacacagctttgcagcaccctatattgatataaaaactcaatataacaaaacaatataacttcagtctgatgcttaacaaagaataaattattctaagaattcttgtccataaactaagtatggttttctatgtcatgattttttttttttttttttttttttggaaggggatagggtggaaagacagagaaaagaaaagggagaaaaagagtattccaaaggatcaagtgctttgagttaactctgccagtctgggttaactctgccagtctgggtctgggcaaaacacagtgaaaagactactatttccaactagtgttcaactatattaaaataatagtttctcctcttttgacatatggaaagttgaaatttttgatacttccacgcgtcatggtatacataaatttatgactgcgtcattctttaattaagaaggtgcttatgctacagttctaggagtagaatttacaaggccaacacattcacttgcaacctatgcttccatcactataaactttcaagatcttgagatgttcaggcaattcatttatcttcagaagcataaggaaagtggttaatgcacttgaaatgtatattttgacacatcttttgagaaaatatccaaacttcagtttatgcactgttaactggagtgaaatgataagggatggcttttgtctatgaatactttaaatacttaagggtaaaaggtgggaagatggataaaattagaaatgtgtcaacttttatttagttcattaacatgttttagcttcagtatttgaaattaattttcatctttcttagattctggtcaagcttaaaaaatgtaacacaaggctackcaaaacttttttcacatttaacaattaaacactttatgtatgtattcttaactaaagcaaactatttttcattcagctattttatttttaaaatgaaagtctcagtcttaaagctaagatcccagtgagtttcaaattttctgacaatgatattttaaccaaacctgacattatagtttctttaattaaaaaactgaatgatggggcaaaactacaaagcacaaatatgattaaagttaaatttctctcatttaaacaatcttgtcttatggcaatatgtcatctgctaaaattcatctctgcttctgcaagatacattgcacgatgcagatttttgccttaaataaaagtcccattactagcaaataaagtcctaaacaatacttacaaaatgtagaatataaacaggaagacaatataaaaattactcacagaatatcgacatcgttctacccaatcttaaatgccttgtaccacctgttgcaaatgctgcctatgagagttcacgtatggaattattctactggaccctgcaaggctcaggagagtgcttgacagctcccagaatgagacaatgacctagccagaacattaaggagactacacccrtccttcagactccaaagggaaagctaggacggcagcagagtcatcctaaggtgaggcactccaggataacattttcaatatttttccttaaaacataaagttaacaccttttttgttaaacattttttactcaattttcaaaaaaaatgcttgaaagaatgttttgtatgtattttaaagtcattaaatgaggcacatttaaaaatttttctcttctgggaaagggtaatataaaggataatattgctcttccaggataaacttttgagtgggacaaataatgcatataggggagtgggtttgaatctaaactcatttttaataaatttggaataggattggccattatggtttattgaataatactctttttttcaaaattataaatctttagataataccagaacatggaaatatttgtatgaataatcctatattaaaaaagaataacatcagatagtttatgtatgtaaaaaaatatacaactgtgatcatgcagaattttaagtaatataagtggattagagttcaatatttactgggacttttgtgaaaatatctaagttttggctaactaaataacttaacgaaggagtgtgaacagtgttcacagggtcgacgctgaccttttccaccacagggagtgtgcagatctggtaggaaatatgcacaatcttaaaagtataagtgaaactagaaagagagctgaatatttctataacttcttgatctcacaactttgatcatccagggatataactgtcattttgtttcctatttctgaagttacatttgtcatttgttattgttacaaaatgaaaacaatgctaagtaaatatccctataagggaattatataatctccttatcaagttatccaaacacttcaacccacaaaaatgaggcctgtaatttcttaagagtccaaagaatgtccttatttcaatgcagatgttgggttttcctcaatagtataaggttagcagatttccactggaaacgcctatgttgcattattctgcttgcctaggagtagctcattatgatttaaatctttacacactgggctatagaaatagaataaatattgactaagtgcttttattatacataaattaacagtcctctttcttcagagatttgaattatctcttaaaatttacatatttatgtatttttaaaacaaatttctcattggttttaagaaaaataaggctcttttctccttgaatcagggtctcccattctcctaaaattcacattttagacataagttaaagaaaagccatcatttttttcaagtctgattttaaagtattaatgtaaaattatctagatcaaaaatccatttcaaaaaacttttgaaatgacagtttctgttttattctcacatcttgctttttactaaatccctttccaaaaatgtacaacatatatgggcaatgtatgaaaacaacattgggaaattaattttctgtttaaatgattttcaatccaggaagtcacatatatatagtcagaggataaaaaacaaacaaacaaacaaaaaacaaaaacaaaaacaaaaaaacactaaccttcaatgatgaaaattaacaaaatttaagacaatttaagacaatctacctttagtggtaattttattctgtaattcaataatttaattttgacacttgatatgccaggacgtgattaattattatgctgcatttattcattcatttgctcaatgacaccttcattcaatcaatatttagttagtgtctcctatcagtgctatgtcccctggtggtaggacagggaacaaacaatgtctcctggtctcaagaggcttacagtttgctgcaactcttagcatgtgtgatgagttgttcatgtcaattttcaccttccaaaaacatctcttaaatccgttcatttttatcaaattccaacaactcatcccagcccaagctaccattatctatgcagaccacaatagatgtagaaagcaatagctttctagtaactccccagtccagtttcgccctcttccaatccattctccacaaggcaaccaaaggaatcagtaaagaattcaaatcttatcatgtgactctccagcttaaaaaacttctcatcattcttaatatcaaaatcctcatctttagagtgcctttctctttttgctccagtcacactggacttaattaccctccttaaattcatcaggctcaatcctgcctcagaacattaacacaaaccttctctgaccatccaatgtaaagtaccccctacctgtgtcctctatcccagacactctatgtcaactcatcactggctttattttcttcctagcctgtaatcagcatctgctaggttttcctatttatttgtatgtttgctttattgggaaagagccttcataagaataggtaccatgaattccttgctaatcattttatccttagtgattaggacagtgcctggtacataacaagtgttcagaaagtaattgttgggaaatgttcagatgattaagagcacagcactgacacttagcacctggctaagttactcactctcttttgagcctcaattctttatctctaaaatggagaatgtaaataatgtgctcagtgaactataaatactcaataactattagccattatggtgatgatcctcctcattaagatcatcattgagtttgagttgtggttgcaagtagcattccccctagtcattatacctgcttaaattcacgaaggccagctttcagtctcaatgatgatcttaatgatgagaacttcctgtcttgtttcttgagagttctgaatgagtaacagaagctagtgactcaatcatagctgtgtgtagcccataattttgctaccttgaacttaagtgctccgcaccctcaccaccagctactacccagccaccatcctctcttgcctggaccatggtcagagtttccaatctggtctcccttcttccatgctagccatccccgctcccttcacrcatccaccccataccacttattatgcacaatccagcagccagggcaatctttctaaaccatcaatccaatcatgtcacaacctgttggaacactccaatcattttcagttatccttgtaataaaatccaaaccattgggtagggactgataaggcccccwtctactggtacctctgattttatctcctttctcccccactgttcctatgttacagccacagacttcctgwtggatcccatctccagggtttttatacttactgttccctctacctggaatattcttcagcaaaatcttctgcacagctcatcatctcagtctctgctcaagtggtacttccttc

SEQ ID NO: 10055 - DNA, 40000 bp, Homo sapiens
cttgaacaggtgaacgctcgtgacattaagaaactctatgaacaagaaaaacaagggttgaagaaaataatcaactaactttagtttaaacataaactcaaaaacaagattattttccctgaagaaggcaggtagcaaggtctgctgaatgaaactctgtaggaggcaggggtaggggaacacagtctcgagagtcagcctcttgtgacattcttgtttttgaagagagctttttaaagctttttccacctttgatctcgtttcagaccacaaggcactcactgtgggatagatggatgcctgtctgggagatccaaatacagagaagctagggccagagttgaagtcttcaggttctcagtctcacgctagttttcgttatgttagaagcttcccatcatgtcactgcctcactctgtgactaaccaggcagaagcagggaatagccacttcaattttcttatctttccaaaggaaggaatcaaatctgacaaagcctcaaggggacattcgaaggacaaagttagccattaatctaaaattctccttttacctcaaaaagggtcaaatgcctcctccctctgtaattctaaaagtagatctcatccctcaaatgcaggaaagagagggagcaggtctggagaaaggacactaagatttccatgagrtaagtgtgattgttttcagtgacacagaaactatcctcagctttccttagctactaatgggccagttcaaaagtcaaaacctggactgtctgatgccaacattcacaggtttttcttttgatttgtggcatcaggagtgtaaacgtaaatcacatgtttcttagttgtctaactttgtatgtgtgacttaaattcatttcttcatcatagaatggagacactaatattcatttcatagcctaacatgttccacttcttacaggaatgtgacaggagacggcatgagatgacacgtatgcaagcatttagcaaagggtctgacacatgaaagtcagctctcttcctgcccttttccccttcccctctatgaatgatgactgaaagtgggggtcatcctaactccctgtcctcactgtactttagaagatctagtctagagactggtttctgcatgtgcatttggcattgtaaagagttattggggagaaggtggggtgggagggtagaagggtcggcaggggtgccctggcctcttgccctccccctccctgcccctgcctgatgcatgatttgccttcatggctataagcaccatgtgcgcagaaagcacagttgctgagcttgtacccatgccggggcatctcctgccatagtcgaatggcttcctttacctccacacataaatcctgtgcaggatgcctggtccctttggaccccattgtgttccatagtcaaaaccaagaagttgggctctttaagatcctcttcggtcctaaagtccaggagttcctgaaacactgctgagcaattcaaagttcaggcaatcctgagtttgaatctcaggtgtcaaaattactgcgttaaggtactttacctttcagaatctgaattttcttattttaaaatgaggatactaataccctgagaaggtctatgaaggctcaatgagataacggtgcagtgggtctggcactatgcctggcacatagtgggtcctaggcttactgtggctcactgcccctaaactgtgacagccatttcacagggcgtggtgctccccgggttaccctgactgcagcattacggcaagcagaaagtgcaggatgcagttttatttttacctcttctcagaaccctgttgtatacatgttcccctgaagggcactttctttscattatgctgtgagctaaagatgtttaattctctagacctctctattccaagctgcctttctcctaagtcctctggtcttattaagaccacaatcyccgtgataaaccagcccaagaatgagctggaggagcacaaatgttcctgttgaaaaggagcttagcaatcaactcctctggtcctctttcttagcacaggggctttaaarttttttttttaaaaatagctaaacaccaaagtccttagaaatgggtttcatcagttctccgtttaccagcaccaatggaaggaatatactgatattacatccttacagaatctcacagaacagcaatagcattttctcagccatctggtagaactactatacsctgcatgaaacattttcatgagagccctactacttgggcttctagcttccatttgaacagggaactcattttttcatagggcaaacagtccatttttaaacaactctaattatttgaaaacttctcttaagataaactgacatctgcttccttgtaatttttctaaccatgggtcctcgttctgacttctagataaatatagaataagtcctcttattcattttagctggcactctctaggtatttaaagactgctcataggattttttttttttctgagtaaaacattcttcatttatttaactgtttgcttgtttgaaacagagtcttgctctgttacccagactggagtgcagtggcgcgatctcggctcactgcaacctctgcctcctgggttcaagcaatcctccccacctcatcctcctgagtagctgggattgcaggcactcaccaccatrccccgctaatttttgtatttttaaaaaatttaatagagayggggtttcaccatgttggccaggctggtcttgaactcctgacctcaggtgatccgccggcttggctttccaaagtgctaagattataggcrtgagccatcacatccagcctatttaactgtttttaagaagttatttctagaacttttatccaacgctctgttttggaatattttccactttgtcaatttctcttttgaagtgttattttctggaattaagtacattactctagttgtggtttttctgtaaaaaaaaaaaaaagagaccattacatcttttaaaataaacagtctattatttcamatcaagatattgtcagtgtcttggatactcttaactcactgttgatttatattatgcatctgataaagcaaaacccttaaaacacattcttttttttttttttttttttttttgagrcagagtcctgctctgttgctcaggctggagttcagtggtgcaatttcagctcactgcaacttctgcctcccgggttcaagcaattctcatgtctcagcctctcaagttgctaagactacaggctcacaccaccatgcctggctaatttktttgtttttgtttttgttttagtagagatggggtttcactatattggtcaggctggtcttgaactcctgacctcaggtaatccccctgcctcagcctcccttaaaacacattctaatgttatttctagcaacaatggatcaaaattcagttgaggcccctacaagtcacccactcatgttgctatttggctatatttatttgtgcaattgttttcttctgtttagttcgatattaagactttgcatgggttaaatttcttcttattgaatttggctcactgtcccatgctcttaagatcattttaacccctaagtatgcatttaatatatttaatattctccctagcttcttgtcctctgggaatgttataagtgtgctattttatgttgccactcaagacatgggtataaatgttgattaggcaactgtctaataactactaactaagtaaacgcacagcagtagatgctaaaatgtggacagataattatgacacagtgtcagacatctctgacaaaggaagtaaagagaactgaggggagtatcagggaggagcccctaacccacatttagggggtagaaaataaggaatttctctgaaggaagtgagacataagcagtgagcaaaagaggagtcagttgtccatgtggaaaggggggtggagaggaatgcttcaggcrgagaaagaaggataggtgaagactgaggcaagagagtgcatagttgcttaagaaattgaaagatgatggttggctgaaatgtactagtgggagccacggtggaagagtaaggaggagcctgctcatcacacgagccttggagaccatgcgaaggagtttgggttttaattgcatggtggatccagtgaagaatctgaaacagcaaactgacatgattagatttatatatatattgaaactgcttctggtggcagagtggaaaagggattggaaggggcaaagctggaagctgaacccagttaagaagctgttgcagtgttctgggtgaggggccacgtgagtttagcctgcatgtaggggttcaaggcactgctcctctggtactcctggatttgccttctctattcctaccctccctccctgcatgataatgtgtccctgaaatgagtcctgccttggcttcccaagcagctctacctacaaggcaaagtaaggctggagacggagaaatattcgagtatttctttggtatcattggtatgtctcatccatcctagttctcattgcaaatgaaaacctggctttccagctttacctcctagcctagtgtacctggttaatgtctagtgagactggttagagtcagtccatcatggcatagtgctagttttatgggatattgacaggtattggaagaattagagctccatgtttaaaccagtgtggaaaatgctrgcctaaccaaagctgawcaggattctttactgaagcattcatgtgagactttaayatgctgatgtataccacagatatctcagaggggcaatggtttccaaaygtaaatgactatggaaacttttttctttggagatctgcatttttcagaatatgtttttggaaatgcttcactacttactwattgtgcagcctcagaaaagttatttaatctmtctgagcctcagttttcttatctttaatatgggaatgaagtacctatcttatagagtggctgacascaagtacattcttaataaatgtttattattattgttgttgttattattattaagagaagtagaagagcatagtaakagcatagactgtggagctaggctgcctgaacccaaatcccaactctcacgtactgtctttgtgaccttggcaagttacataaatgtcctgtgcctcagttttctcatctgcaaaatgaagttggtgtgaggattaaatgagaaaatgcaccgagtgctctatcctagggcctggtacatggtaaatgctcagaaattgatggcaataataatcataatagcactgagcatttggattggcccttaggaccaatcattaagtagtcaggtatctgagaaggcatggtgygaggctggaatctgagcaatggaagtcacaaggtaaagaakgtccctgggaagctttttagcagtggccttccagccttcccagggaagcatgccattttatactccttrtcttctgagcagacaggcttgctttgaatttccacaggtaaatagaaagcatttctcctcttgattcgcaggaaacatctgycttytttttaaaaaaaaaaaagtatcatygtctctttgtattatctttatataggtgattttttagccatgggattgtaatccccttgaagactggaccatgtcttaattatcttgctatagtgcctggggcagtgtgcagaaatgccacagcaaatatgcctcctttcacctgaacaccttttacgtgaaaatttggagcgtagagttgatcattcatttcaaaataaattatctcatttactgtaggattaaccataggtgtcctttaaatgtcatttmccattttattctcaaaatatgctagtttcaggacatatatatagttgaaggtatgatgtgggaatttataacataagamctccagatcagcagttttgtttcacatyggaataaaatactgtcttyctagcctgcttatatgttgataacraagggtgagaaaaagggtgctgattaatgcctttgagaatagaaaacctaagtcaaaaaaaaaaagacaaaaccccagctcatgggtttatagtttttccatagtgtaaacaaacatacatatatatcatgaatatatatgtttatatataatatataaaaacatatattgtttacatataatatataaaaacatatattgtttatatattatatattgttcatataaattatatatattacatgtgtttatattatatgatggatataaacaaataatatattacaaatatatatttatatattatatattatttatatctttatatattatatactgtttatatataatagatataagcaaactatatatttgtttgttttcactatgaaaaaactataaacccatgagtttggkttttaaaaatatattgtttacatatataatatatastttttatatattatttatgtatatattgtttacatattataaacaatatatttatatatgatatgtgtatatatattatatataagcaaactttttwtatatatataaagttacatatatataaagttatacgtataaaacaaaatttatttcattgcccatgagtcagccacccacaggtcaaccaagtatttggttcttatgacagctgatartatcarttgttttaaattatatcatctatactggtatactttagacatttaattctaagcatgatgttttctaacatgttactttttctaagtgatcttttgattctctgttgcaatatmacttcaacaagccaatgcctcaggaaaaacataaaatcacagtggtactataagtggggaaaaactaaggcagtgataagtaaaactttcctgtataatctcttaaaagtgcgtcttgggggccgggcgcggtggctcatgcctgtaattccagtactttggraggcgagaggggcagatcacgagatcaggagatcgagaccatcctggctaacacggtgaaacccwgtctctactaaaaawamaaaaaattagccgggagtggtggtgggcgcctgtagtcccagctactcgggaggctgaggcaggagaaccgcttgaaccygggaggtggagcttgcagtgagccgagatcgcgccactgcactccagcctggcgacagagccggactccgtctcaaaacaaaaacmaaaaaagtctgtcttaaaatgatttaaacaaagaaagacatttcataaaaaaaaaataaaacttggctaagaaggggaagattaaaagctacacagagaggttgagagtttaaagaaataatgttccagactgtagtcaaatggaaaagacatgagsaagcttaatgggttgtccaaagtattggggatagaggtgaggtccccaataccactgattcaacaaaatttatttcattgcccatgagtcagccacacacaggtcaaccaagtatttggttcttataacagctgatagtatcaaagactctgaagatgactgtataaaatatgaacatagacataaaaatatcattgttcattccattgtccattttgcctaggaaatgtcccttgccatggagtgtgttccagcaagcattgatgaatctagcatattgatttttgctttgtttactgggttmacaaggcagtttagatggaaaaagtcttatcatcatccagactccgtttgccacaaacaggaaatgaatttgcttcccctgtccaagcctagttcctggcaaaatggaacagytcattgctaagccgccttttttttttttttttttttaaatackgtagctagaaacttggcagctcgctctttcaaagtgacagctttcaaactgtctacctaacacaatttagcctaattccaaacatatcggaaaatggactgttaaagaaaagaaaaaaatctccggaggagcaactgcctccctgtcctcctrctttttstctaatatgaacaaaatgtaaattattgtctccctaggttgtaaaatattcttcagagaatgattatacctgtcacagatgggatcttgaaataagttaaatgtttaggtttatatactaggaattccctagtgaactgaattctccatgcaatttttggtaatattrttattgaactataagcataaatgctatccatgagaaactggtttatttatttaaaaaaaaacaggaaaaataactctttctcacatttcttttgggtacccagaattttaacatgtccttaattagaatgattaaaagcattttcttaagtggcttaatttataaagtgttgttattaatacatcctggaacctataatgttgaaggattgctcaggtgctcagaggaagctgsaacaagagaaatgagccccatacctccaggggctaaaayccctctggtctattcctcttctagcctggagtatctctacagcttccaaacatatctcctgttctccattttctccttacwcttttttttttttttttttttgaaacrgagtcttggtcttrtcgcccaggctggagtgcaatggcacaatctcggctcactgcaacctccacctcccaggttcaagcgattctcctgcctcagcctcccgagtagctgggattacaggcgccmaccaccacmccaggctaatttttgtatttttagtagagacagggtttcaccatgttggccaggctggtctcgaactcctgatctggtgatctgcccacctcggcctcccaaagtgctggggttacaagcatgagccaccgtgcccagccctccctaccactttgtaaagcataattctgattatgtatttctgctaattagaatccttctcaagtcccscattatctgcaggaggaaagcaagatccccaaggcctggtatggtgtgatgcctgccatcytttcccaggcttatatcttctctttcatcttttagtccctcctcacttgcaatatactgttccctctactgcaaacacttttccaygcgcttgcctgtcaggaacactcatactcatcctctaagtctcggctccaatatccttgcatcaggaagccctcctcatcctcttccccactccaccacacygctagacattgatttctgttatttcactgcaatttgcataaatcacagtcacagtctttatyacactgaattgcaatgatcttttatttattttgtcttctacactgagagtttcttgaggccagggactaacttactcaacttcatgtcccaagggacagcctggagcagctcctgacacatatgtgaaaaccagtgtatatttttccaggaactgaatgaaaggaggaactgctgctggacaatagcatttctcagtcatacactgaatgcctcttagtctctcagtaaccttcaatccagagaggtttactctgcacaaagaggaggtttatcattaattggttgatttaattctgacaaggagtggtgggatggaggagattcttagaaaggyataagaccccattagcctgaaaaactactagaacccagtttttaaatagggccaggcttgctttccagttttaattcaatacaatagaactgttaaatgattccaattactgctacaaatggtcgcctattgttaacaatatagagccaaagcagaccaacaacataaggtttcttctggaatattacatttccagctacacataacctttcagaccaggaaggcagtggagagatttttcagaaacaccaactaagcctgcagaacagtctattagaaattgatacaaatccaaatctgaggagatcgtctcagtacctttcctggctacaactgaattcaaagggtgacattaaagatgcctaaaatcatgcaaagatgtcaaacgctaccactgaatggctggtcccacctctgggatttccgtgcctacctcaaatatttcatttytttttcttgaatatcatggtgtgtatgagaggaaacttacatgagtttatacattttaaaatayagattttaccaaaataattcttaaccaaatgttaccaaagccatgacttaagggcgttatatacactcagtataccttagaacactgtrtatatcacacrcagtratgggcaggactcactgctacagaactattagaaatgaaaaasccgccatttccccccttttcctcttcttgcctctctgcatttctcagtcagtattacaagagcagcttgctaactggaagagtggccactgaaaaaaatggagacaagartttaacttggkgctggtgttcctggagccaaagtcatcatccgcagattggtaaccgcggatacaaggcctcttagaggccactagtggccactgggtgaactgcatgaagatggcattttaaaaatgmgtgtkctttccaaggtttagtcgcttagcaaatttcrtcccttagtgacttggagaaaacttgatatatagtgccagaaaacctgcttttagaacaattaaatataaatctgaaatgcaaaaggtaaccaggagatagacctccttgttcagatggtttgtgtgctgctatgtgtgtgtgcatatatatatatatatatatatatatatatatatatatatatatatatatatatatatatatagtttttttcctgtccttctcatctgggacttgctgtcatgattctgggcttcagaaaccgtatccccagagcatgtaacacttatcttgtctgtgaaaaatattaaatgaatgcatatgtatgaaatctgtagcttgttattaataataaattataatgccactagagctatgagtcattcaattcacaagtgattgactgttcgttcattcattctacagycactggacattcatattcctatgccagtgcctctaatggatatcccagaatgtcacttgggttgtggacacatatgtctgccaagtaaataatgactgattttttcagagtaattcagttatgctgctccccacctgtgcctccagaaatcaacaaaagcagtaatcccagattttatttttcttaattggcctacctgcacakgttctctgacagttttaatgtcttactagcagcattttgttcagatgtcagatttatgggggctacaggtcgtacatattcctcataggaacaagtattccctggagtgctttcctgaccttgctgggrtatgataagttgcacattcccagtcaatgaacacttattggtcacgtgctgtgggtcagacttgatcacagacactgctcactagatgctcacgacaatctgtgaagtaggcattgcttccattttgctgatggagaaactgaggcttgggcaccaatatgactttcccagagtgagcaagaagtggcagatgtggaacaggaagccaggtcttctgcctctgctctctgcttccctgcttccctgcactgcctttgtagaggttcccgtttttcccaatcctggcaagggtggctgtgtcctgactcctcgtggcaaggacggttgtgtcattactcctcctgttcttactgcccacttcttccagtgcctacaccccctttccgggggcccagagtcttttgggccacaggggaattttgmtagaagatggaatacacaaaggcaacctgcttaataatttgatatctgtaggcttttgcattttatttgcattcttaaagaaaaagactcgtagactgggtaagcagtgaatatcaactgcttaccttcagcctctatttcctaacatataacatggggatgaggattcattgattagcaagtcctcttaaactcagttctgtggctgtcaaggtggggttttagagagtggcatccagctgggagacagatttcagaactacaagttcgtcttagcccctcaaactctaccacctgactgaagatgcccttctgttctgtgaacttcttttcccaaacttggatggtactggatacctccctgatttcactatttgatatcawatcatctagtgtgacagtaacacaatgacaccagtccacaacacctgggcaagtgtctggcttgctggataaactgcacttcccctttccctttgctatatggagagctgcatcaatctgggctttcaggcattsgtctccttctaatgaggggaatcgaccacacagctccagcatgaccatgctcacctatcccagcaaatrgktgyttatccccagtgraacccagcacagaacacccttaggagtaaaattagattttggtgcatgaatgttattgacaaaaaagactccctgctcaatgccactcggggacatgagtctgaatgtccctsccatggcccaggggaatgatgtctgtatcaccaaaccagtgctggcacctggrccttgtcaccactgacagggctgagaggaggtcagctgcyggctgctgtacccggaacaggtttctagggatcaggcagaggcaagaggctggggaagcagcttgccttgccagctcaccaggctgctctggagagaaatagagggcttctatctctattactgtcagagtctggcacttctccccggctctgaaattcacagcaatggatggaggagggaggagggagaaggaaggaggtgcaagccagacaatcaaaacagccacaatattttggaagtggaatattccagctagagaaaattctctaaagcattgagcagtagggctggaagaggccctagctaatccagcactctggttttgtagaggaaatagttgagaggcagaaagacaaagcaacttctctgaggttacaaggtcagtaaggggcagaactgggacaaggctctgggtcttcggtgctttcaccacttaaaagaaagcttttgctttcttcctttataaaaccagagattggcagggggcttccttttgtgggaaccccagtggagacagaggatgtttacctgcagggaagaggggccagrgcccggctgtgcctggacccagagtggtggggaaggggggtatgctcataccttgcaggttgaygccccggggcaccamgccctgaagctccactgtgggcaggtcatcttccgctgcattagagttattgggtggaactgctcttctgcctccaaaggcggtcctggaagtttctgacatttttgactttacaaggtccttcagaaaaaaaaaaaaaaagaagacaacagaaaaggcatgtaaagtgagtaacatttgagacaaggattccaaaatagagaaacagatatatctgtgtgtgatagcacttgagcaacacattttgccgtttgcataaataaaaactgagaagtggcagcaaggattagtctaatgatggaatacagttccccaaggatcttggggagatttttgtatgtgtcaaaacatatggaaagcagaagaaaaggggcttattcaaagaaatttaaaaattaaaagatttttggagacccagattccsccaccctccataatcctacagcagcatcttcgcaagaaatgtttcctgttatatgcatgtgctgtatctatgttcatttcatacagatttatgagattataagtcacttttaagaataaacgcacacaascatgtccagayaaatgttgtcttctaaagcrtttacatttgcaatttaattcaaccaatatttattgagggcctatgacatgccaggctgtgatctaggtacatgggatacatcagagaacaaaacagaatgtttgctctgatagattatagtctgatagggttagggtggagcccaagaagagccrtaagtaaatccacttaggggtgaggaggtaggaactgctttggaaattgagccacatggargaggataaggaggtggagaggttgggcatgcaattttcaatagggctatcaataggcttaagaagtcagggttgccaacatttcccattccccaagcctgcttccccttcccttggagcttgtgcaggcactgagccagtttaaacaacacacacctgacggtcagtgcccagtaagtacttgttgaccaaatgaccaaatgaagggggactttgtttctgggcccagtgaaggttcccccttgatcccctggattacccagtcatgactcctggagacttggctattttcaaaaaccakgcacacccmcaagaggtgaagagtccccattatagaggccaccagagtagagagatggttccagagacatgtggagcactaacaacatgctggagaaaagacaaccacgcctaaggtgtctggtctgagaaggagacaggagtgtttggatgcataaggtgtgaatgggtatccataagtatagataaatatatttacagtcattggtgagctgasgggggaagggagggagaagagcgaaaaagggttaatgatagggagaaggctgcgagagccatcctctagtgagaaataccgaaggtaggctgyggcattgccaggggtgcagaacagtgtggcrcgctgtcgggagacacagtgctaagggggagaaggggggagccccaggtgcacgcctggctgggtgagtgcggcgggcaggagccctcgcttctgggcgggtctaaggaggagaagtggctcgagttcagctccaaattgggayggaggcaggcgatgcgcaggagtggggaggcgcgcaggagtggggagccaagccggcggggttccagtctagcaggctgttctcacttggccccactccctccaccttttgtgttccagctccataatctgctccctgaggaaagggggctcgtcccttggggaagcacctccaactcccccatccccatttggtggcattctaagcaagcaacggcttcgggagagctgcctcgagagcctgagagaagtcccgcttagaagctgggctgggcaggtgcggagttgggggcgggaagccaggattgggcaagtggagctgcctgtgaccggcgccacagggcccagagcaagccgcttgctggttcaaccaggaaaccgaggtgcagaaggtggacgcagcggkccctggctcatagggtgcagggkcggtggcttacctgcaggcgctcccstccagaggtgccctcgcgtgggcttgctctgtgcgcctcggggacttcctcaaacggactcgggaaagacaagacagttggctcttaaataacttcctaagaggagccctcaccctcctcccctgtcccacagggttttctcctcccccttctccacagctggagccagtaggggagctcagaggattttctatttacttcatctggcctgttatcccggcaggtgcgcccttctctcccacttgcccctctgactcccaatttcccattcccactyctcctccccatccccayccctagatctgccctccccaccgcaaccagttgctgggagtascaggcaaggggccctgcagtgccaggaagtccccacccgtcccctttggtcagagggtctgggagggtttcctttacaaaggaatgcttttgcctggcaggtcagctgctactgtggcttggcaggaggggggtctgccctcccacagacaggtcacacagacagttgtgaccatgcatgcagtgagagcaacgtgtccctcctgtgcaaataaggcatggtctgcattcctgaatcatcccagagccacagccaccgcctaaccacaagacttcctgcaggaatgggatgcctagccccaaggaagatgagtaaacatctttaataatgccatgcagattagaaaataacacttggttttctctgaaaatcattttagtgcatgttcaaaaattagaaaattttccccctaaaattttaatttttttcttttactctttctttctttctttctttctttctttcatctttctatctttcagatgaagtcttgctctgttgcaaaggctggagtgcaacctccacctcccgggttcaagtgrttcttctgcctcagcctcccaagtagctggaactacaggtgcatgccaccatgcccgcctaatttttgtatttttagtagagatggggctttaccatgttggccaggctggtctcgaacttctgacctcaggtgatccaccctccttggcttcccaaagtgttgggattacaggcgtgagccaccgcacccagtcaaacatggctatttctaaccttctttactgtcttcaaatttctgaccctgccactcaatctcccartgttataaagaagaaaaaaaaagatgccattggttagaaattctctcaattttctgctaccaatctatgaacctgcctgcaaccttatctatcttttcctctttcttcttgttactgaagttggaaaggtccctcctccctctgcatctccaaaccaggcttctgcgttgccttgttctccggggctttgctgtgactcttaygtactcttcctcttgcagcttcaagctcctgcttgctaatagtgggtcttctcagcattcatgcaatttcaggtctcttcagtatttttttaaaaacctcccccaacctatgtccccactcctgctgttactcctcctctcctccccttcatcactaagtatctgccatctggcttccgcctcatcattctactgaaagtggaggtcacggtctccaaggcctgtgctcaggccaaargacaggattcagttcttatttacctgaccttttggaagcattgaactctgtctttgaaggtatttttcctaggcctccttgacattgaacactctgtggtttcctccagtgcagcgcaatattccttgattgtctgaggaactcccatagttttcaaattccatctatatcctgacacctcccaaatctgggtctttagccaagatcttttccagaattgcagattcccgtatctaagtgcctactggctatcctcatttgtcacatcccagtgacaacacacgctcatcatgtctaacatgagatgtatcactttcctggaaaacctggtgcatctcaggagttccctacctcaatgaataccatcactttgcacgcaggtggtacaccagacacatgggcatcattcttsaggcttccttgtttctctccctcaatcatcaaatccgatccttgagcaaatatttkctatcctacctcttaaacagcccttgaatctacccgtgtatgtacccctttccagtccattctctacagtgcagtcagaatgagcatttcagggctaaaatcygaaatcaaattatttgcacaaagcccttatatggctacttctctttgctttttggataaattgcaagctgaaactgacaaggcctatacaagctggaccctgcctctagcactgctctttccctcagcatccatacaatttgaggtctccagtatttttaaaaaaccttcccccaacaccaatctaccctccctgccttccactgttgtttctcctctcctcctcttcatcactaagcttctgccmtttggcttccatctttcttccctatcatcttcctctgccatctttcttccctgcccagtctccctccactgactccccagttgtcttgcaaggagtttgccttgttgtagtgctcctcacactgcatgatcattttctgtttccttggctgtacctgcactagagtacaaaaaggtagggactccagccagagttccctggagagaggctgctgaccacttaactatccaaaggccgtctttgccacatcccttgctgagtgctagagaaagaccctaaagatgtctagcactgcttcccctcagcattcatacaatttcaggtctcctcagtattttttaaaccctcccccaatccttaacgatcatattctggtagttctcctggcaaacatcaaatctgagtgtctagaattccaagataccctcatccatgtggggttggaggatgagcagccacccttgcacccttcagatgaggttacgcagatgccaggtacccctgggacttggggttgagttgtgcattcagaacaggattgtcaccctcacaaccacctccacggtgtcacttttggccttagactaattattggctttgtgaacatacacacacagtggttggctttctgactcccccaaaccactaacctcaagagcatcataaatgcaatggctttccttgtgctaaacaaagtcgataaaaatgtgtctaagccaccaagccctagaatgcggttgaagcccattcattttacagggtattcctcatggttatatggctgagacatcagaacaaaggtttctggtcacacwgtgaatcttgaactgtgctagggatgcaacttccacaggtgcataggctctgaggtccttaaggatgggatggtgtcttttatttctgaatgccccctgcctggcatggaagtggagccatgtaaatatttaaggcatgtaacagacggggttcatccaggaaaacaaaaaccactttaggtctttctaaaagaaggaatttaaggcaggggattggttacacaggtgagagaagagacaagaaaccaaacacgagaaggtgaatcaactccacaattagcaacagcagagaggagttggtgtcgttgtagcgggaggactgagggtaggtcaggcactggmaccgtgtggtcctgtctggtgggagctttagatcccataattccaagaaacactgtctgaggtcaagagggagggaagaatgatcctagcttgtccctttcttcccgctccctctccctcccttgtctgccgttttgctgaactccactagaatcagttgacaaaggactctggaaaataccgcctgcaaagttagccccaccactcctgtgctggggccccaaggctacccccaggttctgtgattcactaggaggactcaccagactcggccacccacgtagctatgatcagatacaaatgtacatatatcatatatactacacgataaatcatgacgaaaagatacaaatccaaatcagcagagaaaaggcacttgggcaaagtctggaggaccaggcagaagttcccaaaggtcctgtcctaatcaaggcacatgggctgtgcctaccaaccctggcaatgagttgtgacaacactgatataatgtcatctgccagggatgctcaccagaggctcagtgctcagggtgtttatggggggctggtcacataggtaccctctacctagctcatagccattttccagactccctgaaggaagcaggtgttaagcatgagccacaatttttgtacagtttaggcccagccagccccacttgtcagttagggaacagtgggaagactcctgaagtccaagttcccagatgccagacaagggccaagcttgcaagtagggctttctaagccagtttcaggtttgctatgttaactctttactgcatccatacagggaaagggtgaggaaaggctctctgggcaaacagttccaggactgccacaacacactgtgctctttcatcatggcatggccagtccctcacatgagatgtcaataggcctggagcacgaggagactccaatgagaacgtcacaagggtaatccagttctgcccctactttcttggccttaccagctcagcatgagacctccaaggagacgtgaactccctctggctgcacgggcctgggcataccttctcactcttstgaagctgaagggctcaccccattgcctccccaagaagcagggtaaaaattcctaaacacatcactctgggatcctggcgtctstcagaaatatgtagtaaactttgggagttgtgagtaaacagaaaatacgtgggaggagggattccggatccccttaccttgatcctttaattctgagttttcatttctatggtattgacacttttctctgcagtctctccagacaaaccatctttctcctacttggcaatacccaaggagcagaccatatttgttcaggcaatgaattttctggcaaactctattygatttacatgcaaaacttcacatctcaaacaaacaaacaaaaaacccagtcatgtctggacgctgctggttttttccagctgaacaagacctggattttgttggttatagatgtaattccagagggaggtgagtagatacataaataacaactggccttgttcaaagatgccagaccctctgacatgaatgacccaagttcgtctcttgggagagtctttctcctgcactgcccttcatcctgtaggagctggagaaaactttccactccagatggaagtgtcctgggggagaggatggaagrgaggctgggtgggcagtttgtagtcaggttctagccacagtagtgagcagtgggggaaggcaagcggccctctgtatccattcacatatttttcaaagcctcacgagcgttttcacaaagtctggcaatgacattttaaaaggaatttataaagcatcatcgcagttgccaccacaatagggcgtgggatctaagacaggaccatgtctcccacagcctcttttccttcttctttcaggaaagatgaaaacccatgccagggacaggtscagatggcaggagttttctctttgctttggcttccctgggcatagcccactcttgccagggatctacgatcacctgtaatctaccttcccgaggagcagtgatggattgctgggggctgcctcacctcatggcaggcaaatggaagaaagctgttctcgccttaggaaagaaagatttaactaatgtacccaccttcttacagtaaatatctctgtcttaaaaaaaattttaattgtggtaaaatacacataaaatttataatcttaaccatttttcagtwtacaattcagtagtgttaaggctattcatggtattgtatgacccatctccagaatgtttctgtcttgcaaaactgaaactctgtttccattaaacaactccctgtgaatatgtgtgtctgtgtgtgtctggctatatatttgtgagtgtatatgtctgtctgcatgtgactgtgcacacatctgtgtgagcgactgagtgtgtctgagtatctgtgtgtatgggtatttctgagcatgtatgcctctgtgtgtatgcattgtctaygtgagtgtatgtgtctgtgagtgtgtgcacatctgtgtgagcaagtgtgccgtgcatatgagcgagtatgcaggtggaagggaaggactgaggaagcactgagggtttagctccagaaaactttctccactggcttcctaactcctccagagtcctgatggagtttaaggagactccaagagatttttaaacttgaaaagactttataaaacatgacgaagggtcaactagaagtaggtctgttacagataacgatttttcaagtttaaaggaaagaaatttcataaaaaatgaaaaattcataaaaaaagaaaatttcataaaaaatgctagaaacacccacagtgggaagagacatcagtcatgccagcctcactgcatatgacacagatgcatgcatggtttaattcaatacttttccttaagtgaagcaagagaccccacatccacccatcccaagtatctcactttgccagaggaaaaattcaatgataacaaaacattatgaaaaaattagtaattaaaataatacagcaatgtgtatgaacaaaataatcaatgaaagtgaaacctaatagtaattccacaaacttattacaaagctattaatttaaagagtagtggcaattgaaaaccacaaccaacaccagataatggggatgctataaaaacaatgcttgcttcagtaaaactatcagaatgctgactaaatgtgtatgcacatatgtgtgcatgtgtgtgtgtgtgtgtgtgtacaagtacagtaggagctttggagtgttcccaagagtaatatggcagctggagttagaatctactatctatgtaaccttgggcacattacttaacctcacctgtaaaatggtgatcctaataatgtatacctcacaagattatgaagatcaaagaagagaatacctataaaaaggtttgtatagtccctggcaagaagctagctctaaataaatattaccagtaatggtatgtgtgcactggacaaccttcactcatccatgatgaatattttaactttttgtaatagttattacctgtattttctcattatcatcctcatatcagggaagtgaatatttaagttgctaataattttggataatttgaagaggccattatcagcatttattgcagtattttctgtctagaacctcttcaagagcttcatgtgcaattcatgcttgtcaaggggtgagatttataattggctggttgtggttgtatatgtgaggatatgtatatgtgaggatatgtatatgtaagggtcwrtttctcttgctctgtcacccaggcaggagtgcagtggcgcgatctcagctcactgcaagctctgcctcccgggttcacgccattctcctgcctcagcctcctgagtagctgggattacaggtgcccgccwccacgcccggctaatttttgtatttttagtagagayggggtttcaccgtgttagccaggatggtctcaatctcctcgtgatccgctcgcctcagcctccgaaagtgctgggattataggcgtgagccaccgcgcccagccaatgccttccatttttaagctatataagaaagatgtctggggagtgggtcagagactgattttatttgatatataccaagtgaaggsaccagcttccacatggttgccagtgaagggaccagcttccacatgttgccagttctttctggaagcccacatccaggtaggcttcctgggcagacccacgggcatctcaccaaactcttctaatgaggtctgtggctatgggtcagcagggtgcccctgtcttgggcactcttgcccaagagtgccgctgccctctgttgtagtcgcacaactgcaccttcttgctgatgaggtgaagcactaacacaaggccagaaatggaagggacatgatgtcagctggagtcttcctaacagcagaacttctggataatgatctatgaatttctaaggaaagccaaaggccattgcataatcgcatgtgtgggtgctaaaacagccaaataaaggggcaagttctcctttctttgatgctccctcagcaatttctgcagtgaagtttcagataactgtgccagagcccttcctgtgaaagtgtttcttgttaatgcatttctcctctcacaatggtaactataagtggttaaaatagcatcagaaacactaactctatcatatggacatatatcatgattcactaaaaatatttcccacaatgcagttttaacttaaacaaaagttgtttatatatacgtgtgtgtgtgcatgtgtgtattaataaatatagacagtgtaacttacccagaagagttccttatgcstatgttctgaaaaagacagcacagatgcccaaaaatataagaaattttataaggggcttttagtggtccaagattctcctgctggcttctatgagtgataatgatctagaattcttcgaaaagccaaaaagaagtcttccaacagccatgacttaataaagtccattgtccctgattattcaaactccttctgattgttccatctgatttcatgatcacaaagcctatgaaaactttctgttctgggaaacagaatcaataatgttttataagcttaactgtgtgatatgatgtgatattgtgttttatggaattggacatggcctatgtctctactatattttcaccttgtatgcaacctcctgggataccattacwtatatatatatatatgtgtatacacacacacacatatatatatacacaaatacatatrtatacacatatatgtgtgtgtgtgtatatctgctrtatacatatatatgctatatatatatacacacacacatattatagctaggtatggctttatgtagtactttcttaaacattcaccctcaaacctgaagggttctttaatgattgtgttcatttattcatttgggattagctagtttccaaggatggatcaaccatccatgcctcccggtattcccagccatgtgtagtccccttccacagtgaatctggcttcaaccaacagggtgcagtggaagtggccctatgccagttctccacctaagctatatgatgtcctaacagctgccttttcatgcttttagaacccttaaccaacattaagaagtctagctacactcctggagtccagctaacatggagaaaccatacagagaggccacatggagcggtggggacatgagaatgtgcagggagggagaggagtccagctgcctcataatcctaccggagcccaggcatcagccatctctgccaacctgcagcacgagtgaggacgcgagtgtgccacctggcaagtggatcctctggccccagtcaaggagctgcagctgatggtgcatggagcagagagaaactgccctgctgagccctgccaaaatcataaaattgtgagcaatgaaacaaagtggctgttattttaatccactaatatttgggatagtgtgttacatcgcaatagataactgagacacattcatcaaataaatatttatctaacctgctgtttataataataatacaacactaatattgagtatgctgtaatatatagcaatataattaatatggtaatatttatctatctattattgacagactttgtgatgagtaggaaattgtatctatctttaaggcctgcagtcaagaaggggaaactatattaaaagctagtgttttggaatttcgtcaacaagtctgtttccacgatttaatagacttcaaaatattctgtgttttcctcctataacaaatatgttccttgtggacctaatctggcatataatatatgtacaaaaatacaagttaattaatgaattaaagtcagtggaatctcttatgtcagtraaagcaatagggttgctgacaaaaaaagaaagtaaaagtttttagtgaaytgtatatgcaccactggtttttatttcacctttatcttaaacagtcagccactcacttaaactttggcttctgaggctgagagccacataaaagggagcactaaataactgcaagtgtaaagaatgatttgtgctccctaaaatgctttattcatacaagggaactgaggcttggagaggcaaaggggcttgctcataatcacacacctggcacattacggatttcagactcaaacagacatttttaaaaccaagtccattgtcttggctaaagtacaccttctccaaactcctatctttctcttactcaaaatttcccttcaaatctacacattccaagatctctcttagagctgggcccatggtgctcctggaagatatgattggatttctcctcaccctctgagcagtgtaggcacaggtcttctggtgcaggggatggggacrttagaatgtggcagctagctggtacctattggagaccacccctgtaggtggggtgactctaccactctggtctgtcaacagaatagtttttatgggaccctcatacgggtcagggactctgttatgtgctgcaagggatttgcagggagcaagagagaggtcctttcccgcaaaagacttacggtcagcccctaagctkctcggtgaagggaagagcaacattgaacatccgtcttggacaccttgccccttggttcttctatctcacgagtgcctcgcagtggctctgcctgtggwcccttactcatgttctctggaccagggttgttaaccatagcaggttagaactgcccatttattctaartacaacagccaactaccatctttatttcaaccctcacttcccaccacttcttctctagtctcaaaatgcctttcagcataggcaggaaatatgacagaagaaagtcccagtcgaacaaacaataaccgaaaatgctctttgttgctgggccttggcgatcaaagccctgcacatgtttgccagctgtagttcagatggtttctatttcactcagcattaattttttatgaaatctrtggcccaggggcccataagcggctttyagttcttcattctatactgtctggtctaattgccaaggcatggtaagactcagattttaaggygtcgttaatgtatttaccagccttccggtctacaggcaggctcacctctttgtgtgggattttaatcatgttttgtttttagaaaggaaatgaaggtattcttggactaaatatacttgcttttctttggatttattatcagtatttcacatcagcgagacagcatayacaacactgccaatcccaaacctcagactttatcttccagtttaagtttgattcttaagaagcatatggagtctgtgcagtggaggtaaggcctgtttaaaatgaaggctgttgtttgtatgaaacatgcttatttagtagtttatgataaggggcctgctgaccccaaaggctatctttcttctcacttagcagcagcagcctggactttgtttcagatcgtctctggatgctgtagcaaagccagcaagtgactcactgtctgtcctcaaactctttgcagcccccattactgaagagccccacagacaacttagaaaacacagtgatgggaaagtgacagtgtttgcagagttgctggttgccaggggtctacatgcaaggccagtgccgcgatcattttcatgaatttcagatgtcctttctcttgccaacttcgtgtgttttytgaaaaataataagaaaaaaaaaaaaacccagtcatctggccttacttccttaaaccgaagctattagaggtatccaggatctgactagggcagctaattttctttcagtagtgattatagctgcacaccctgcacaaaccgcatgcaagactccccctcaacataattttacatgcttcacttctccaattggctccaactgttaacagagcccaggttttgcatacacagccacacttggggagaaagaaaaatactttgttgcaggcagttttgccttgatacttggcactactccatttcctgactgcsttacactcccttccctcccaggtacctgagacttcttcatgcatctgagtgtctggcttttgatgcagctcctggttaggaaccagccctctccatggtcattagcttcctttttttttwwwaaaaaaaamaaaaactaccatctagtaggcagcttcttcggcactattgttaatctgagaatttgctagtacttaactcactcttcacacgccakaaaaatctctattctttgaagtgtctaagtgtgtgatggctgaatgtgttgggaggagctgtgtttcaatatgttttttacttttgttctcaggccagagaaatttcattcagtttcatgtgttcagtccttgaaacaaaaggcagtgcttctatttgaagctttggttcatttaaaggaagtaatcaattctgttctgtgagtattcactgaatacttcctaggacctatgaactgattcatgccagaggctgcagggcctctcaaaaaaaaaaccaatgtgtaccacaatcctctagaggctttctgattagacagattgggagcagggtccagttcataagcatttctgaaacatcccaagggaatgctgacgttgcctcggtggaccccctttgagtaacactgctgagagagacaccttagtaaatgctcagggttttgtgggaagacattgaaacacatctgaattagacagtaagacaaccagtaacacaaataattcaagccccaaaatgcactctagagatatagaatgccagtggccttcaggaggtgataggaatcaccaaccactgtggaccaaaagtgtcagattagtcgccgctatctggggtagggttttggaggcagtcgggtttggaagaaagtgtatgatgtggataggtgggaagggagaagaaggcttcctggacaggaggataaggtaacaaataatgatatgtttggactgagagctgatgcatagtttctgcagaaataaatgaagaccaaccaaatgagaaccagaaaactatttattcagagcttgcaagacagttagtcaccatcacttgcattttggcagaaatccaaaggcaggcagaggagtgggaaagttttagagtggcagaaagggaaggttccagtgtgcgctgattagaggctgttggcatgaggaagctggaggtggctcactagaaatgggaatcccatttgattggttagggggtatattttgctttttccagttggtcctaaaytgkwaggatggacaaaaattaaggaagctgtaatttattgatcaagtcctggccatttttgacaattgttatagaagttattgcttgacttcctgagttgttatgagagataagaacttactttctacaagtctgacttataagtagcatactggcttccttggctggctacatagaggtgggatagtctccagggcaggttgctgcaggctgtgggttgtagttctgtttttatatatggtctggccattgatgtttgtacattcactctcttgtttctggatttttggggtttgccctgatgtcatctctcttttcatattttttcttcttcattttttgagattatgggcttctagcctcattccacttcgccaatgacttttgagagttctctccttattttctgagcactcaggagcccttctatgttctatttattctctcatccctcagattgatgatgaggaacttctcctggaggagcagatgttggttcagttgctcytgagtgaagcccaatcctcaggttccatcrctattcacagggtgacagctatcgcttgtatggagataccaaagctgcatgggagacatcaaggaccaggggtcacagttctctccttgacctcatatggaaggacaattgagtgctctctgcaagagcttccaagtccccaggtagagggaaccctgcaggctccccttggataaatgcagatrcaggcactgggccctctgcgagtgtctcgaaatggaaactctgcagatggggtctttgctgccaaagctaacatcctaaaggctcgtggccccaaacagctgagcggggtcacctctttttccagcaagcgcttaaaaaggctccatatcagtgctccccagacaccacactgaagctttgcaggacaactctctgttctcaccatctgtcggcagctgctttggccacagcagtcagctgccaacttctatcttccatcagagatggccttccttcaggcttcttgaccagctctttgatggcacataaccttttagccacctctctaattctgcaggtggctcaccatggtttatttatgccatttctttggctctctgaaactcctcttggggtggctcccaggaggtctagggagccgtgagcacctaattaattttccatgagaagctcatgtgttgggccatcctttctcattttttttttcagaattgcttatttgctgcacttatagtcatttctcatggaaaaatttgacatataaatccatcatatattagattattccagtaaactaaaatggccataggcactcartgtaaaatattttagcatttaaaacatccatagcaaaggtttttcatttataataatcatagatattattaaagtaaataatacatctgggagctagggctttttcacctttgaattcagacatgttgggtgtgttcgggtatgtgcatttattttttctgggcagaaaacaartatctttgtgatggttacataaacgatgaaaaattaagttattgaaataatgattctgttatgtatattgaaattagagattagctgctcctcgatatccattttctttttcttctataataattgaacctccagtatttagctatgcacttgtctgcaagaagaatcctactttccaacttttcttgtgtgtggttatggccagatgactaaactgtagagaaaggggtataaatggagatatgtgtgtgtgaaatttctggcatgagtccttagaaggtggggatgtgccctttcttgacttattttcctttcttctggctggaatgtgaacgtgatggctggagctaaagcagccatgtggatcacatcgggaaagccttaaggatggtgtatgaagcagccaatcagaaggagcctgagctcattccagccctggatcacctcctcagcctcttaagtgagagttaaataaacatttgatcactttttaaggagcactgttattcttgttttttaatcgcttgtaaccaagcctgatcataactaataaaacaccaaaataatcaaatataaaggaatacattttgcattgtcctttaaaaagatggaaggaacattcatgccacaaaggactgcctaaatccacccagaagcatattcaccagagtctcaaatagtagctcatcatggtcacagtcttcagtgtgttagagctgctcataccttcaggatactgcagaggtcttacttctagtcactcatgtttgcctttggatcatcaccaagaataaaacaatgtcaaatatgttaagcagataggacatcatagcacccacaaaatctcagtttagaaatgatagaaggatgcattttcttaaaaaaaaataaaatcacaataggggtaacctaaaataattggatggtcaaagccagtcttcactgtcacaatgtcaaatacatttagggacaaacaggtaacrttaatgtagtgtgatttaggacacctgagtgtcaggaacacgtactcaaacctgagagtccctgttctgtctgaacacactcagatttttctaaaatacatgtctggctaaataaaacttgtctgtgagctggtcctattcccaggccaccagttcgtgctcccaataagtttttttcaatattttyattggattacagtagacttcattgttggggtaagacatgatctcaggcttccattataattaaggggaagacaagatgggtcagtataggtgacttttagaacctgaaatgcctcactgggctcaaggattataatctgggatggttatcktcgagcttggcgtgaagtgtggtggccacgagaatgatccatattagaaacctaaatactagacagacaaagaaaggaagtgcacatccagggttgagaccaagagaactaggggttcaaatacagagagtaagccatcagtctctgagcaagagacaagaaataacctgaacaggaagtaaaatttaaaagaaaatttaaattaaacaaatacaattcatgtcttgtatgttgtatataaaaattagatttaagttaagaaaggataatatgcagacaacatagaccttatgcagataggctaacagccattcttcccatcgacccacacaaaaataaaagsctcaaaaataattacgtaaaatcaggatttataacaatgcctcgagttaacaacccgcctacttggttaaagttccctttaatttaaacaggtgacatgattctgaaagttattaagactacgtctgtttccttcaagctctaatttgattattgacaagtataaaagattatttcatagattgttcttaatataggctatgctggttgttcttaacataggctatgctggtccaactccycttatgacaaagctgacaaaaattcagaaaatgaaacacattttcctataacattacttttttccaatgtgtaccactgtaactgaattaacattacttggctagaaaaacatagataattttgtttgggtgggaaaaaaactagaatattagaagaaactatgagaaactatatactaaaaaagggggcaggaaatgagccacaaatcttaaggtttattattgcatccttcacttgtgagctatctgcactctagtgaagagaggtagcatataaaaaattttgccaaagaakttcaatatatgggaatcaacatatagacacctaaaaggaggtaaaacatagctcaatagtatcagcccaatttctcacatctttactgtgggacagatggagaaacaaattgacatccaaaaggtcactgattttgatattcctaggacagaaatgctcccaactgggagtaaatccacaagtcactgaagtgtggaggactaatccactttatcaccttcatcaaatatttagaaatggtaacattactcattrgaaaaccactaaggggataagaaagaaatgttggccgggcacagtgccttacgcctgtaatcccagcactttgggaggccgaggtgggcagatcacctgaggtcaggaggtcgagaccagcctgggcaacatggcaaaaccctgtctctactaaaagtacaaaaawtagccaggagtggtggcacatgcctgtaaatcccagtgactcaggaggctgaggcaggagaatcgcttgaacctgagaggcagaggttgcagtaagcggagatcgagccagtgcactccagcctgggcgacagagcaagaccccgtctcaaaaaaaaaaaaggaatgtttaggttctctggtttaatatatgcacaagctggacactttattaaaacattagaattgttttcccatgaagacaaaaacctacttgtgggaatttgagaaacacagttgatgggactatgtctccaaaagatttgcatatgtctttgtatrgaaacactaaaatctctcacacacagattacaatggaagagatctgcagtcacaggccagatgaaaatgcttggtctgccagcccagtgactgatgttttacattaaggattggactttaaagatttaccttaaagactgagttgctggcctgaaacagaataccagcgaggtttcccactggaatctcttcatcccagaaaattgtttcagggacatgracccaaaaaatcccactaaactgtatgcagctatttttggaataattaagtataagcccttctaaatgtagagttgattagtaaaataagtgttatcccaggattcactgcaaatattgttcagttaaataacccattaagcacaagcttcaaaacagcaatttctttctaataattgtaaagttttgcacaactaaacaataaaagccaaataatccactcacaataaaacctggttsgataagatacagaaggttatgctatgaaacaacagccatcacaaattaatacagttttgctccccaagtactatagttctttttcggaacattggttgcccttttaaaattttattgataaggaaaaaaaaacagctacacaagaccaggatgttgaaaggtaatctatatcctcaaaataaactaaaggktattgtaaataagttaaataagttatatcacataaactgcatttacctttcccctctacaagttatggtacccaccagaggctggaatcccaaagcaatgaaaagacaattagaattatatgccttggttttgtttttattagtcagaatgaaaaaaaaaataacctggtgttgaaagcacaatgratttgaaataacacctaagtcagagtcatagctgtgccaccttcggctgtgcaacttgggaaactcaayttatttgttgtcttgagttcctttcctataaactgcaaaatttgaatagattatctctttttttttttttttttggttggagttttgatcttgttgcccaggctggagtgcaatggagcagtctcaactcactgcaacctctgcctcccaggttcaagctatttcccctgcctcagcatccttagtagctgagattacaggtgcccaccaccatgcccacctttttttttttktgtgtatttttagtaaagacagggtatcactatgttggccaggctggtcttgaastcctgacctcaggcgatccaccagccacagcctcccgaagagctgggattacaggcatgagccaccgcgcctggctagaatagattatttctaaaagcttttcaagatctgacattcgtataatgatgagcagctattctttcctttaggaattcctggtgggctttgctrtcatttcttcataacgcctactggggacactattgctttctcccttagtatctttcttgtgacaaccgcatgcctggaggtaatcaatttcctttggtggttggtggttcataaatgggcatgggacttaagttagggactctaagatcagggattctgggaaagttcattcttaattttctgcaaaaacttctgaaaataactctgctttctttctttgaacttggctgggtgcaaaatgcgaaatctgaagtgttagtactatctctctaccactctagaggtgaagccaatgtgtggagaaaagctgagtccaaagactgtcaggaaaaacacatccagaaccacaggattaagtcagcaaggaagccagccctactccgaactttcagttgtgtgagccaacacattttctattgctccagccacttggagttgatgttttatataaccaaatagaaatctgaaatttctatttcattgtacttgaaatgtccatttctgcttttttttttttctttgtagagatggagtcttgctctgtcgcccaggctggagtgcagtggcacgatcttggctcactgcaacttctgtctcctgggttcaagcgattctcctgcctcagcctcccaagtagctgggactattggcgcatgccaccatgcctgrctaatttcttttatattttagtagrgacggggtttcactgtgttgwcaagggctagtctcaaactcctgggctcaggcaatccacccacctcagcctcccaaagtgctagagttacaggcatgagccgccgcgtccggcccatttctgcttatgtttcctctgcatccactctgcatgccgtggtagaagtcctaagagtgattcacctgcaatgtgtccacttgatctagaatctcagagggcttattttatgtgtgtacagtaaaggaaagtgacaggtttgaaattcacctgaaaatggctaaataaatgaagagaacatataacttaaaaccaaataaaattgagggagataataaacgccagtttggagtttagctctttctgtcatgacattatttgagttctgccagagatggtttttttttcccccacaaactgaaagatgtctcttttaatttctcagtaatggtgggagcaatgttacatgtctattcttagccttcaacctttattttgcttctcccttggaaactagatcatctataaaaatataagaagacagaccctcatctgtactttgcaaacaaataagaaaattaggttgttctcctttcaactgtactttttaagagagaaggaagacagtggagaacaaatcttaattgaattaaaaaccacattatttttatagctgtgagtttaaatcattttcatttaagaatttttaatgttcattcagaaagtcttatatcttaaatagatttttgtaaataagtgcattgggttaaatgttaattgacttatacgtgaagcaccaaatagttaaaaccatctgtcataagccttagataccaagaactttactaggttaccctgaatgtcttccaatggtcacttctgacattttctgacatgcttcccagaacttggggacaaaggaacatctggcaccacatataaaatttatcattacataaaccaaagatgctgagggcatcctcatraaagcagtacactgcaaagaaattgagtttcaacggtgattgatcactatttgatttgtgctgttaattcttccaagaaatttcataaacaaataaggcaaaatcacatttatataacattttatcatgtacagatccmttttacattcatggtttcatctgtcttctataagaaytctgtgagagagctagccatacccatattttgtttttagatgaaaaaaactaggcttagaaagatgaagggctctgactaggtcacacagctagtaagagtaacactagcagttctcaggtgctcttttcacctacctgatggagcctcaggttggattgaatggcttcttcagagaaccacttccaggttacaaagaaaaagaagtgatacctgatttgagttctctcggaacaggatgttcatagaccccaggaacaaagaaatgaaggcaactttaatggctggagaatgtggagaggaagaggactgaatgacagggtcaagaccaggtgaaggtagagctacccccagagaaacatgtggcctttgttaaatcactagggacaggcactaactttgaggayatttgggccaaatactgtgcgaggtgcccaaattcctcatataattttcttaaaaacttgtttcccaagtgtggaaagattcactaactctcccagatctacataaatggaaaggagaattggcatatttggttctcaagccctccctggcctcagtgtcctcactgactttgttgatttctaacagtctcttccatctctcaaattctgagttggctttagtactactgatatggtttggctgtgtccccacccaaatctcatcttgaattgtaatccccataatccccatatgtcgtgggagggacctggtgggaggtaattgaatcatgggtgcagttcccccatgctgttcttgtgattgtgagtgagttctcagaggtctgatggttttataagtgtctagcgtttcccctgctgtctctcattctctctcctgtcaccccttgaagaggtgccttccaccatgattttaagtttcctgagccctccctaaccatgcagaactgtgagtcaattaaacctcttttctttataaattaactagtgttgggcgtttcttcacagcagcatgagaacagctgaatacaactayagttcactaacgaatcaaactctcccggttgacttcattcccctgtaatgtggttctttgttaatttgaaatttaaactagtaaattgtgacgtaycttacagatcgttatggctcaacagtattagtttcctgttattgttgccattgtaaaggctttggttttatttgttttctttttggctttacgtttttctaattrtttgctaatatctaatttagatattctttatttcaccaaatcatgcatttggaaagactactcatattttgcctgttgttttgcaatccaaataacataccatcaggcaatcagaataacatcctttctttttacaaagactggccagtttttacttatcttagaaagcaactgaatatggactccagtatgaaacataaacactttttgctttgtgccaratttggaaaatttgcagcctctagttcttcaaatattttttctgccccattctctctttcatgttgggatcttaattaaatatatgttatgactgtggatattgttccactaaagcctgttcatgtttcccccaatcttttagtgtctgttcttcagactgaataatttctattaatctatttctgtttatctttttcttatgttacctctaatctgctgtkaagcccaccagtgaatttattatttgaaattttattttattgatttatttttgtcctagaatttccattaatttctttttgatcctttattttccctattaagattttccatatgtccctatatgagatttcctatgtattctttcattatgactaaagcagtctttatcttattgagcatggttataataactgctttaaaatacttctctagtaacttcaatatccaagtcatcacagagttggtcaatattaatttcttttctctagagcatgggtcatgtttgactgtttctttgtatgtatggtaatcctgcattgcatcctggacatcatgaatgatatttgtagacaccatgaattttgttatgttcccccaaatagtgttgatttgcatgtttgcttattttagcagttagctcacttaactaagtttattcccattacaagaagtgaaattcctaaacccttcattttaaaaggcttctttgaagcacatgaaaaatctgatattaatcagccacttcttctgaacttattacctgaaaaaatatcattccaccataaagcaaatcaaacagagggacctgagtagatgtttacagagmtctttagtttgtagagacttctccttcaaataataataataataataacaataaaattctctcatagctcttctgttttccaaaactaagggagttaatcaatttgttagattatgaaagcatatgcgtctataattttatcagttttcgggtaggtatttaaactctataaaccagatcatcatttaggggatttcatatgacattgtacttaaatgacttacacttcttggctgaaccaaatttgatctccaagaaaagtctttgattaatgaaactacattatttattattacacaaatcatagaaaacaaaagagtagcttttaacaaaattcgtctatgtaacacagggtgaaggactatagggaatagatccagcagacagaaaaagaaatctacattctgagttggctgcagaacagctcagacatggccaactccagcttgagctccagacagttgcactggtgctctgctgggagatttcaggacaaagtaattttgcaagagaaggatcaacttgagataggactctgaagtttttattattcacagtacttaaaggtctgggataacataytttaagaacccaaagcaagatgctcaaatcaattcttacagttggtctcaaaaatagatacacataactagatgttaggaccaggttttctcctgttgcagggtttcaataaccaataatgttccattggaaaacagctgctcacaagtcagtttataagctccttttttggttagtaaacagtcttcaataattgtagctgacccatacttaattttgctggaaattgttttgcttctttctagagaagcttctattcatcaatgtaaggaagaatgcagaacctccacagaaaggaatttaacctctaagaatcactactctagaaaatgataaaaataaaaccactgaacttgttaatagtagaagattacttaaaatgttttcatccactcattactgaatttcatgtaagagatgtgtaatatttagaactaaagaaaactttacagatcacataatcaaaccccttttgtttccaggcttggacactaaggcccaaagcagaggtttggttctgcatctacctgtgtgctagctgctccactgtgtccctaaatttacttcataaggctgttttttttttctgagatagatacggaaaagagaaagtgcaaggacatagagaatgcatatttctcactttaacagatattgccaaaatgcccatgaagatagtcatgttggtttatgcaccaacaagcatgtatgagaatgctggyttccccacagtttcatcagaacatactatcagacaaaactgattttaaatcatacccatttttgtaaaaatcatatctcattgctttaattcctcttagcactagtgaagaagctaagcaaatgttaatgtgtttaattagataactgcatttcttttctttcttttttttttttttttttgtgagatggagtttcactcttcccgcccaagctggagtgcaatggcctgatctcggctcactgcaacctctacctcccaggttcaagtggttctcctgcctcagcttcctgagtagctgggattacaggtgtccgccaccacacctggctaatttttgtatttgccagtagagacagggtttcaccatgttggccagactggtctcgaactcctgacctcaggtgatctgcccacctcggcctcccaaa

SEQ ID NO: 10056 - DNA, 40000 bp, Homo sapiens
  misc_feature (9880)..(9880): n is a, c, g, or t
  misc_feature (34209)..(34209): n is a, c, g, or t
acttagtttggctggatatgaaattctgggtggttgaaacttcttttctttgagaacgttgaatattggcctccattctcttctggcttgtagcgtttctgcaggcagatctgctgttagtctgatgggcttccstttgtggataacccgacctttctctttggctgcccttaacattttttccttaatttcaaccttggtgaatctgatgattatgtgcctttgggttgctcttctcaaggagtatttttgtggtgttctttgtgtttcctgaatttgaatgttggcatgtcttgctagggtggggaagttctcctggataatatcctgaagagtrttttccaacttggttccattctccccgtcacttttaggtacaccaatcaaatgtagatttggtcttttcacatagtcccacatttcttggaggctttgtttgttgctttttattcttttttctctaatcttgtcttctgtctttatttcattaagttgatcttcagtcactgatatctttcttccacttgattgattcagctattgatacttatgtttttcagctccatcaggtcatttgtgttcttctctacatcggttattctagttagcaattcaactatccttttttcaaggttcttagcttccttgcattgggttagaacatgctcctttagcttggaggagtttgttattacccaccttctgaagcctactgctggcagtttgtcaaactcattctccatccagttttgttcccttgctggcaaggagttgtgatcctttggaggaaaagaggcattctggtttttggaattttcaggctttttgtgctggtttttccccatctttgtggatttctctatctttcgtctttgatgttggtgacctttggatggggtctttgagtagatgtgctaatcctttctgtttgtttcctgtttgtttcttttccttctaacagtcaggactctctgctgccagtctgatagagtttgctggaggtccgctcccaaacttgtttgcctggatatcactagtgraggctgcagagcagcaaagattgctgcctgttytttcctctgggagcttcgagccagaggggcacctgccagatgccagccagagctctcctgtatgaggtgttttttggcccctactgggagttctctcccagtcagtatacatgggggtcagggactcacttgagagccagtctgaccctttgcagaactcgaactctgtgctgggagttccggtgttcttttcagagccaccaggcagggacgtttaagtctgctataagcccctgactggggctgctgccttttttacagagatgccctgtccagagaggagaaatatggcagtctggcctcagcagccttgctgagctgcagaagtctccacccagttcgaacttcccagtggctttgtttacactgtgaccgtaaaaccacctactcaagcctcagcaatggtggatgcacctacccmaccaagctcgaatgccccaggtggatctcagactgctgctgtgctggcagtgagaatttcaagccagtggatcttagtttcctgggccccataggggtgggacccgcccagccagatcacttggctcccttgcttcaggaacccttttgaggggagtgaacggttctgtcttgctggcattccaggcgccactggggtatggaaaaaaaaaagagctcctgcagctagttcagtgtctgcccaattggccacccagttttgtgcttgaaacccagggccctggtggggtaggcaccggagtggatctcctggtttgcaggttgcgaagactgtgggacaagcacggtatctgtgccggagttcctcaggctcagaccctcacagcttcccttgggtaggggagaaaattccccgaccccttgtgcttcctgggtgaggcaacgcccagccctgctttggcagctctccatgggctgcacctactgtccaaccagttccagtgagatgaactgggtacctcagttggaaatgcagaaatcacccaccttctgtgttgatcttgctgggagctgtagaccagagctgttcctatttggctatcttgaatccatttctcgaccaatgtgttttcaatgcaaagaaaagatttgcctataaggcacttttaaaaccaactgtacttatattagtctattttatgcctcctctcactgttctaagcactgtaagaaataaaaaagtagagcaaatggtcatttcttacagaatccttccaatcctcctgtgaacggcaggactaacaaaacgtatgaagcaattaggaaagaagtactaaattgttaaaaaaatatatatatactgggtcaatgtaccaaagagctggagggtccaggaaagactttatgttgggattcctactggagcttgcctttgagcaacgagtaggactggaacatgcagggaagaggaaggagggcagattatgtggaaccaacagcatgagaaaaggacttggcctgtgagctaatcatatctgactcttgggaattcttgggaaatttgattgaatggaccatggttttacaggaccaacaggttcttatgcccactgtacagtaataaaccaatacactgaagggtttgcagcagagaaagagtttaataatcacagggtggctgagtgagaagatgggaggagaccctcaaatccatctcccgaaggagttcrgagctggagtttttaagggaatcatggagggcaagaggctagaaaattggggttattgattggccagggtaaggggtataaaatcatcaggatgtgaaaactgcattctttggtgagtcagctccttgtggggtccttcaactgacattagtagttttgctggtatgtaggagttgaaagaatatctcaaagggaaaacttaacctttcataatgttcaagttgttatctatagagcagttaagggagctataatccagagtctatgtgattctagaacaacaggcaccacacaactatgaggaagcaggtcagaaggcaagctgacctaatgattaatgctgaatgtgctgcaagctcagtttattttataaagtttataaggatagtttcattgggagttttttttttttttttttttttttttgacggagtttcgctcttgttacccaggctggaataaaatggcacgatcttagctcactgcaacctctgcctcccgggttcaagcaatctcctgcctcagcctcctgagtagctgggattataggtgcccgctaccatgcccggctaattttttgtatttttggtagagatggggtttcaccatgttggccaggctggtcgcgatctcctgatctcaggtaatccacctgccttggcctcccaaagtgctgggattacaggcatgagccaccatgcctggcctcactgggagattcttaacagccaaacagaagaatttttcaaatgcagtagacaatagaaaattaatattgggcttttgaacatcagaatgatgagattaaaaggatgcttttgaaggttactatcagcatttcgtaggcgaaagtatgtagatacatattagtggcaagggaacaggtagaattgacttaggtcagccttgttagcaagcacatggggacctcagcagggagctggtcaaggccaaaactgggtggagagctactcacagtggcaaagattagggtgtgggaagtgagagggtggccccagtgagatcagacgggggctccaaaagcagagcacccaaaagacacagcaagcttgggcatgataccagcaactgccagcatcagaagagtggatttgatgggcagaaggcaatgataggaaatctaggtaatgatgcagaagagttgaacagatgtgataatgcaggaggtgcaagagaaaccagcttctcctcaggaaaggacatagacactaagactagcaagcttctagggtcttcacatcacctggggctcagggtagggccgcagtctaaatgggtacaagggcacagagctgatagaatatagagaagaaggcgaatcaaaggaaaaagctagtctaatggctaacataagagggaggatcagagggtgacaacccaaggaatgcccagacacccgaggctgggtcctcatatggcagaccttgggcttagccacgttggtggtaaaggagaaacagagggcatatggaaccaccactgtgggtagctgttccattgctgtggttaatttaaaatctgcaccaggttgcagattcaaaggttttgagcctgcttttgttaggrttggttgagaagctagcaagtttctttgagaatagccaaggaaggggaggtgagagacagaaaataggggttgacccttgaagctgatgcaatactgcaggtagcaacaacctataatttaactttttgatattttagcctactgatatatgttttgaagaagtacttatgcttaaggagtagaggaaagacaaaacttgggaaaacttgagaggtgtacacattcaacttcagtataattttgaataactctcatgtttaggaatgggattttcttatttatttacatttctgattacttgagttatttagaaaacatttttgggcataggtttttcctacatctgtttttcttgggttagcttaaatttcctgccttatcattaatataaattaatatttcttcaataattgaagactgcacattactcacagtcattactctttactgaagaaatagaaaatttagttttagacaatactttattaactccaggacaaacatatttgtaaatgaggccccaattttagcttctctcatctattgtaagaattcagtacatcgtaccgatgatgttgagggtcccatttaactcgaagagactttgattccatggtttccttacaagtctagggcacatgcccataagaattaaaaaggttactcaaagattttgcttgtttgaatatatattaactattaaactttgcataaatagcattttagggtgtttattaaaatttccatgtattacccaaattctgtaatcaaacagaggaacgcacaaagagtcttataagtgagtcagctaatggatggagatttctgtttcaaataaataaaaggagaaaatctaggcttttttcatgtccacataatgtgaccaaaactcttctagctgtttsacacataaacgtttatattaaattacagcagttgtgcgaggtattttgtctcttttgtggaaatgaagaatcaaagattcaaagacatatattaattggttactaagatagctgatagtacagctaatattataatattaacagctaatgcgccgtaatacarctgtacggtaatatagctggcacagccagaatttaccttaaactctaattctaaaactcatttttgttttcactgtccctttcagaaatatgtctgcatatataaactgttataaaagaaatagtcataatccgttttttccggatactgcagttgtgaagtttacatcagtatatattgctgagtcaataaaataagtttaaccccatagattaacccaaactttttaaaatgtaataatttagtatttccccaaataaaagtcagctgagaagttgccctagtctagtgataaccttatgagagggatggcatttaagtttcgccttctatgccaggtcttatcaattgatagtggctgcctggatacctgcatggagaaagaatctgaggtcatgtctcaagtcagcaggaaggaattctaggatccacgagagatgaaggccatggtcattgtaggggaaagtagcagctcaagtattgaccagagctgccacaggtattagtaaagtagcatgtcttttggaatgttactgctcaaaactgtcttctgcactcaaaattacctcaatcagtcttggttttgaggcttcgtgtttcctaagcttgccagatcataagaatcattgaagataatcatttaaaaatgttgttttccaagcctcttatctgaagattcgggaagtcaagagtgggaagccaagaatttgatgacctggcaagtttgggaatgtatgagttgccagtgttttcagaaagctcctgtgaaagataaaattcttattaatgaggaataatttaagacataattttcctagtagagacttgagcactaacaagcaaggagcaaacaaaagatcaatttgaggttaggtgcagtggtgcactcccaaaatcccagagctttgggaggctgaggcaggaggattactgaagcccaggatttcaaaaccagtctgggcagcatagtgataccgcatctctctacaaaagaaaataatttaaaaattagccaggcatggtgatagtcctgtggtcccagctactcaaggggctgaggtgggaggattgtttgagtccaggagttcggggctgcagtaagccctgacctacaccaatgcatgccaacttggacaatagagtsagaccctgtcttgaaaaaaattaaaataaaaaaggtcaatttgatggtgactggagatagagaagtttagagcatgtgatagcttacctacattatctgaatctgccccagcttgcggacttaatctcattctgctgtgtctcttgctcactctactccagccacactgaacttctttatgttgctgtaattcatgcatgttcccacctcaaagcctttgctcttgctgttcttcccatatcttaatatgcctggagaccttcacagggctagtttttctaatccttccttaactggtaggttattaagtggaaaagccaaatggtaagtgtattagtctgttctcacactgctaataaagacatacccaatactgggtaatttataaaggaaagaggtttaattgactcacagttctgcatggctggggaggtctcacaatcatggtggaaagtgaatgaggagcaaagtcccatcttacatggcagcaggcaagagaacttgtgcagggaaactcccatttataaaaccatcagatcttatgacacttattcattaccacaagaacagtatgggggaaccgcccccatgattcaagtatctccacctggccccacccttgacccatggagattagtacaattcaaggtgagatttgggtggggacatggccaaaccatatcagtaagcaaggacgaagaagaaaagcacaattttcagtctgtgaaacagacactactcattgcctattccacaaccagagactctttcatgttgcaaaagggaggctcccttcccatgccctaagcagtgagttatgccagtcattacatagcatttgcaatgaaatcaagatgaaaaaaattaatggttttcctagaaaagaaagaaagagaatgatgcatataaaaacagaagaagaaagtcactagttgcataataattaatcaggataaaatgtgttatttaaaaccattcaatcacygccttttcttttctcattcttacagggtactcataagtataatcatctgactgtatctttgaaatagaattaggatttgggaagcatcttaataaacactaactgaagccactctgaagaaaacatcattaatcatgtcattgataagagattctgtcagcattacatttagaaatttatacccagactaaattcccgtaaacaactcmcgtgtgcattagggattagaaaaaaatgaaggcttctttgtttactataacactaaaaaaatattgtttaggcccaatttctcaaaatggaaaccacccaggcacatgtagtttcccagttgcagaatctttccagtacagttcagtttgcacaatactgctgaattctctttagaaagtactgttttcgcccagtgctgtggctgatgcctgtaatcccagcactttggggaggccaatgggggcacactgcttgaggccaggagtttgagaccagcctgggcaacgtggtgaaacactgtctctactaaaaatacaaaaaattagccaggtgcggtggcacacacctgtaattccatctacgccagaggctgaggcatgagaatcgcttgaaccagagaggcagaggcttgaaccggagaggcagaggtttcagtgagccaagattgggccactgcattccaggctaggcaacagagcaaaactctgtctcaaaaaaaaaataaaaataaaaaaaatgaaagtagttttcattgcatcagccatctactgaaaatccacttaaaaagctacaagggcttctcattgcttttttaaataaatgaaaaatccttaggctggtattttagatgcctacttagttattcctaggtttgcctatcattaggtaaggtttatatcaattttaaaaaatcaaccaaagcacaatagctatttagtactctatcagtctatttagacgctattctttctttctgctgagatggttgactagacctatgagtcacacacttaatttcttcaggaaaaggttatctagccacacccttggccttctatccagagcatgattttctaacaatgaatttcctgattttcacattctttgccatctggataggctaagaaactcaacaaatcatcaagttctggttcctgtttactttattccttccacatttatcactttcctctctgcttttactataagcagcaaggaggaaccaggctgcatgttccacacttagcttggaaatctcagctaaatatccaagttaatcacttagaagttctgccttccacccaacagtaaaacacaattcattcatgttttctgccactttataacaaggacagcctttccttcaatttcaaataacatacccttcattttcttttgagacctcactggaggcatatttaatgttgatattcctaccaacaatctgcgaggacacatacattctctaagatgagagaagcatctcttccttctgagccctcaccagaatctcttttaacaactctatttctaccaacagtctcttcaaagcaatttaggctttttctttcatatacctcagcattcattcagcctctaccattacccaattccaaggccacttccacattcctacatatttgttatagcaggactccacttcctgctaccagaatctgtattagtttcctggggggsgggggagcagtaacaaattactataaactgggtagcttgaaacaacagaaatttattctctggaggctaaaagtccaaagtcaaggtgtcagcagggttggttgcttatggagacgctaagggagagtctatttcctagcttctagcagctgctggcagtccttggcatttcttggcttgtagacgtgtcactctaatctctgcctccatcatcaatgactttctcccttgtgtctctgtctctccaaccttcttttgcctattcattcctataatgatatttaaggcccaccctaaatccagcattacctcacctcaaaatcctaaacttatttacatctgtaaagatcttttatccaaataaggtcacattcacaggttctgggggttgtgatttggatatatccttttgggggccactattcagcctactatcccttttgctccccaaatttcatgtctgtccacatataaaacatgttcacctcatctcaacatctccaaaagtctcagccyatgataacatcagcactaagtccaaaatctcacctaaatattatcagctccaaagcctcagatcttgtcatctaaatcagatatgggtgagactatgggtataaattatcctggggcagaaattcctctctatctctggatcacgaacayagaaaacaagttatctanttccaaagtaaaagagtgggacaggcattgcgtatccttatgcatgaattgggtttacaatatatatccttatacattcctattcaaaaagagagaaattggaaggaataaaaaggttgtcagtcccaactctgaaatctagtaggagaaatttaattaagtttcaagacctaagactaattatatgtggcttgatgcttgctatagacaaaatgtttgtgtctccccaaaattcctrtgttgaaatcctaacccctactatgatggtattaggaggtggaaactttggtgggcgattaggtcataagggtggagcccccatgaatgggattagtgcccttataaaagagacccccaagagttctctaacccctctgtcatatgaagacagtgaaaagacagctgtccatgaaccagtaagtgggccctcaccaggcacagaatcttctagcaccttgatcttgcacttttcatcctttagaactgtcagacgtaaatttctgttgcttataagctaygcagtctatggtagtttatcacagcagtctgrgtggactaagatgatgctccacttgctggggccacagctctagcctctgagtctgcagcaatggctccattagcctctgggcctatggcggcagctcagtctgcttctgggctgtcctcagcagccccagctggcctctgtgccactctgcccttagagtcattcatcctctctcaaagggtagtacacatttgtagctgagtatcagtctgtttctggctgtagaatcacagaagtcctgtttcaatcttatcttttatgagttctaagttttatatccttcttaaaaaggcctttttggacaggtgcggtggctcacacctgtaatcccagaactttgggaggctgagtcgggaggatttcttgagtccagcagtgcaagacctccctggccaacatggtgaaaccccatctctactaaaaatacaaaaattaaccaggtgtggtggcatgcgcctgtaatcccagctactcagaaggattgcttgatccygaaggagatggaggatgcagtgagccgagatygctagccactgcactccagcctaggtgacagagggataccctgtttcaaaaaaaaaaaaaaaaaaggcctttttaactataaaggtatatgtgattccacattttcttctcatgctttacaattctgttttttataaccattcctagggaatttattctcgtacatcatttaaggatgagataaagctgtggtttcccaatcagtagctagttatctggccctattgatcctattgattgatcaatgccttatttatctataatatgccagttttatcatatatatgaatatttgaggtaatgccttttttttttttttttaaagagatgaggtcttgctatgttgcccaggctggtctcttaacttctgggttcaagtgattctctcatctcagcatttcagcctctggagtagctgggactacaggcatgtaccacgattcctgagttgatttaatgacattttaacagaatcctccctccytctctctctctttctctaaatatgggtgtgagctctcagccaatgggaattcgtgtgtagtgtgacgaactgtataaaacagttctcaggcaataagcataagaacactatagcctcagctaggaggcccactgcttagctaccatagggtgaatatgttctgcagcatgtgttatttactattcaatgggcygtcttttgtttattttgtattttgtagagaagtttgtcccaaatgactgattaagcatgtggaaataataatgttgaatatgcttcatataagcaagaaaatagtgttacaatgggtcttaaaartagaagccttggagaggcttttgaagaggcactttccaggatrcaatcaaggaagcagaaggttaagaccatggagaaactagatattgrtaagtgctaactgacattaaaaaggccatcctaagcatcactgtgatctagattgaccaacaattgtatgaagatagctaggaaaaaactaaggtagkagtctcatccccacttcggagactctgagtagaccgcagamgtggttgccaaggcaggatatcaggaaagcatctccatagggactttgtgatagcaattctctgatagagttgattcagttatgtacctctttccagtaacacagtccctccactaaatagggtatgtgtgtactaaattcctgtaagtatacatgagtctgtttcaggaatatacattctgcaatattaatttatgtgtccattcctgcatcaataccacattttaatcactgtagctttgaaatgttttaatgtattgtgacacagaaaagatsttgaatatttttgcttatttacttttccagatgaactttaaaataagcttgtgtcaaattctcttatcttaaaaatccctttggccaggtacagtgcctcacacctataatctcagcactttgggaggccgagaaggacagaccgcttgaggtcaagagttgaagaccagcaaggccaacatrgtgaaatcccgtttctactgaaaaaaaaaatacaaaaattagcaggkcgtcrtagcagacacctataatcccagctagtggggaggctgacgcaggggaatcacttgaacccaggaggcggaggtgcagtgagccaagattgggccrctaccctccagcttgggtgacagagggagactctgacaaaaaaaaaaaaaaaaaaaatccctttaagattttgattaggttcacactgacttgataggaaactatcatgtttgcaatattgttcttcctatccaagtttataatgtacttattcaggtattttctatatcctttggcaacattttttcatacaaatcctacagttttgggatttattactggtcatgttgtagattttattgttttaggctgtggaaacatttctttcaattatgttttaaaattatattttactggtatttaggaaagatgtcattttatcttacatactttcactttactgacctstcttatgaattctgagtttttcttttgattgttggattttttgttggcaatcatgacatcttcaaataatgaaagttttggctctttccttctggtattgatacctctctttttttccttgcctctttcccattggtttagaaatttaatgggaatgttttcaatgtttcatcattaagtatgtccttaattaggtctataccagattttctctagcaggtcaagcaaggtttgttctattcctattttactgatagttttattttttcataatattgttaagatgatagtagtaatgctactatactatatatagtctacatacatttctttaagaaatttattaagactttttatgacctattatgtattttttctttttaaaaaatctttaaaacctgtgaaacctgttatatttgcttcatgcatacttgaaatgtaaattatgtttaatttctatattaagttgtgataatggagtcatttaaaccctataataccttttcttgataacttatgagagttttatcaaaatttccttctttgattatgatgattgtgcgtttccatttcttcttatattctcgctgattcacttttctttttctatttccatgttgagttgttaggtagataaagattcatgatgattataacttattggtgggtttaatcagcaaagcacattccacttttgttttgactaaatctatcattgcttgtttctttttgttaccatttactttgtatattttctctatctctttataccaaactttttagatgtgtgtcctataaatagcatattattaggtattttagctacccaatctaataatgtatcttttacaaaattaacctattgacttttgtgatagtatatattgggtactttatctttgctatgttttctttctttatttcctatcttcagctcaatttgttgagttttgcttattcccccccacccccctgctccaccttctttttctttctaggagtttggaagttatttatcccattcttttcttctctggcttgctccttgcccttgaattttagaaaataccttatttaaactcaggtttttctataatgtgaatgaktgttgttaataacctccatccaaaactagacaagatccttaataaatttacactaaccctaactcctcccagcctcaaaattgcttcatgatgtggcccaattttatgtgagttttaccttaataacggccataatctttacagtaacttcataaaaattatttttctgtcagtgtcacttctttttttgcttaccaccatctcttttattctatgtgttcttcttggctgtatatattttttgttttcagtatctccaagaagtactttcaggaaacactagtggtagtagtttctgagtcccttaatattgtcttcatatgtcaatgatagttyggctaagcacagaaatttaggtgaaaaataatattcctttagaactgtgaggaaattattccattttgcttacagcccaagcgttcaaatgaaaaatttaaagcaatctgaatattgtttctttaaaactttcttgtttttgttttactctttagaaattcttagtgattttttcttggagatcagaaatttcacatgataaatctaggtatggtgctctgcaccacccctctccaccccacacatatatgcagatattttattggttttccctaaaaaggacaataacaacattttaaaaatataaatctgaggtcatttgaggggccaacaaaatacaaggaagggagataaaaattaaatgtttaaatttaacaaaagtcactacaatgtcacctaacatctactacaatggtggtaataaactaaggaagattaagttacagcaaaaataactaatataaatattagagattacatagcaaaaagtgggtttgccttccagaagactatggtaccctgaccatttggggcccagtaggatatttagcaatgaaaaggtcaagatgggtggaggtaaagctaaatcaaaaggaacaggtataactgagaatccaagatagatagtstccaaatagatggtgacagatcaatcttcctcctctcaagaagcatttactgtacttgttgcttcctctcaagatcccaatggctgctcaagctgaaagttgcctattcctgctgttgagggtgttcagcaaccagaattaattttgtggtggctcagggctcttgctgcaactgagcatcgaacttggagaatttgtgacacaaagtgggggtttggggcagggggtagattgggtggctttattgctagttgttctgaaaaaagaaaactccgaagcatttacatgtaagctttccaaccactttcaaacacctctacaaaacaccctcagaagtctgaaatctttgcagcagaagggctgtagttaaagctgctgggctaacaaaatcatcaaagaagccagatgagacaacccagtcaggaaatcctagtgattattcttaacctgtttttccctaatttaaggtaaactcttatatacctgatgtgggatgtagaaagttacactggagcaagctggatcttctgctgaacttttaatcaaacctaaraaaaaataaaggcaaggtttgtttttattaatcttattttattttaaaatagcataacctagaagttattctgttataaaggaacatggctgaacaggtaggaaacagattccccattatgagttctccttatggcttctgcaaggatcatggagatgtcaattactcgtattttggagcaatgcttcatcttmtcatcttgaggtatggtattggtgactaccactgcttcaaagcatgcagtgttgatgcgagaaatggctgggccagaaaagattccatgagtcaagatagcataaactctggttgctccagctgagagaagtttgtcagctgcgaggcagattgtaacacaagtgtctgccatgtcatctacaaggatagccacacgatcattcacatctcccactagcactatgcagtccacttcattggccttcttccgttctttatgaatcaaagcaaagtccacattcaactggtctgcaatggaggtcactcttttagctccaccagcatctggcgagacaataatgcagttcttccactcagggatattctcccttatccacttcaggacagttggctctgcatacaagttgtctactgggatatcaaaaaagccctgaatttgagaagcatgtaggtccatggtgatgatatgatccgcacctgctatagagagcatatttgcaacaagcttggcrgagattggggaccggctcttatccttcttatcctgtcgggcataagggaagcatgggatgactgcagtaactcggctagctgaagcaatcttgcaggcattaatcatgatcaaaagctccattagactgtcgttgatttcgccmcaaccactctgaacgatgtagacatcctctccacgcacactytcatcratttccacgcaggtctcctggttgctgaayttcttagtcaccaccttgcctagctccaggcccaggcggtcagcaattttctgggataagtcctggtgggagctgccgctgaagattttgatattcggcgtcttggccaactaccagaggcactccgtcgagcgatccagctgccgctgaggctggaacggaagtgaagcacagactaatggcttccggttgttactcaaccgttagggtcccttcccccttgcggcgcgcggtcccaaattgaccctgggtctcttgaaaaaatttctgcttgccacctcccacttcacacttttagactaaataatcaagtatttacagtgtatggagtttttttctattagcacctatattagtttcacagggctatttaaacaaatttgaatgcataaaaacataaaactacaaagcaaaacccaagtttaaaaggaaaattacctactaaagtatatgcaaaagattattttagaaagaatttccccaatgaagtgagaaaaagacaataaaatagaaagttgaaaaatggcataaataggcaatcacagtaaaaaaaaaaatggataagaaacgtgaaacaatggaagtaatcaagaaaacgctattttcacacatcaagtagccaaaatgttaagatagataaggtcttctattcggatggaatgtataaatatgtagattttgcatgggtaattttgcacataaactttgactcatcatgtatacttctaggaatctatttcagagaaattttcacaagcaccccaaatatatatggctacatagtagtgtwgctgtattcattcatgcaataaatattttgtgaacacctcctatatgtcaggtattataytacttctagggtataaaaattgtgcatgacaartagtaattgccctagaattgtttataaaagcaaaatatgggaaccaacaaatgttcatcaataggtaaattaccaaataatttattgtatatacatatgcgaccattaaatagattaagtgtaatcatgtggaaatgtctcctaggtatttttttaaaggtaaagtcagtcacaaaaatatcatagtattatatttatgtatttaagattatgtgatactgaaagcatccaattagcatggaagtcctctttataataattacctttggagaggggagtaggttgtgagagttgagaatgaaggaggactgttacattttactgctatcagtgtggcatttgaacatttattacttttgtagtaaaaawgatgaacaaaatgtatttggtaattaaatgtttgttagcaaattttaagtatacagcttctatggcgtatcggggctggaaatagtgaggaaggaggcagaaaggaccatagatgccaatgatttcataaaaataatggaggcatcagatacagatcaaccatttatatcttgctaattgtgtgcctgacatttggataccagggtgtttttatttagcctaaaaccaaatcatcatttttttcatattgtaarataaccaaataawttaagagattttctcaccacacttctgggcttccttaatgtgttgggttcatgaataggataaactcagaaatgggataagaaatggggtaggcaacaaagatgggtaagrttcagcaatgtctgtgaaaaacattacttagctataaaaaggtagttttatatattgaatgaggtattattataaactcaaataaacagctatgttttaaattttacaccaaaatggcttgctgctgatccaatcatttctctcctggcatcaacatggttttctctctagttcagcctcttcctggttgacagtgtatgccagcccatttctgtccataacccttcattcatattctttttatcacacacacaaaaaatcaacagacctacctataccacataattctcacccttagccagactacataaagtgatttctaaaaatcccgtggcttaatttagaagcactaatagtatttgtagtttcaatttatttttctcttactattctgtgtgtcacacatttttcagtgttktttaaaaaacaaaacagattctaaacaggtttaatattacctaaataggattaaatgctaatgtgaacatttaaaacccatacttggttgcattttccttgaggtgttaaggaggagaaatttttgtcttgctgctatttttgtttcaagctctagctgttgctacatgttatagttccagaaatttgtctacagtcataaaatgttaaagatagatatggccttagagaccacctagtctgattatcacacttcactgacagggaactaaggctcagagaaatgaagyaacctgcctgggatctatcagctaaatagaggcagagtgtggattagaatgtgggactcctgaatttccaagtagggccttatcaactatacactttcaagccttttctttgagatttatcagaataaaggaaaaatttaaaagtactacaaaatatttgcwttttttttctcttttaccaagcaactacaataaagaacawaatcccaaacatgagactggaaagttttttgctttcaaaacaaaaacttttcccagaaagaaatgaaccattagtagtgtcagggaagtagctttgttattctgacatttctgttacctacctggtctattgcaaggggatttagcgtctgtttactttggtctctgtaggttgagagggacatctgttttatcattggctgcatttcacaagttacaggtaggaatgatgcctattgaatagtatcttctattaaggacattgtttcttaaattattcyggaaacaaaaattgcgatatagagacaatgccttatctttctccttcccaaggcaagcatatttaaatgtcatctctatggatctgtgagaattactgtattttgaaggtcttttgagtcaatacccagaatatatatatatatatatatatatayacacacacacacatatatataaaaccttggtaatagtttcttgctttaccgattattcttttacccttcacaattccaacataaataattcaaagagagctctgatgcagcttatcagctagagaaaaaagaaattcagtcagttctttcagaaagtgaagaaaaatggatgttgtattttaaatgaaataaatgctttcactaaacatacttgcagttgacaaaatgctagatgtttaggtggcaattatagttttttgataaactgtcaaatcttgtcacaacacatgttacaaacaaggacagatttagatgtcctttatgacagctttgtgtaggttgggaatgtttggcagttaatttcaaacgaggaacatatttttctttccagcagttatctgctggtttattaggcagagtttctttgtgcctttaatcttaactcatttgactcacagttccagatcattattgtaacattactttacctcatttattttattcataataatcatccacaatactttgggwaaacaatttcctacaaagcttcacattgatataaatgctttaaggtttgttttgtgattgtttatgattaaagttgactactctgagtgtttactgagcttttggttggaaatctgtcgttttawacaataaatgtgtatatagcaactaaataaagctgagtgaaacaaatagaataggagaaatttttgtgattcagaaatgtggctttaattctgagtgttatgttagactcatgagggtatttttgaaatgtactttggaattaaaaaaaactttctggtgaacttaaaaatcttagcataaaataataatcttggaatgacagcaaggttacacgagctgaatatgtcattgtaaaagacaaacgaacatatagagaggttccataastagtaaattgcaaataagaaaatatcttttcaatatttctgtgaaatattttaaagtatttcaaagcagtttttgataatgaatattttgtttctcacatgcaatgttagtctcatgaaattaaaaaaagatatgtttattttgacaaaatgcaagcttcatttacgctatttaaacccctttaaaaagacagtttttccctcctcaaaattggccatttatttaattctaacaataaacattgagactacttgtgtactcgcctatgggaaaattgagtaccgtttgttttggaatggttctgcaattctcaaacttcagagcatcaggatcactgggaggatttgttagaatacagattcccaagctccatcttcagagtttctcatcagtaggcctggggtggaggcccagagtttgtgtttctaacaagacactagacaagactgatgctgttgttctgttgatacgtttgagaatctatttcattttatctaaatttattggctagatgctttccataagatcctcctattatatttttagtgtctgcaacatctttagtacaattccctttgtcatttctggtattagatttgtgtaattattctctttctttttgatcaatttcaccagcagtctattaatttcatcagccctttctaaaaaacctaatgttttgatgtatacctaatggttgatgtatcatacttcagtggctgcttgtttttaactttattgacttcaagattatttactatttactttcatctcaactttgagtttattttgctgtcccttttctaatttgaaatgtgtgcttagcttactrtttatcactagtaaagctatatatttttcctctaagtactattttacctgaagttttatgtgtagtatttttgttattgttcagataaggccagtttccaatttggatagcaatttcttcatttcaggggttattttaaagtttatttcttaatttacaaatacacggggcatttctagatatttcgttgttttgggtttcttgcttaatcacacaccaaaggacatgttctttgtgattttagtcctttgaaatctgctgcaactgttcttatggtcctccatggtcacttttcataaatattttgtgtgtgctgaagaagaaatgtactcttgagtggataggtgcgatatacatattcatgcattagatctgggatctggtttgtttgtagtattatttacatcttctatagctttactgawttttttgtctgctttatyaaatactgaaagaaataggtttccacagtgactgttggtatatatcgatttctccttacatagccctttgttatttctctttatattttgaggctcagtagttaccgaaatttaatttgtcataactttttgaggaactatgatattattttaaggtaacagttattttttttctagtaatgccttttgccttaaattctattttgtctggtgattattttattatattagctatctttttagatagcatttggtttattttcttattttttagtttcaatcttattgcatgtttatgtattaaatgtgttgcttataaataggatatggttagattttattgtatctcctaatcaaagttataagttaatgaatacctttcccctcctctcagaaaatgcaragatcttcatgtcatttaacttcatttattccctcctgatataaatagtagcagccagctattatcattttgtctcttttctttcttcctttcttcttttctttcttttacttccacattcacattattattattaatattttatacaatcagtgtccctttagatatatgtacctatgttttactgtctttggtcctcttttattatcttaaggcttttatttggcatgacttttcttctgcttaaagtatatccttacaaattttctaggtgctactagtgaaamactccattttttcctttttttctgataacatcttcattccaccctcattctttttattttattttattttacatcaatagtttttggggaacaggtggttttgattacatggataaattctttagtggtgatttctgagattttggtgttcccgtcacctgagcagtgtacactgtacccgatgggtagtccttttatcccttacgcccccttccactctyccccgactccccaaaatccatgacagcattcttatgcctttgtgtcctcatagtttagctcccacttataagtgacaacataggatatttgttttttccattcctgagttactttacatagaacaatcatctccaactccatgcaggttgctgtgagtgccattatctcattcctttttatggctgagtagtactccatggtgtgtgcatgtgtatatgtatcacatttgctttacccacctattgattgatgggcatttaggatggttccatatatttgcaattgcaaattacgctgccattaacatgtgtgtgcaagtgtctttttcatatgacttctttaactctgggtagatgcccagtagtgggattgctcaatcaaatggtagttctacttttggttctttaaggagtctccgtactgttttccatggtagttatactagtttacattcctatcagcagtgtaaaagcattcccttttcaccacatctatgccaacatctattattttcggattttgaaattatgaccattcttgtaagagtaaggttgtatctcattgtggttttaatttgcatttccctgataattggtaatgttaagaattttttcatatgtttcttagccatttgtatatcttcttttgagaatcgtctatccatgtccttagcccactatttgacgggattagttgtttcattcttgcagatttgtttgagttccttgtagattctggatattggttctttgtcggatgcatagtttgcagatattttctctatggaatgtctgtttactctgctgattatttcttttgctgtgcagatgctttttagtttaattaggttccgtttatttttgtttttgtggcatttgcttttgtgttcttggtcatgaactctttgcctaagccaatgtctagaacagtttttctgatgttatcttccagaatttgtatggcttcaggtcttagatttaagtctttgctccatcttgagttgatgtttgtataaggtgagagataaggattcggtttcattcttctacgtgtggctcaccaattatcccaggaccatttgttgaatagggtgtcctttccccactctgtgtttttgtatgctttgtcaaagatcagttggctgttaccaaactattccctgtaatacggtttaaagtcaggtaatttaatggatccaaatttatcctttttgcttttgttatgtgggctcttttttggttccacatgaattttaggattgttttttctagctctgtgaagaatgatgatgatattttggtgggaattkcattgaatctgtagattgcttttgaagtgtggtcatttttacaatattgattatgcccatccatgagcatgggatgtgtttccatttgtttgtttgtctgtgatttctttcagcagtgtttcacagttttccttgtagagatctttcacctccttgattaggtatattgctaaattatttttttttatttttttcagctagtgtaaaaagggttgagttcctgatttgaatctcagctttgttgttggtggtgtatagcagtgttattcatttgtgtacattaattttgtatcctaaaactttactgaattcatttatcagatytaggagctttttgaatgagtctttgtgatcttctaggtatacaatcttatcggtaaacagccacagtttagcttcctctttactgatttggatgccctttatttctttctcttgtctgattgctctgactaggacttccagtactatgttaaatagaagtggtgaaagtgggcatccttgtcttgttccagttctcagggaaaatgctttcaacttttcyctttcagtataatagatgacttttattaccttgaggtatttctcatctatgccagtttcgctgagggttttaatcatgaagggatgctggattttgacagatgctttttctgtgtctatttagatgatcatttgatttttgtttttaattctgtttatgcaatgtaccacatttgttgacttgtgtatgttaaaccatccctgcatccctggtatgaaaccacttgatcatggtgtactatctttttgatataccgttggattcagatagctagtattttgttgaggattttcgcatttatgttcatcagtgatattggcctgtagttttcyttttttgttttgttctgttatgtaacagaatatgtttattctgtatcttttaattggagcatttaggctcactgcaacctctgcttcctgagttcaagtgattctcctgcctcagcctcccgagtagctggcactacaggcgcctgccaccacgaccggctaatttttgtatttttagtagagacgggatttcactatgttggccatgctggtctggaactcctgacctcaggtgatctgcccactttggcctcgcaaagtgttgggattacaggcgtgagccactgcggccggcctgaaactattattattattattattattawttatttwtttatttatttatttatttatttatttattttttgagacggagtctcgctccttagccctggctggagtgcagtggcgcgatatcggctcactgcaagctccacctcccgggttcacgccattctcctgcctcagcctctccgagtagctggcactacaggcgcccgcccccacgcccggctaatcgtattttcagtagagactgggtttcaccgtggtctcgatcgatctcctgacctcgtgatctgcccacctcggcctcccaaagtgctgggattacaagcctgagccaccgctcccagcctgagcctgaaactatttgtaaaatacttaatataagagctgttctataagatgtgtctggtaattccaatatctgaaaattttagagtctttatctgctatttattttgttttcctcatgatgacttttttccttttgtgcttatgtttaactgtgtactctcatgaaaatagaatttatttctactaaaattctttgaagtctaaaatgaaagtttctttttccagagataatttgtttctgactcctgcctggagaagctactatctgggactaccttaaatcaagtacagtgctacagtttccccagattatcttggtgatacaaccccagatggcagaactatgcaagggtggcctraggtcacaatttcttaggtatcttctctctcacaccccctcacatcattttcatctgctggctgctgcgctcacaagtcattcctctctgctatggactgtggcgacaggcttctttctggttcaccattactctgaagatagagcgctctcaggtcccaatttaatgagcagaaggtcttctatcagacttttcaccttgggcaggccctgggccttaacttctatctcccttggctgataaagactttaaaaatgaagcctgagatgattatatctagtcttagcttttctatcaataatttagcgtgagtctgtgctcatatcccctccctgagggctgaatgatgggagccacaagccacagtggccactggcagagaacccatgtgccctaaggagaagccatcttaggaagatcagtggtagcagaggctgtgccatggtggcggatgaagaggttggagtggacaaatatgtgagatcctgtattaaatagaagaaactagtagtctgagaaactgtcagaaatagttcactgtaggacactttgagatgagggaatttttggaattaatgtaagtttgtgtcataattatatttacaattccaacttggttttcccatgtctgataggaccttggaaatcaggactccatttgtatttataatatactccaggtcagtgcaaatgaggcatgagaatagggtctggaggcagggaacctaaggccctttcatggtagctggacattaggggcttctcccttttcaacctctcatttttctctgtggcagttgcaaaatgaaagtaccactgattgggcccctcctgcaatcaatcagactagttatgggcctactcttcttgttccacaaccaatcagactggtcgcaggccactacttcatttgcatagagtgaaccaatggaaaacctctaaagggtatttaaagccccaaaacttctgtaaccaaggcttttgagacacttgctcgagctcgctcttacactgtggagtgtacttttgtttaaaataaatctctgcttttgctgccttgctttgtttgtgtgttttgtccaattctttgttcaaaacatcaagaacctggaaaactacccttaactggtaacactaacagacactaaatatgtataataaatatatattctacatactaccttctagtaattcatctttaaaatgttacttgtaattgttgttgactttagcagtttacttcaccaacagtcaatttttgtataaatacattctgcttcatatccttatatgttaatttacttcttatcaattcaattcatgagctctcatttcaaacaaactacaatgaaacataagaaacagcttattagtgtcaatctgttttattccttttgtagacataggaaaaggaggttttgccagtggttaagctaatactttatttcttaaaaattttcttatttttaaagcaatattttattgtcactagttcttttatctgtttggagtacagaaaaatggtgattaatgatctaagtactagtagagcaaaatagttgatttcttatgtcctttaagttttatctaattgcagaggggcagtttggtgttgtggatatgcacacagactctggtgccagactgcctgggtttgaatcctggctcattaacctaagatctgggtgacttggggcaaattacttaacacatttttgccaaattttacatctgcaaaatgaatacaataagagtcctaacctgttagggttgttaggatgaaataaataaatcaaatgtaaaggattaggaactttatacattatatatgtaccagatacactttgcacatataagctaatttgtatacaggatatagataggtgttgaaattttttgaaaactgataatggagtcctggtctacatgggcacccactccaagttcttttttacttgtcatttatcttcctcctaaaggggcaagaacagtgaggtagaacaggtaaattatcactgtgtccatttctctccagggagtgagagtgagctgtgatgagaggggaacacgctgaaggtagctcttttctaaagagttcatggttccgtcggtttcctcaaagcaggtgagtcttcacccaaaaactctccagtcagctgagagttgggaaggcactgctcaatctgaagtacaaagtgaggatagaacattcagactaatcaatagggtagggatctgcaaaatcgaaagcaggacggtgtggcctaaagaatgtcaacaaaatgaccatgagtgatgtggtgtgagaccgaaaggagcctttttatgttgtgcctgggagggttttcaggtgagagtgaagcctgggtctataggtggagcaggtttttatttcctttctccatggattgaggtgtgtttacattgacatcttaatggatccttgtaataacaggctctctcctcatgcaaggatagagtgagttcccttttaaaaaagtttggtcataaggccrtgtgaaaaatttctggttaaccaaaagaggacagtttattgctttcctcagtttatcctacaggaattaagcatattttaaactatagattaaaaaatctttttagtgttttaatgcttacyttttttttttttttttttttttttttttttttgagacggagtctcgctctgtcgcccaggctggagtgcagtggcatgatctcggctcactgcaagctccgcttcctgggttcacaccattctcctgcctcagcctcccgagtagctgggactacaggcacccaccaccacacccggctaatttttttgtatttttagtaragaccaggtttcactgtagccaggatgttttccatctcctgacgtcatgatcagaccgcctcggcctcccaaagtgctgggattgcaggcctgagccacactgtgtctggccaatgcttacttcttataactctattttaagtctccatttttagtatattttatagcaataaatggtgactgggaaacatactcttcctctgctgagattctatgatagcagactattcctcacagcaagacatcgctggaacattctgaataagaaaatatatgccttatttatacatatctctggggaaggaaattccatagacccttttgatgattttctatttttaaaaatataactcatttgggaaattctcttatatcttgcttaagtctctctgctgaagtttaatctcattcctgctcattcattccgcggtaaagatggagagtagctgatatcatcctctttatatacttgagaaccctcatttaaaaacccctttgctgaataatctcgttttgtcaaggccttcattattggtcacatttttaaattctttgatcatttttactggcctccacatctctcttaaatatctgaatctaaacaattgagctcttgtgggtctgaccagtgtagtattacactggatgtgtcactccacattcctaatgcttaactactatttatacattccagtatcatacatgcttttttaagaacagtaaaagcatttcaatggaggcgatacattatctcccagcatttatttgtgtcgcaggtaaactaaggccatttgaaaacactcttccttacacacacatacacacacacgcagtgtatctttatggtaaattttttctaattaaacaagttcttaacagttgttaaaaaacagtattatgttccagagtgatttggggttaattacgacttattacacgttgaaggagaaaaaacacaagttgcaaaaaggatgaaaatgatggatttttagtaattcgttgaataatacttattttaaaaagccaatgtgtctgaaataaataaatggctcttgagttgaattgttagatttcatcagtgagcttcttttcatcttttcacttgaaatgtggcttgtgtgcacagtgtttgtgtttgaagtctgcatctgtcattagtatagttaaataaaattgggataattatggtatgaaactgagaccaaaattgacaaagtaactcaatgaaatctaagattcccttgattattgtattagcctttcagataatttcttgaatttatgattcactctaaagtgtacatggcacagattttcttattttaatggaatgttttcatgataggtttgtgatgttgcttcattgaatgatagaattttacttgcttctttcacttgtggctttgtgtctttaaggagcttcttctaccacttttaaaaaaaccttgcaatcagagaagattgatattaaatccttctttccatctttactcctttttttgctgatgaaatctttgtttacttttcattgggaggtttagattgtggccaaccacttatagcatacttatggtttatttatgattcaaaacaaaataagaccagaaattagtgaaacctaacacttgagaagtttcatatgtttggatgtgctcagcttattattttttcctataactaagttacaaatccctgagatgtaacttatgtgcaagcactgtatgggatttcatgaatatttagtgttttgtttctatttctaagtctgtgaagtttcataaatcagcactgtttttgcttggttcctacatagctgtgattttcatgctgtctcttctgtactataaaggctgagtttcacccaattttcatacaaaattaattcctagtaggtaaaagataaactatgttggtccagtgttaagggttatgatttaagtaaaacagaagggaaactacaaatctaaagttctcctttaggccaggcatggtggctcctgcctataatctcagtactttgggagatccagatgggagaatcgcttgagcccaggaatttgagaccagcctgggcaacatagtgagaccttgtctcaaaaaatttaaaataaaatgaagttctcttttaacttcaaatcctctatgttgtttataggctagtaaatagtgagatattatgaagcgatttcaaatttcatgatctgtaatacaaaatattggctgggcacagtggctcacacttgtaatcccaatactttgggagactgaggcgggcagatctcttgagcccaggagttcaagaccagcctgggcaacatggtgaaactccatctctactaaaaatacaaaaattagctgggtgtggtggcctgtacctgtagtcccaactacttcggagactgaggtggaaggattgtttgagcccacgaggtcaaggctgcaatgaactatgatcacatcactgcactccagcctaggtggcagaacaagaccttgtctcaaaaagaaaaaataaataaataaataaataaaaccaaaatcttactacatatttcctgtctgaaaactccactggcaatgtgtcctcagatttcataactgaaaacataggccctcagccattttattggggtgatatcttttctaaaccagtgactgccagtgtggccaatcatcaatgttttgaaaatatttatttccattcccaaccccgggaattttttttactcagtagcactagaccagtgattctcaaacttggctgtgtgttaaaatcacctgaggagcttaaaaaaaccctgatgcctcagccctgaccccagagattctgaggtatgtggttctgggtcaccctaaccctaagagcttttcaggttaatgtccagccatgtttgagaactattactgatgtagtttggctccatttccccactaaaacctcactcgaattgtaattcccatgcatcgaggaagggaagtgattggattatggggatggtttcccccatgctattctcatgatagtgagtgaattctcatgagatctcacggttttataagtggtagtttatcctgcatgctcacacacacacacactctctctctctgtctctcryttgccaccatgtaagatgtgcctgtttccccttctgccatgattataagtttcctgaggcctcctcagccatgcagaactgtgagttaattaaacctcttttctttacaaattaaccagtctcaagcagttctttatagcttcatgaatacagtctactacaaatactctaaactatacaatattcagagtttcctgtagtgaatattgatttggtttacaatttgacaatttcattaccatcttcaaatatttctctttttttttaacttataaartgacactgatgaaccctgggagaagcagaggctgacacctccaagcaagttctggcataaggaaatgtctgagcctgtttaccttagcaggataaatacatgacttctttaagaagtattacagaagcttcttcccactagatggtgagcctaaaggcagggagattagtgatggtagagtcaatttgattttgctgtgcccaggacaacsaagaggtctatttyagcttgagttggctcttcaacctctggtaataatagctaattttctgagtgcttactatagaccagacacataaaatcccaccaccattttacaggaaaggaaatggcaagcacacagaggttaagtagttttcccagggtcatatagctagtgcacagtagaggcaggatttgaactctgtctgactccaggggcctcatggctgcctatgatgccattttgactggctagctagactataatgtggtataatatatataaatgaggggtatggaagcagattgaagtttgwtcttaaaagcaatgtaaacatgtaaaacttgcttgacttctctcagctgcaatgatccaatctgtaaaatggggttaacaatagtgcctgcctcataaggttactaagaggcttttaaatgggttatcttggtggctggattataaaagtactcaggaaataacttcgtttttatttcagtgaaattcatgcatctaaaaacatggaagttttggttttggaggttgttgccattcttctggtgggtaggatagatagtaagtagctccagccaggatatggagattagttaaggcctattctagtcctgaaattctctgattttcataaattgtaccattcattcagatacattatctttacatgacaaaattcctctattccyatccttatggttaattatttaatttatgaaataaatctttttgttaatttacctaagaaaagcaaagctttattcttataaaatatactactacactccaggtactacgstgaagatttttgaggaattaagatggtaactcacttagaagttccccatgccatggtgccacataaaattactgaaatgggagtcagaatatttggattctaatctccatgccttccttctttaagtactgggtaatttcaggcatgtcacccaccctcttatgtctttggttgtcttatatgtaaaatttagaagctatattatgtgatagcaacgatttcttctcactctaatattgtgtgattctggatattacaaaatagcaacaaggatatatttatatatgtaaactgtgcatatactgggaactgcagttctcacccaccagtctatctttttagttccaacaatttcttccttattatgggctcatctgtcaaaatgaagtaggattctgtgatttctaactttttatgattctattaatctttcagtttttgttaacagccatttgccaaaatgcaacagcgcccatgcctagagatcccctggctactccctaagatcttctggaaattcatttatcttctatcatctagtttctttattacctgagtgtagtgtttctcaaatattgatttctgaatatacatttgattatacaaatcatggaaatgttttccaaattcaccagaaaagttgaattaatggatagaagatttctcccataaaatatttttaaaamctctgacacttgacaccatttgtttgcattagaacaaaatatgatagtgtgttccatgcagtgcaaaattgtttataatttcatacaaaatatatctgccttagcacctatattctctagaaaacagaaccaaaggcaaggcttacatggtaatgttttgttgaaatgttcgatcacacagcagctaaagtgacaraaaagaaaatcgagacagaaaaagatgggaagcaaatacaaggtggtgctttaccattctgaccacagcttctaacaagcccagaagagacatggctactccttggcaggtgcatctgcccagccttgcatgaagtcttcrgatgagttgtataaaaaattaaccccagaaccgtccatcaaacagaaaaaaaaaacaaaaaaaaaaacaagggactttatctactgactctcccactggtcaaaatgcactctacaggagtgatgcaagtcagtttcagaagatgcaacttgcagaaggagaaatcaagcaggctctcncagactcagtcacagtgacgtttaagttacaggaaacaggtgaggccaagggaatatatgagacagtgcataccatcgtatttatctgacacaatgtctatgttccatggtgtgtcacaaagaccccaggatttccaggtggtatacctttccacaaattctaggccttatagcgcaccaaacagcagctgcaggatgacaagtttatcaataagtgctatttctctagccacaataaactctagaacagtgcttctcaaatgtgaacatggaggggaatcacctaggagaatcctattaaaaatgcaaagtttgattcagtaataggggggcaattcaaagtgtgttctacagccagcagcctcagcatcacttgagagcttattagaaatgcagtagcaggccaggcgcagtggcttactcctgaaatcctakcactttgggaggccgaggcaggtggatcacttgaggtcaggagtttgagaccagcctggccaacattgtgaaacctcgtttctactaaaaatacaaaaattagctgggcgtggtggcaggtgccagtaatcccagctactagggaggctgaggtgggagaatcgcttgaacccaggaggtggaggttacagtgagccaagaacatgccaaaaagaaatrcagcagcttattagaaatacctctcccctgaattactgaaatagaatttttgttttaaaaaggtccccagacaatttgtacactcttaagttttgagaagcatttatctggtctaatacagagcttctcaaactaactgtggtgtaaagacagttctttttaaaattaccaatgcattgtaattgtattaccaatacaaaaaaatgaattactagaaaaagaatgtttttaagaaggcataaaaatgcaaatgcaaattttttaccatttgatgcaaaagacataaaattattctgtcaaactgctctaaaattctttgtctctaaatttttattctcagtgagcatctataattgtcgtagcgaagagttcacagaactgtactggtctgtgaacaatactgagtagcactggtcttgaaaggcaagttttgactattgtttttctaagtttgaaattctttagcaaaaataagtatattacaacacttacaatgcagcaatattctagtacatactcttcatttgcagaaaatgtatttctttatgatgtaacataagaatgaaatgtaaactgtaacttttgaactttatttcctttgcttccccctcccttcatctcttccctcaacttggagtatatctttaaattgcaaggcctggctagcttcagataactcctacgttcagtgactagatctttcaggttctttccatggttgaaatgtaagtagatattaagcctcacctgcatttaaccttagtgggagtgagttgttcagatcctttcctgaaaacagcttttaataaaagggagaagaggaaagcctggggggagggagtgattcagctgtggagaggggtatcatraaagggggccatgtctgtctgggatacatgcctggtaatagagcaccaaagatttacttgtgattttcatgttagaattattgcccaagtggaaaacaacccaaacatttgatgatgaaggaaaggtaagatgattgcactgaaaatatatgaggctttaaggtatttttcaattttatttactgtaagaaaaaatagaaattactgtttatcaaaatagtagttttactggaaacttcagatagcaaattaggtatatattgggtatacatagttttacatatatatacacacacacacacatatatatgtatataggtatatatttatagatgtatatttataggcatacatatatatataactgtctttcaaagatatatatatctttgaaaggtagttgctaggcaagtagattttccagtccccattgaaggattcatttcataatcagcttaagcctatatttttgaaactgaaaaccttactcatctggcagagaaaaggatcataactactgagagaaaatacaaaggtctttcagagcatccagctcttacttccagactttctccttcatgggctttcccctatactttaaaaaaaaaccttgtttatctgccttgrgattttctgaattaattcacaatcaggttagctattagaatgcaatatttacttttataagatcaaagtacaaactttatttatgaggacccatgagagatcttcttctcttgacaatgtattaggaatactgtgcttcccctaagcactcattcactcatttactttttaactttttcttagcactgtcacttttgaactttattccctttgcttctccctccctttgtctcttccctcaacttggagtatatgtttaaattgctaacccctgccggctaacccctacattcagtgactatatccttcagattcttttcatggttgaaatgtaagtagatattaagcctcatctacaaaaattggactatgaagactcattagatataagacttggataatttatttcatccatgggcctcactttctcatttcaaaggtggagataaaaattttacccactttataggactgttctgtaaattaagtgagttaatatatttcaagtgtttagaatagtacttggaacataataattaaaaatgtaaacctttacttttttttaatcatggaattggtgattcttgtaactattcaagttttccactttgttttttctcctaggagcattaggatcatgtttgcttcttcaagtagctgttcactgttctttttttccttattccaaatttttcatcagtttatttatttatttatttatttatttagagacwgggtcttgctttgttgtccaagctgtagtgcagtggcgtgaccatggctcactgcagcctttacctcccaagctcaagggatcttcctacctcagcctcccgagtagctaggactacaggcacatgctaccactcttggctgatttttacatttttgtagagacagggtcttgctatgttgccagggctggtctcaaactcctgggctcaagcaatcctcctgccttggcctcctgaagtactgggattacaggcgtgagcctctgcgcccagcccatcagctcattcttgatcctgttattttgcatgcatatctgctggcagcctcaaacctttttttagaataaagtggtgtatcaatcaatctatcggtctcttaacaatgggattatgatcagttccatgggatctggaaaaaaaattggactatgaattcacctatggacaagaaatgtctcaaggatattttgaaactggtggacttaagtctggtttcctgaaccaatcacttgaaagagagattggattactatatgtattgtgactgggccaatcctcaaaattacattgctggtacacaaggggcatggcaggatggatgatggagagtcaatatcaattacagtacaatattctaaataggaaatkatcgtactcgtctttgtattcccagtagctagcacagtttctggtatataacaatactcagtaaatggctaaygaatgaacaaatcatttttgcctgggtgccacatttccatttggcaacttcaccaaacaaaggaacctgttataactataggattcctctaaatgaaactttcattttctggaaacaagaagttcctatgaagtcaaactccagaagctttttatgatttattctctgagtaattcactttactctgtactctaacattatcagatcacctgaaggttcctgaagccaacatgcttcttcactcatatttgtctttgaaaatgctgatacctctatccagtaatatttattccttaaatctggacctaggtctctgcctctccgtggggagatttctttgcttctgactccattaggcatagccaggcatgccaatgtttatgaccccaccatgcccagtrtttattctctccacattgtttttttcataatttgatgagcagacaatatgtgaaggagaaagagcacaggttttgcaatcagacaaaactgggctaggtccttcsttgaccacgttttagctgggtaaccaagccctgttacttaactttsccaagagtcaggttgcttgttttgaaatgaggatagtaaagtctatctcatgtaggtgttgtgaagattaaattgggtagcatatgcaaaggtcaagcgcataattgatatagaataaataartaacagtaggagctcaataactaaaatgtagttagcattaattgaggggtttttgaaaaagtgaagatcatgtaacagatttatgatgtaggttaaaaaatcaatatgaattatgacagtttttagaattaaatttattttatagatttataggttatagatgtgaaaaaatgaaaaccatgcttttaacttcttccttaatagcacatagcatagaagtatgtgttaatagatagctgatgtgattttgatgaacgatcagcaagtgaattggtccctttctttacatttccttaagtatttatctcagagtcatatttaagagtgattagcatggtattagagcaatagtgctccaaaacctcaccataagcactggtttccagatgagactattcttgaaagacttaatttaagcttttccatttagcatttaatgtgacttattttgtacaatgacaaagctgcaggtgttaacaaaatctaagagtttaaaaatgtgcctgtggtatatttaaagtgaccaaaataactttttttaagattcaaaaataaactgttgacataaatcacaaaaataccactgcttaagaaataaaatgtgtagcatttcatcgttttcactcagaattaaaggtcctccatactctagccccagtttacctttcagacacctccactgcccacccactcccagaacctstacactgcagttttatgatgaaatttttctgactctgcctttaatttcttcctcgcctctgacatattttagtgtacagacatgcctttttacacatttttattccagctaaagccgaagctcaggacctagcaggtgggcaatggtcagggtacattggattaatggtgggtgacgcaaagagagggccacatggagcagatatggagaaaccagacacagcttatccttcaggaaatgggctgaaggcctcctggaaagggcagttgcragagttgttggagtcactggctggtctctcaacctayccccaaataaaacctatctccaaagctccctggcagtatgcctgatggagaaggagcatgtcctgagtggcacagagctgagcttcacagacttgccccagagacagtggctgaaggtcagagggaagggcagttttgagtgaatcgtgaagcctaacactgagcagacccttcagcccagctcttctctctccagttcctttcttcctcagaatttgtggcagagccccaggaagaggtctcctaagacagaagctagtccgggcatggtggctcatgcctataatccragcactttgggaggccgaggcgggcagatcacttgaggccaggagttcaagactagactgaccaacatggcaaaactctgtctctactaaaagtacaaaaattagctgggcatggtggtgtgtgcctgcagtccctgctacttgggagaatcacttgaacccaggaggcagaagttgcagtctcaaaaaaaaaaaaaaaaaaaaagcaga

SEQ ID NO: 10057 - DNA, 40000 bp, Homo sapiens
tctttttttttttgagacagagtctcgctctgtcacccaggctggagtgcagtggcgcgatctcggctcactgcaatctccgcctcctgggttcaagtaattctcctgcttcagcctcctgartagctgggattacaggcaagcgccaccatgcgcggctgatttttgtatttttagtagagacaggatttcaccatgttggtcaggctggtctcaaactcctgctctcgtgttccgcccacctctgcctcccaaagtgctggrattacaggagtgagtcactgtgcccggccaagtatgtttacttttgtacaaaactaccaaaccgtcttccaaagtggctataccattttgcattcccatcagtaatgaataagtgttcccattgctgcatattttcaccagcacctggcattgtcagtgttctggattttggctattctaataggcatgttgtgatacttcattattgttttaatttgtatttctctgatgasctatgatgttgaaaatctttcatatgcttacttactatttgtattatcttcattggtgatgtgtctgttaaagaatttggtccattttataatcaggtcgtttcttaccgttaattttaagagttatctaatacattgtagtttgaataagagtcctttatcagatatgtcttttgctaatattttcttccagtctgtggcttsccttctcattttkgcagtgtgttttgcagagcagattttaattttaatgaggtccagcttatcaattattcctttcatggatcatggctttggtgttgtatcttaaaagtcatcaccatacccaaggtcatctaggttttctcctatgttatcttctaggagtttcatagctttgcattttacatttagggcwatgatccattttgagttaattttgtggaaagtgtaaagtttgtgttgagattcatttgcatgtggggtattcaattatttcaatagcatttgtctttgctccctcatattgctgttgtttctttgtcaaggaccagttaactatatttgtgtgggtctagttctggccttcctatcatgttccattgacctatttgtcaactmgttcaccaacacaacatgkyctttattactgtagttcattgtaagtcttgaagttaagtattgacagtactctgactttgttcttcaatattktgttgggccattttagatcttttgcttcttcataaaactttagaatccattttttggtctacagaaaataacttgctgagattttgattgggattgcattgaatctgtagatcaagttgggaagaactgacatcttgacaatattgaatcttcttatccatgaacgtgcaatatctctcaatttatttggttctttgatgtctttcatcagagcttgtagttttccttatgtagatatgtatatattttgttagatttataccaactatttcatttttggaggtgctaatatacgtagtatcatgttttttatttcaaattcctattgttctttgctagtacattggaaagtgattgactttttatattagccytgtatcatgcaactttgctataatcacttgtaagtttgggtagtttttcattgcatctttttttctacatagacagttatgtcatgtgatcaaagttttatttgttcccacccaatttgtataactttcatttccttttcttgtcttatttcattaactaggacttccagttattttgaaaagtagtgatgagaggggaaatccttgccttgttcctgatcttagcaggaaagcttctagtttctcaccattaagtataatcttagcacaggttttctgtaaatgttctttatcaagttgtaaaatttcccctctcctccaagcttactaagagtttgcattataaatggtgttggattttgtgaaattgtttttcacaatacacctattgatataatcatgtgtttttttttctacggcctattgttgtgattgattacattaactgatgttcaaatgttgaaccagtctgtcatacstggaataaatgtcacttggtcatggtgtataattcttttataattctttttatgcattgttggatttgatttgctaatattttataggggatttttacagctatgcttatgagagataatgctctacagttttctgttcttgcaatatctttgtcttgttttggtattaaggtgatgctggcttcatagaatgagtcagaaaatgttctctgtgttcctatctttggaaagagattatagagaattggyacaatttctcctgtcaatgtttggtagaatccrcctgtgaacccatccaggcctggatgggtaaataaataacttttggaaagttatttactattggttcaatttctttagtctattttttcttgtgtgaattttagcagatcatgtctttcaaaaaattggttcatttaatttaggttatcatatttgaggatgtagagttgtttataatatttcttcattaccctttcaatccccatggaatatatagtgatgtcgatttattcatttctgatattagtaactttgtgtcctttctattgttttcttagcctggctagaagcttatcaattttactggtcttttcaaagaaatcatttttggttccattaattttctctattaatttcctgcttttaatttcatttatttctgctctaatctgtattacttttttcttctacttattttgaatttaatttccttctttttttctaggtttctaaggtggaatacatgcattcaatataaatttctctctaaactctatttttgttgcatcccataaattttggtgtcatattttcatttttatttagttcaaaatatttaaaaatgtatgttcagatttcttccttgacccatgtgttattcagaagtttgttgtttaatctccatgtatttggggatttttttttttttttttgagatggtctcactctgttgcccaggctggagtgcagtggcgtgatctcggttcactgcaacctctgcctcctaggttcaagcaattctcctgcctcagcctcctgagtagctgggattacaggcatgtgccaccacgtgcagctaatttttgtgtttttagtagagatggggtttcaccatgttggtcaggctggtctctcactcctgatctsgtgatctgcccatctcagcctcccaaagtgctggaattacaggcatgagccaacatgcctggccgtatttggggatttttaaactatctttctgttattgatttctagcttacttctattgtggtctgagagcatacattgtatgatttatattttttaaaaaattttaaggtatgttttatggccacagtgtgaatgttctatgtgagcttgagaagaatgtgtattctgctcttgtttggtgaagtgttctaaaggtgtcaattatattgaggtgattgatggtgtttttgagttcaactatgtccttactcattttctaataaaaaatcaatataaatattttctaatataaaatagtgttgaagtctctgattagaatagtggattcctctgtttctctaccccattattccattggtttttgcctcacatattttgatgctctgttgttaagcacgtacayattacggatagttatatcttggaattaaggattattattgacacctttatcattaggtaatgcccctctttcttactgataattttccytgctatgaagtctgtcctgtcccaaattaatacagctacttcagctttcttttaattagcrttagcatggtatgtcttttctccatccctttacttttaatcatatatgtctttatatttaaaaatgggtttgttttagacagcatactgttgggttttgttttttgatccattctaacaatctctatctttaagctggtgcatttagaccatcaccatttaaagttattattgatatagttggattaatatctaccatatttcttactgttttctagttattgctcttgtttttcrttccttttttgtctcccaytcttttttcatcttttgtggttttaactgagcmttttatgattccattttctctcctttttagtatatcggttatactttttttttttttttttacytctttcagtggttgccctagagtttgcaatatacatttacaactaatccaagtctactttcaaataacactatactgcttcatgggtattgcaagttctttgaaataaccaagtacagttgacccttgaacaacatgggtttgaactgcatggatccacatatatgtagaattcacaagatgcaatatccaagtattatgaagggccaacttttcttttcatgtagaggatcctacagggctgacagtgggacttgcgtatgccaggattttggtatatgtgcagggtcttggaatcaatccctggcatataccaaggggtgaccgtatcgctaattcctccctcgcatcctttgtatcaatgctgtcattcatttcacttacacataaagtataaacattgaagacattgttgctattattattttgaacgaacatttatctgttagatcttatttcttctctaatgcttttcctttctttatgtagatccgagtttctgacctatataattttccttcttggtgaagagcttcttttaacatttcttgcaaggcaggactactggcaacatattctcttcatttttgtttgtcttgagaaagtctttattttttcttcatttttgaaggataatttagcaagatatagaattccgtgttgctgttttctcacccaacagtaaatattttactccagtcttttcttgcttgcaaggtttctgtgaggaagtgagatttaattcttatctttgttccactatagataagttgtttcccccccaaccatggcttctttcaggatttttgttatctttcattttctacagtttgaatataatatacacaggtwtttttttatgtctgacactaatttttggaaattctcagtcattactttctccaatatttattatgttgctttctctatttcttgttctagtattccttttacacaagttacatctttcatagtttcccccacagttcttgcatattctgttcttcttttctcagtctttttttatttttgcttttcagttgagaaagaactgaaaaaacagttctattgacataccctcaagctcagattctaatgtcagctgtgtctagtctactaatgagcccamaaaaggcgttcgtcatttctgttataatgttttttatctctagcatttattttttattattagaatttctgtctatctgctttcattacccatctgttcttgcatgttgtgtaccttgttcatttgtgctcttagcttgttaatcatggttgttttaaattcccgatctaatwattccaatayccctgccatatctgagtgtggttctggtacttgctctgtcttttcaaactgttttctaccttgaagtatgctttgtaatttttttgttgaaaatggatggaagaaactgataaataagctttagtaatgtagtgatgaggtatgaggtgaggggaggtattctatagacctatgagtagaattaggtctcagtcttttagtgagcctgcgccccttggctgtgaacttcacaagtgcttctgaggcttttttcacctctttaagtagggtcagcatagctggagggagctggggttgggtatttccctttctccagctagaccaggctctgataaaacctcagcagggctgcctgtggttaaatagttgttcctgacggcagactgccttaagaacagaatgctctgtctatttcaaaatggttctttgtctgctccccctactggaagcatgagattcttctcacattttctctgtgaggacctggtggagcccctggagtaaaactaagtatgcttctctaagagtgggctcccctggaattctcarcactcaaacttatccacacggagcctccggcaatttaccaattatggctcagggttttctacccaaatactggttcctgtggagatttctgctcatgkgttactactctggtaagttgggattctctgtaattgcttctttaactctccagttggaaggcagtggtttgccmtgtaatcttagttctctgacagatgaagaagagttgttgcttttcattttttycattttttactttttgttagaatgtagtgatgactttcaacctcctgaagtgccagaccccaaactaaaagtccctctagtctctcttgctctttaaatcagagctgaggttttctaccctttgtttcccctctgtgctgatacctgttccactgagctcccattgatcaccatcaaaagatcaayggtcattatcacacagacatgcaaacatccttctcatgcttccatcttattacagatacatgagtctgctgtaattctgagatgaaaatgacatatgccacccactaaaagctgaagctcaatctgggtccagctgcagaggagcagtcctctcttcaattcccaacagtcctgcccatcataactacactcaggagttcccatctgacaaataagttgtccttatcttcccttgcagtgtccctgaatggtgtgtgatgtaccttctgatgcagtctgcatttctgcactgcttttctttgctctctttgccttcttttgttctgttgaataaaggagattgagaatatgaactttctgttagattgccttgctgaccatgtgctggtttagaaacattctcatcccacaaacattcctcatctttgaggaactgcccctctccacaccgacaactcaccatgctccacaccctactctgtcagtcagtgattctggaggacactctgggtggacgatcaccaatgttgtrtaagccccaaaagctgttaggacaagttcccggtgtgccaggcaaagtctgttctctttccccagctgaaaagctccaggacagcaggctactggcaggatacctcgccagcctcgagtaaaggccagacccttacccagatctgagagaccaactagatgccagttggcttgagacttggagcaggcattgccatcccagtcacttgtgaatagggttgttcagacaaaatagagaatgcccagttaaatttaaatttcagataaacaacaaaaaatatacagtaagtatgttccacatgttgcatggaacatacttatactaaaaaaaattatttattgtttctctgaaattcaatctgaacggcacatcctgtatttttgtttgctaaatctggcaaccctgcctatgaagtcatcctgcctttatatggaatcacagacaagggcacaggttgtttactgggctactgctttggatttctcctgtaaggggcagacaatagacaaggaccaagcttaagacccttcctccaaatcatccgcattaactaacccatagsttgcttagaagtcttgttcagtttctaaatatttttgaattgttgagatatatttcattactgctttctaatttaatatgccatgatcgtggaacatagtcagtatgttttcaatattttgaagtgtattgagactgttttatggcttagcatattacttatctttgtgaatgtcctttgtgagaagaatgctgttgtgggtactgttttgtagttctttgtatattctgaatacaatttcacatatatataaaaattatgtatatatataatatttatatatattcaaaattttgcggggttgtggcttactgttttgctctcttcatgttgttttatgaacaaagtttatcaattttttaaggtaagcttttttctatcccatttaagaaatttttgcctatcctcactccataaagatatcttctgttttcttctgaatgaattattgttttacctttcacatacaggactataatacaactgaaawtgatttttatctatgggatgaagtagaaatcgtaatacatttttcccatatagacagccaactaaccttgcaccatttattgaaaagactatcctttttctattgcactgtaatagtacctttgttgtaaatcaattgagtcaatatgtagtttgcttctagattctatatactatctcataggtccatttgtcaatcatttccccagcaccatactttcttaattactacaactttataataagtttcagtatctggaactataagtcttccaactttattcatcattttttaaaatttaatttgatactaagttccgggatacatgtgcaggatctgccagtttgttacataagtaaacatgtgccgtggtggtttactgcatctatcaacccatcacctaggttttaagccccgcatgcattagctgtttatcctgatgctctcccttcccccaacccctttgataggccccagcatgtgttgttcccctccctgtctccatgtgttctcactgttcagctcccacttataagtgggaacatgtggtgtttggttttctgttcgtgcattagtttgctaaggataatggcttccagctccatccatgtccctgcaaaggacatgatttcgtttctttttatggctccatrgtattctgtggtgtatacgtatcacattttctttttccagtctatcattgatgggcatttgtgttggtttcwtgtctttgctattgtgaatagtgctgcagtaaacatacacatgcatgtatctttataatagaataatttctattcctttgggtatatacccagtaatgggattcctgggtcaaatggtatttttggttctagattttgaagactcatcacactgtcttccacaatggttgaactaatttacattcccaccaacagtgtaaaagctgttcttcttttttagggttgttttgactattttagctccttttcatttcctgtcttakttcattttgtgctgctataatggaatagctgagtctgggtagtttaaaaaaccaaaaatttatttctcacagttccggaggctgggaagtccaggatcaagatactgacaggtttggttgtctaatgggggctacattctttggaggggaggaatgctatctcctcaactggcagaagagtagaagagcaacctaactgaatcctgtgtgaagcttctgaactctgaaagtccccatttctaaatatcattacattggcaacatccaaattttggaggcaatacattcaaatcatagcatttcaacacaaattttagaatagatttatcaatttccacaaaaaatctgtgaaaatttgattgaaattgcattaaacccatagttcaatttggagaaattgatgtatttacaatattaagttttccaatccrtgaagatatcatatacctttgtttattaggtcttctttaatattttcaaaaggatcattttagttttttgtcttacacatctttggttaagtttatttctaggtattagattttttatgctactaaaaatatctttcaaattttgttttctaactgttgttttctagtgtacaaaagtataattgatatttgtatattgattttctggtgaccttgatacattcacttattaattctagtagtttgtagattattttaattttctatatatacaattatgtcatatgtgatcgcctgcagtttgcttttcttctgatccagaagatgcttatttctttgtcttgccttattgcaatggctaagatctccagtataaagttgagtaatcattgtgataatagttatccttaccccctttttgttcaatggaaaagtttcatttactattaagtataatattttttgtttttttgggcggccatttgatttatctccctttattctattcattttgtrtattacatgattttttaaacattaaaccatcttgactgcactgwtgcttgactgctgacaacttctaagcaagccccttgcctccctttcctattatgctcattatctggaaaaactgatatgaaaaccgaggtgttccttcctttggcagtgatagcaacttccaacttcaaaccacatgcaggccccacccctaattaccataaaaaacctgatgctataaaaaaccctgctcactcaagccacttttggaccagcttggaagtcctgccttgctttcctcagaaagccttattatttgagttaaatatccgttcaccccctcttggagtgtgtggtgtgtgtgtgtgtgtgtgtgtgtgtgtgtgtgtgtgtgtgtgtgatgtcatcagtctcaacagctaaacgaaattttgtgtggctgtccatcttgcctytggaaggtggtcatgacaatcagcactgtgagcctgctagatgtctagatgatgactgcttccaccggagtcttttctttcttgctttggcttccagtctggctctgctgtcttgctctgggttgctgtgtgctgactagggggctctttgagttgtgttgctgcctgctggcaaacttgccctttgagctgtgttgctttgggctgcatttgctgagttctgctgagcctctgttacagatttaattgacccaagtcagaagtttcaaaaactgggatttaaggacaggagtatgggattgggggccctcttagggaggccctgaatcgtgttcctcagcccagacctgtctgtatataccgtattgaattgtatttcttgattccagcataaactgggactgatgctaagctaaggggaatggctcttaccccgtgactactggttgtgtgtctcaagcgggtgccggccctmattctacggagttttcagggaaaagactgatatgtggtcccttcyggtggtcactcatgtgraagaagagcagttactacgtggcatgctgaagccacgctcctaaaaacagatggcagccaggcgcggtggctcacgcctgtaatcccagcactttgggagcccacggcaggtggatcacctgaggtcagtaatttgagaccagcctgaccaacatggagaaacccygtctctactaaaaacacaaaattagccgggcatggtggcgcatgcctttaatcccagctcctgggaaggctgaggcaggagaatcacttgaacctgggaggaggaggttgtggtgagccmagcytgcgccattactctccagcctgggcaacaatagcaaaactctgtaggaaaaaaaaaaaaaamaaaaaaccagagtgcttactaactagagtcctgtaaaatgtcttggctgctgttgctgctgttgctcctgttgccrccgctgccgctgcctatgcctctgttaccagaaaagatcctcatcctccgggttataggaraaaacacacatggcacagccaaagggttaattcaactatttccatgggggaggcctcgagccctgacaatacagatttgagactccttggaggaataaatatataaatatgggcagagtagagagaattcctctcctgccaaattatattcagaaaccacaagaaagatagagagagagagagaaacctgaaaacagggagaagaaacaaaaaattaaaacaaagatccataatttgatacaattggaaatccaaaattggctaaaataatttatacatctaaaagataaaaaggtgtgcaggctgtcttggtgtctccaccacataaattctgaatttactttcacatttgctgacatacaataattgacaattcktcatggtcttaatccatactgaagctcaaataatacttatacctggggatcctattaaatttaaacaaggtacccctgtaatcttggggaagttaatgaacaaaaaatagagaacaaacaggcatgcctcactttaattagcagaactactgacttgcttaaatttcccacgatcatagcatcctctaacgtttcccacaatgggcatggacagtctaacccaataagtcataaattaaaattaaatcaagtccttggcatttataaattggtttgrcaaaatgggacaccatgggcctccccaagccctagttaaaatagttaatatgccccagtrtaaattaaaacaggacctttaaggagtgaagcccattaaacaggatctatttagagaagggttgtttatatccattatttttccatcaacaacctaatttggcctatttttaaacttsggaaaaatgaatggtgcctcacagtggattaccacaaccataatgtcatggtcatgcctactaaggctccatacccaatattactgaaattattgacttatccaattggcagctggtagatatttccttcttatggatttggctgtcaaatattctgttgaatgcccgttgcaacascttctcagtcacaactcgcttcaccaccaaggcggcatgacacagctttcccagatactcagggattgcctcagcagccctgccatgacatgcaatttttgcagtcaagctcttaaatgcatctgactttctccaggagtacagatatgatttacattgctgaatcctcctccaaagagatgcatttgatacacgcgttcaggacatrtagataccaaggagctcagaaaaaaagggtttgccrttgtcccacaggtcatgcaaagtcctgccacattaaatttcagaaattatttggtaaaccaagagctactccatccctgacactgtcaaaaaatagctattgagcatcttagcgcccacaatattacaataggaccaacatcttttaggtcttttgaggtcctgaaggcaacatattcttcatttacaaactttacttaagcccaaatatgctgctacttgcaaatcatctcaccttgcatagggccctctttaacaaaaggctctaaaatctgtctaaattgtagtacaatgcacatgcccgttaatgccctccagagactccttcattgcagagactttataatctctgtgcttcttggagtctctgggccacccccaatagccactttcccttaaatgttatcccattctcyctgtgaatcatcaaaagaaccaatcacatctgggtagactgaccctcatggtatctctaggctgattgtaaacctagaaaaaaaaaacaattctgcacaccagcttatattataaaagcattttattgaacacattctggaggtagttagaaccaaaacaaaatttgggattggggtggggattctgttttgatgatttagatttgggaaaactttggrttctcgtgtcagcaggggccatgctgtgggaaacctgaaggctgatttgaagcagaatatagaactgcggcacgggagaccaggggctgggaatggggctctcctgggaaccaaagaatgtggttctgcaattggcttggtctaractactctccagaaaaggataaaacatggcttgagcaactgcctagaagaggcaatctccatgggctgggttgctgcacttggaaggcagtgacttgcagcaggttcttagctcttgaagctcttccgggaggaggaggtggtggagacaaatttgacgctggagctgctacccccgccactgccaaagcccacccccagccctcggccactgcttgcactgaagccagagccccccacactgagcccaccacctaggccgacacccccactgctgctggagtagtagcttccactgcyacctccggcaagacctccaccgaggccgccgccaagacctccaccgaggccaccgccatagccactgccactgccatatccagaggaaacactgcttgtgacaacagctgcagggaaaggagggaggactcagtgagaccatcwgccaggctgatcctgcatggcccatttatttgatctgctggtgttggagcactctactggaccccctttacagagtagcaaacaaggcccggaagaactgtcatttarttaaggtccctaaaaaagtgggtgagtgtaagaggcaaggtgctaggtactgagaggagctaggtactgaggggagctaggtactacagggagctaggtactgaggggagctaggtactgaggggaggagctaggtactggggggagctaggtactagggacaaggcaggggacagggtccaagaagcataggatgcatggcttaccctttaagagatgagacataagccacattgcttcctgtcccaayctgtccttcccctccaccacccacaacttactaagtgtattattataaataaccatatgctgggatgggaaaagtttggatctagaaacagcagaattctgagttggcactaaatatatcccatattattgtcgttgttaatgtctgttcaaagctacttacagatgttgactggtccaactccttctccactgagtctgaaaggggaaaaattgaattaagggttaacagctcccaaaaagacagcattagtctatgtggctaactcccatcctcatgattcgagttcattccataagccaggagtctgtacacccaaaagctgcttaagttaaaggaagggagaactctccagagggattttccaatgaagagggattgacctagaaacaagttgttaggaaagaattataattcacattcttctccacccactatggggaaagtataagagatttggaaaatgtgattatgtckaaagcagtttttgccttgtaggagttacattctgtgagagaacttggcacggacagaaattcctccaacagaaagtaggcaatgggcaatgtcagaggttgaagcaaacagtagtttgacaatccaaaggtagctgagtttaaytcagctggagtamacatgaaagccttcctgaaggaaggggtactggaggacaagggtggatggaggtgggcatgacrtggatattgaggttgagcaaaggacgtgagcaaaagcagaaaaggcacaagtgtcaagamgattgctgagttgctcaggtgcttggaggacagccagtgcccaggaacaccggtgggggaaaagagaccagaaaagtgagttgaggtcagctatatggccatgagtcagactgaaatagtgttgatgatgtgtcattatcaygcacaagtcactgatctcatgtatgtgtgttgtacaccccacagtagagcagcttcgctttatcagctgaaggccatcttgagttcatgctgtctactcacctgcattcctmgcccyycagcagcttgcggtaagtggcgatctccacgtccrgggccagcttggtgttcatgagctcctggtactcacgcagcagccgggccatgtcctgcttggccttctgcaggkcctcctccagctcggccagcttgttcctggcatccttgagggccagctccccacgctgctcggcatccgcaatggcgttctgcagattggcgcactacagatagaaaggaggagagtggggttgcttgggacctgaggtktctccttctgagtttctgggtcagrcaaaccaaactatcatgaatcccagagagaaaccagtacatcgtgggtggcaggacactgaaacactggtactggatctagctgcgtgtgtttagcaaaagtaaaacaaaataaaacaaagtaggtgtttcttttararctcaggccccttccttgccctctttcaatctcaccctacctgyttctygacattgtcaatctcggctctcagcctctggatcatccggttcatctcwgwgatctcatgcttggtgttgcggaggtcatcgccatgccggccagctgtctgctgcagctcctcatactgatgcagccaggaaagaggaaagattctgtttatatgagaatgggaagaactttcccaaagttcacaggcagtgagtactaagtggtggcaaatagtgtggggctggttcagkcttttccaaggctgagctagtctagtgcctttgctctcctggagacactggtgtgagattcagagtgagattatttctcaggtccttgggtttagatggaaattgtctacacagccattcctataaagcatcccaatgggcttcagcrggttccaggagccccattcttagtgtcgtcatggcctagaatcctagacatgggtgtgtcccctcactcaggagacagtcatcagagcacccaccttggtctgataccaggactcggcttckgtccggctgcggttggcaatctcctcatactgggccttgacctcagcgatgatgctatccaggtccaggttgcrgttkttkwscrtggagrggwccactgaggtgtcagagacatgcgtctgcatctgggacrgctcctgcagggagatttggagtcggtcatctggttctgtgttgtgttatttaatgtcagttccattcaaatctttcactcattgtgatatgacaacttgaggaaaaaaaacccacccatgtgaaaaatttagataagtttcttaccgcatcaaagaacatcttcatgaagttaatctcatccatcagtgcatcaaccttggcctccagctccaccttgttcatgtaggcagcatctacatcctggggaaacagggatgattggcactgcacacaccgtcaccctactcaagtgagctccacgcttagagagcatagctgcaggctgctggttctctcccacccacacgcaccttcttcagcatcacaaactcattctcagcagtggtacgcttgttgatttcatcctcatacctggtggtgaaagggatgggaagtgtttgtcagaggatgagcaacaggtaaggggtctttattatgcagtcaactgtaagcctacttttgcagtgggaaggggcttctcctcataggcagagagggaggrgacactggtagcatgaacctctggccaaggtccctccccatttaaatactgctttctctgtaactgcctaccatataataattctattattgctctaattcagttgtttcaagcagattcctgcagaaaagctgtgctgtttctccccaactgcattacctagtcaatttctctagtgttcttttttgagctttcagaggctttaaaaaaaaaaagaaaagaaacaaaattaaatctagcatcctagttgctggttcataagactaaagaaattayttgagccaccaagctgggttatgtcaccagctcctgctttgagacaaatctatccaaaggcccatgtaccggggaggaaagtcccagagagcaagccttacatcagggcagatttcaccaggtagtgccaagggcacagagcatgttgctctggctgttgactaagttccttgcagagggcctgagcctggggctggaactttctaaacatgagcctggcttgtgtatttgtttgtttgttttagtactggaggtgtccatggaaggtatatcctcccagccccaaaggaaggcatggtagtagactagtaacaaagcccatctggtaccaagaagacaccaccctcccctgtgtccaccctccaccccaactcacttgttcttgaagtcttccaccaggtcctgcatgtttctyagctctgagtccaggcggccccgttcccccacgatgctgtccagctgcctcctgaggttgttgatgtactgctcgaacaacggctccaggttctgcctcacrgtcttggtgccctgctcctgcagcagggtccacttkgtktccagaaccttsttctgctgctccaggaaccgcacctggaggggagcagrgtttgaagatagagaaacttggatttcatgttctatgatcaactcactaaggtgcctcccacctctttcygtccctctaaagcttttctgtgcactgtgcctggccctgggccccaggaggggaggtgcagactgaggcacccaaactcacttttccagggggagataggacacctatccagggcacagaaagcactaggagtgctgcttggagtgtgtcccggctcaggggtggctgcaaaggcactcaggctgctgcccatgcacttgtctaccttcctgtacagtcagcccctttatatatggcatgaaattcatctctctgtccaacagttgttaagaggcccttgtgagctaacctctgaatgggaagaaataattctcccttcccagctgccagtctaattcagaacgtgtccacaaatccagggcacagaaacaaayggaaacacagaactgtacaactataaaagtatttgcacaaagmcaaaacatcttccttctttctctctctttggcatttatttcagacccacagtgattttttacaaaagatcrtagctcaccttgtcgatgaaggrggcaracttattgttgagggtcttgatctgctygcgctcctyggtcctcaccctctggmtgctggggtcgatttgcaggttgaggrgagtcaggagactctggttgacagtgacctcttggatacctycaggagggcagacaggaaagccagggccaccgaagccacctccaaagccagctccgccaccragcccaaagccaccaccagctccaccgccgaaaccaaatccactaccggcaccacctccaaagccatagccgcctccagcaccagcaccaamccggttcctgaagctgccwccwctagtgctgatggatatcctcttggagccccccaggttgtagaggctccggctgccatagccacccactccacaagcacccgcaaggctgaccckgccgaagccaccaccaccgccacccccggacygggacacggaggtgaagctggtgcgggagacagacrgggtgatggcagaggcggtgctgaagctacgactgcccccgctycggaaggacacacttgactggcgagacatggtggcttgttcctggtggagcaagagaaccaggcactagtgggttgggaggtgctggagagaacagagctcrgcaggacgcagaaggtggctctgttacccaggaacggtgatgccccctttttatcccytccagaactgggctgggcgagagagctgtcgagctgtgaatgattaagtgggctgggcatgcctggggggcagctgtgagctcaccggtcacacctgcacagtggtgtggggtgcaaacgctttcttcctggcaggctctgctcagttagaaataaccttgccttgcagcactgatctcttggcagcaagttggtgacgctgctagcaagtatgtcttcaccatagaggctgggggctgtgagcagcccaaaaaggatgccaggaactgagggggcattggcatggccagtgtcctggggactcttacaggaccaggagtattgacaaccatcccagtacggtacatgctgagcacctgcccttccagcttggggaagctgtccatcagcggggggcaaacgattccccagtgatctgctcttacacttttccaggcagcaggttgctgcagggttttcccctctgggaraggcaatctgtagccttatattcttggttatgtgctagagggaaaatagagtttcatccttttstgcacaatttttttsttagggaaggcacagctatcccagagcccactgggcagatctgcctgcaaggtttaggccagagaatgtggraagccctcagcgccccctataaaccactttgacctctttaaggccaggtttatccttccatagctcctcctaactcagcattttttctgccctttgaccttttccttgctctttggcctgggcaggactctgtggggggtttaggaaacccggggatyscatgcaatcccttaaaaaaaaaccctgasactcatgggctatagcgtctctctttgggggtagctactctgccggttccccagccccccaggtgtgttccagcaagctctattccactagggaagaaatgagtcatcgtatgtgttgatacaggctgaaggccgccacaaacacatacctkcaggagcttctaatctcatcaggaacatgttgagagtctgacggcctgttataacggcgaaccaccctgttccaagcagcgggacttgctctgctttctctatgctgtagcccacagcctccttcagggccaaggcaatggaaaacgggattctaagtctatggattgtcctgccagaaaggctagccagagcaggcctgtgggcccaggcagctggcatgacaatctgccagctgctttagggagggccctttgagatcccctctgcaaaacttgtctggggggttgtggcaccaggtggaggaaagggggtttctgatgaggttttaacacacgtctgttctaaaccacacccactctttttggcagcagatctgagtggggccacctctctgccgtcccccaaatagaagcagggctctcaggcaggacagtgcttgggctgttcagagtttcgggggcgccctgtggcccgaggctggaggtaggaatgcaatggggatggcttcaaagcctcagggaggaggggctatattctcaagagtagaagaacaggaccagacccaggctcaggaatctctcaccagggcctgcggttggccacaaggaagccaaggcagtgggaaaatgactccctggtgctgaggatcagctgaaacagtgacttctcaccagagggctgcgatgagcaagcagctgacaggtcaatctcggcagacagaccaatggccggagccggtcttacaggtcttgagcaaaatggtttgggtggcctccctggctggagcatttctgagaccctcagagatgaattgtgctgagctcaccattttcacatttggttgctttytggagaacagatgtgagtgtcctggaggcctgagacataccaggggaccctcggctcctgatagaacagaacagatccaagcctgaagcaagtgtctgaggactcgtagtgggatgctccygctccwctcaaagatcgatatcggggtatatccccaccaccacatacactcacaggtcccgggtacagacctcactgccctcagggaagccccacccctcctgagacactgggacattctcttctccccattcattctcytcccagctgtgttgtgaagaaagaggacttggcagagcaggaatgcgttctggctagtctgaggattgctagagtgtgccaagctcagatccatgtgccagggaccaacggtgagtgtgtggtgctccatgggagcagggagcatgtgggtgctccatgggagaagcagcagcactcttctatccgagcttcgtgggaatcctcccatgagcaggcagggcagcccctccctcaatgccagacctggacaggtataaataatggagccgctcctggtggggagccaggcaccagcaccactgcagctcgggagagtcccaccycagcctggaatttcactgtggcaggaagggagggattgtgttaggctcaccagggagctttcctgctgggcaccccacagaggcagttcccaggcttggtgggacatgttgctcagcttctcctctgggtgctgctttccttgtcagcagaagacagtgcagggcccgccctgctgctctccccatcagagaaaggacagtaagctggctgccctgacctctctcgcagagctgtgcagggaatgtaggacctggtcagcatttcatacatggagaagcccttcacagacaccagggagagggtrgtatccattcrtggaacaagggttaggcaaatcctgccatcccagcccaggattccttctcctcagagcctccactccaatctgtagggctttagtagaagatacatttaatagagcatgataaatagaacatgttccataaaacagcatttgtacatatcctctaagtcccccccagcagggcagtctccaaggttagggaacatctctgcatggcccacaccctcagcccagccttgggcactggaagtgttctgcagatattttttggagtgaattgacagacagaaaatcctcttcctccgctccttccccagattgttatgtgaagcccacaatggcaagaacctcaattgcttttgcaccaacctatatctacaccaacctatgtataacagaatgtatatacattatatatattcacatatatttctgtgaatcctccagccctatgctgagtctcagagtcttgtccatctgattttgtctctcagtccgtgtctacaggatgagtctgttgtccccttcacactgggtatgctctgtgtttaggatttaggatttaatctagcatttaggattctttattccttaggcttccctccatccttcttcttccctcacccttattctgagggtgttctgcatctgagcccactaacaagtagcctgcacgtgccaccccagcccccaggcccctccaggagagaaagaaagctttagtggcctcaactttgcagcccttccacctcacgcttgttcagcacaaaaagtggggagcaatagttgaggtgtgagtcaccctattcattgggctatggttggcagccccatcagggagsctgcagccagattcgcaggatggggaagggcagatggaacagcrggccagcccmagatagctcttcacaaagccctagcctcrgggggaattgagggaakaattttcctgcctccacccaaagccagcggaatcttgcccccatcccaacctgggtcccagctctggtcctagctagattctcagaatcacagggccctgaggggagtggccactctggatctgcagagctggacacaccaccccctccctcctacagcccaatgtctctagggctttcagaccccagtctgaaaaccggactaggtagaaaggcaaatgyccagacataaagcaactgctcagccttggctcagagggcctttggaggtgagtccctgctgccattattgaggtcatagtgacaagttaccccctggagttgagtttttcttgtgcacgggcttcgcacacattgtgggtcacagcataggtgcaaaagcatgtggcaccactccagaccaygtgttggtcctgacccagtccttggatgggtctgggaccctgagcaagttgcctaacctctcactgcatagttttgtccagtgcagctgrgagagaagggaggggcctgggctcattggaggggccatgcaagctggaattttaattttgagctggctggggctgagcaggaagggaggggcaggccygcagggggctgtggggagcagccttggcccccatcccttagattcagcagccgattggccctggcaggagarggtgcagagcagagccctccgcttccctccagcaggcccctgcaagtctgaggaatgttcttccctcgtatgaaaggtgttttgctcatggcacaccaaactctttgaaaatcccccttggttgattgaaactatgggctggaaatcaacaaatactttaattagtcagagggactaaaaaaggatatacagcaaaatcctctgcgctttgctttctcatagagggtggttttattttttaaataaacacttaygtaggagtgaccatgtgccaggcactgccctgcacactttacatatatgaatmtgaaactagagcatgcaaagaagggctcttagcacttcctcagcttggctgtccaatgtaggtgtcagtgtgtcccatactctggggatttgcagcctccctcttcagtggagaggcagagacatgactcatttacaccaggttgtatccctgcagcatcagaggtgcagaaggaagcttgctgacatccccaactcacccactgttccatttctccctgctactttctgttctctcaccagtagccacaactgggaacggggaggcagaggagacgctacagctgcccccctccccaagtttgtgtttggctcagggcttcctggtcctgggagggagggcaagtgccggagacagagccttattccatctggctttcctgctttgggtgagcactgatcatgggtggggggaaggtggggtgagtcaggtgagctctgatcatgggtggagggcaggtggggtgaatcagtacagaaggtggtaatatggtgagggagaaaagaaagtaaatgacagcattgaggctggagctgttgcctctcccagggccaccctcaggaaatgcactcggcatctgcacagtcctcaaggccatgggacaccttgctggccccagtcccaccrtctatgtgagactgtgaccctgtgtccttccccatttcctccctcagactccaggacacactcgcagctcccatcttcatgttccgtgrgcacatgtgaacactgacctgctcactgtccacttggaccaacgatcactgttgagggtttgtgaaaacaggttaaggcttcttccaagggagacgcagtgcaaaaagcaactgagacaagagagcgtgcaggagtgtttcaattcatgccagtcattgaatcaggtcctgttccacatgtgtgacttggccaaggcagatgccatgcactggacttctggactctggttgtgtgaccctgtacccttccccatttcctccctcagactccaggactgcgaacagggctgggtctcctctaggatctccttaccagacccaggatggtggcccacaccacttgacagtgacgggtcactgtgcaagggccgggttagggaagctggcctgacttggtttcagagaaaaaaaccagcccagtgatccatccatagaggaacaggctgagttcagggaggtggagcctaacgccaagcccttggcaaggtgaggtgagagccaagcctgggtcctggtcctgtcccacacgctgttgttgccctgcactgcccatctgggcctcagcaagagcctacttgtctcccagtccaaggctgcacgtctcagtcctcttcagagagccatttcccgagggctgtgtgcatgacagggctgacaggtgacygtgatgggtgagggtgtttttactgctccccacccctcccctgtccagagccctcatgtccaggtgctggtctgggtctttccagggagcagactggccttcaagcctaagttagcaccgaagcctgttcctccaaggcatttgtctgctctaggccatgaggtcccaccagtctgcagacgctgatcrcctctactccagtggctgatartaaggagttagaattcacacatgactccctctgcccgtgcccagagcctcacagtrcttagctgggcctccagtcaaacccacatcctctgtaacagttgtcaaggactcccactatttcttgctcattcacaagtccctggtccccagggcctttcggcctcacctccactctccagccaggtggatcccttcacagcctcaaccccatgtcggccggttcccgatttaatgttagagggtcagtgctcagtgctggttctgcctgctccctccctccctacactgtgcctccccactcccatcttctctggcacaaaacgtgaaacaaggacccagatgccttctctggcagtctcttgcaaatgggggagatgtggagatgtatctgacgatttctaggcagcttgtctctctgaagttctggactttcatgatccccaaaaagctcacagcatgggatgagcctgagccctcgatgtgctctgtggcttggtgaaagatgacagcaatcaccacacttgagtggcactgactgtgagccaggcatggttctggatgtatcaactcatttactcctcacagcctcgtggggtgggcctaatatgatccctgttttgcagatgaggaaactgatgccctgagagggtaagcaactggcaagtgacagagcctaggtaagagcccaggcaagggtgtctccaaaagcccttgtcatcaccattgtgggcacttggattttcagtgcaggacttgtgatttgactctgaagaggatgacttcagcagaggcctcaacctcyggatagtctgtgaaggcagcaaacagagagggccccagataccactcagcagtcagtataccayaacatcttccagcarccccaagagagagggacccctgccctggagtatagacaggggaggtgcccttggagaccccctcccttctctgaactgccagaacccagggcaggaccactaagactctggggcaagactcaggggattggggttccctataaaatcctatacaatgtcctcaagggggaagcctggggatcgcctgacacccatctccctcctaccctggcactaggcccagggcaaagcccagatgcttcctggggcagtccttccagatgcatgagacgtggctaacaactgctgatacttcctaataccttgggagtagcccagtgtcttggcccaagcttcagygattcgctctattcctcccctctccaaaccccacaaccgcttatggccaagacactcaaacagggccctgcaacactttgttcaggatgagcagaggccatgatcaggagagtatgaaatggaataacccagcctgagcattatttggcattttggatcctttgggatgggccaaaccaccctgtggcctcttagagactgaccagctccttgcatgaggctgccccacttagaaaagaaattagcaccattcactgagatatgtagcctcgttgcttttggtgatactggacctgatttcctccagcccttctttgaagtgaatggatactgagtgcttactgtgtgcctgacattgtgccaaaatgtagcatgcgttatcttacttactattcatccatattcatccacaggtgatcagcactactatttgtcccgttttctgagcctcagaaaggaacatgtcttacctaagctcatatggataatatttgtcaaaactggaatttgaccccaggtctggctgctcctagagcttatgctctcaatcagcacataaggggaattgctgaggggaccctgaagagccagtatccccgtcagcaacatcagcagcccatatactgaagtcacgcaaatagacatgccacttaaacaaaatggtatgctcctctgcaaaccagctttgacacagacctgccatgccaccgcccctcctaaccagatcgccacctctaagccccaagccctacccaggaagaaattctgggggtrccactagggtcatcaatgccacaatgccccctgcaagatgtagctgcgagctctctgggtctrtgaggcccaaatgctctccatctctacccatcagccttcccaggcagggctgtgccaaggagtgaacaaaagctccattcaccatgaccctctccccgcccccaccatgccctgcttccctcctctccctgcttctctcctcagccacctgccccaggagtcccagccagtttctcaatctgctctgaggccttgacccagccatcagcctcctcatccccaggccatcctggaagggagggcctcagtgtccagggctagggagacactcagcagccactgacgccacgcagcagatgccatgacctgtctaggcctctcgggcagctgacctgggcatccctgagggctgggccccctcactctggcgtcagtcatggcctcctgcaggttggcacgccrccctcagcaaagaacaataacacgttatggtctgcaagtcctcaggtacaacatggctccattgttctgagtctggaaaatgatctcactctcaccctgagaaccaaggttagccccagtccttcggtgaagcagggccttcctttgcccaggaatgcacagtagcttcttattggccttatgctcaacaattcrttcttctgggtcccccttcctcatcatccctcctaccatctatgataggtggaataatgatccccaaagaagaccccatcttaatccccagaaactgtacatctgttatgttacatggcaaagagacattaaggctgaagatagcatgaaggttgctaaccacctgaccttaaaatagggagattattctggatcatctgggtgggcctaatataatcccaaatgtccttaaatgtggaagagggaagcaggagattggagtgacaccgtctggggtgaacttgatcccctgttgctggctttgatgaagggaggagggccatgagccagggaatgtgggcaacttctagaagctggacatgcagggaagcagactctaccccagagtctccaggagaagtcagcactgccagcatcttgatttttgcccagagagactgtgacctctagatccatcacatctcaaatctgtgccgtcttaccagagtttagggtaactttactacagcaagaacaagaaacaatgtctagacacaccatctctatctagattcggctgcagccaagagagtcttctttttctctgccacactctggagaccctcttccaccttcatggtctcctcccctggccctgcctcccagccctgcctgcccttccttcatcgtgaattctgctcctggaagctccctccaaaaggtggcctcctcctgaggaccrcttttcaccacacttacttgcccaccccacagacctcgctgagcaccactgtgtagccgcaggcattggactaggtctatggaataagtgagcaggcagccttcaccatccgctggagaatctgccaggaccctctgcgggacgtgtgctttactgacccagcgtctctatgtgtttgagggttttgtccaccggtctcagatagaaagctcactgtggatttggtccctgagtctaccttcctcagtaccgacttcctctccccatccctccacattgctttgccccaaggcttagcaggagctgtgccctgtgctgactgccaggcttaggtgctcactctctggctgaggggaggaagaactggtgctggaattagacccaccctttggctactctttgatagcagtgagccctcaaatccatgcctgctgcacccagaggtctgatgaagcacatcccaccttcccagccttctcctggtttgtggaggggattggtctcccagcacctcagtggcctcatttcccaggcaactggctccgcccattgctgcttttgtccacttttggttcttcccccattgctggctgctaggtacaggttctcactctggaaagaccaaggaaggcaagatggcagcttgcagggaatagtctggttggtgaggcatatgtctgtcctagaatatgacaccataactgggatttctctgaggtcgttgccctggcagacaaatgtagacatttcctgagaggcccagctcctgtggggaggcagtgaaaaccagcctgatgcacaccttccccccagatagtcccagaggactcagcctgaaagaaatggaccctgtccatcttcccaaggccccatagccttcttagttggcagagaactgtggcaccctttgtgtagaatcttgacagagtctactgattgaggagaagaggggcmtgccacataggtttatctcatcatgacctcagcagggagcacaatctaaagacaaagtatttgatctgaaaatagctttgggctgctcagcaactctgtcctgcacttcaccctacaccctcgtgagggctcccacagcctgcaccctctccactcccctccaagaaatgagcatggcgggtcctaatgctgggggacagctctagatgaaagtggaagggaaagagtagacaagaccttgagtttcctccctgaggaagccaatccaacatgggagttctaacccccaatcctggggttcacattaccaaattgagccccaccttgtgagtcagtggggcaggtgcctcccaaggcctccagcgccatggattacctgcctcggtcaggttctagagcccagcttggccttggsstgggcagcaagttggctccaggcttccttcctatmtgctcaggtccagcctgcagttgttttccatggacaagaatcctaagatggctgaggcgggcygtttccaaaaccctcctgagggctgagggcaggagcttgtcaatcaggcttcagagtctatactccctgttcctattcatcttgctctgaagcagaattggcctttaaccagcctgggaagcatctctcttcagcacgtggctgggccctaagtgacaccggcygcctggtcgcagacatgctcctccacctgcctctgaaagcagagtggctgtgtctcccttccacctccccttcctggagcaccacagttgcactgtgcttgccrggaggcaccagagaaatggagctcaccacatacgcaccagacccaccgtacagctgctggcggttctcacggccagcgtgttcttcktcattgtgagttgaaatctgcctccctctaacatccacttccccatcrttgttccgctctgtggagtttcacagaagaggatcagaccctcttcctctttgacaagtatttctatgtttgtggacatttcttggtctcccttctccaactccaaggatgctgactcctagggagaagacatggttaaatcctaggctgcttacaccggcagcttcctgacccagctcctcacagccctcaggagtgtctgcagcccttgccactaacgcaagcccagtatggcattgctggcctctccagcggtgccccttcagccctctttcacatttatatgagtcaaatatttcccaagctacgstcattcagggaccaccaacagaagtttgcctgtatccacaaaccacttgtcctgttattttctttaataygtgtcttgtttaattggcttacatattgacctagtatatttgtttgataaggaaactctgttaactactgacttacatattttctaattacaccaaaatcatgccatgaccataacacaggctgtgccatgcaacctgaagtgattttgtgtgcctgcagcagcataccctttcttcccagggagctcggctttaccacatctgccctcccctctgccyctcctcaagccttggccccagacgacttctaacatagctctgggctcctcctttgagtaagtagttttagagatagacctttcttgtttcctgggtccctgttcattctccagcctggaaggccaagsctttcccttgctctctgatctcaggcctcttctcccaccacacaaggaacctctcctgcaacacttaggagagggctgggttgtggggccagggttcatgcctgggccgccttaaacctctgagtgtccagctgtgtgcctggatgaacacacacccctgatgcagagtcagggtggygtgggggaatctctgtaatgacaccatcgaggggctggaaaccacaaatgagcacttggaaagttgtactgcagtccttagagggtgagagggtgagtgtggcaaactgcagcttctgaccaggccgtcaaaacaacaggggctgtgggaggttcagcctgggtgtgttggggaagggggagaaggctgtggtgccccaccctaccccaccccacctgtgataggtgctgcctacagagagatgctgggaaccactcytgccgccctctggcaagacctgggacaaatacctgaaaagcttctcaccctaaygcacttggcttctccctgggtcactgggtcactgggccccttgcttggttttgaccgtctctgcagttcctgcccagtcccaaaggctgactccagcttcatccttttccctcccagacccttactgttggccccacacagagtacccctcctctctggaagccctaaggacccttgctactccaggacttggacctgtgtcttcaggtgcyggatctgggacaaaagagggagacagtaaaatttctctctccctaggtaggagagaatatggcyggccacttcaccctggtggccctaagcatgtttcatagtccctctggccctaaatttccttattaatataaattggttgggggggggttgctaataggattgttgaggatttaataagaaatatccttaaagaacgtagctcatggcctgacacacaggaaaccctcaattaactatagcgatgatcactattcccaccttcaaggtttatctctgtgtttatttcccattcccatttccttgayrggctctgcacctctcctttcctatcccgtcctcctgtcttttgacaccggaagcttggcctgggtacctggttctcccccagttggtgtcccaagtgtgggtgctgtctccaaagtccccttagacttggtcaagaggggcccctgccttgggccttctagttgcccttgttccacagagtgaggagtctgcagggccaagggccatgctcatggggtccacactccccttctagacccgctcagctacctaaaaccccagcattccctccccagtgactcccagcccacgctcaggcctgtcctctggagagcagactgccgggtgctgggcacacctctaggctgtctgcagattgtggttgtgtaggcaagggagcaaagccaggggtaggaagagaaaggggcaggctgcaggccaggagctgggaattctctccatgctgccacattccagagttctggaactctgacgagtccaaaattaaaatctccaactgagcctggcctactgggtycgtctgtgggagactcaaacctcttggtccactggcctggagacattttagaagtggaggctttgtctcggagcatggaggggataggcctgcctgggctcccggcctgctgactgtgttctgcttgacaccaggccagctgggctaagcgttcagatgyaaagaggaagctgctggggcctcctgacagcagatgcaaagctgaggtacccaaacacctcgacctttctcaggggctcatgtaagcaaattgctttatcagctttatcagtttttayrttttccttacgcattttcatagaatttgccccatattccatgccattttctcaggacatccttttgagcatcctggacccaaccgtcttcatataagaagaaaaattttagttttggtttcatccatgattatcctagacccaaacatttagaaataagttgttatatggaatagccacccgaaggtgtgagtttgggcataaaaagcacacattgcatatatccttatctgtatagagtcacgtggacctgatkctgccaccttctggctgcgtcacctggggcaagttatttaacgyctctaagcctcaggttccccatctgtaawctgaagccctggcctagtagatctctagataaactctaacatcactcctacccctaaaactctggtacttaccccctttactcttccytctttattttgcattcagcccagggatctcatcttcccaaagcttctttcatgttcctgccccttttaccttcacagttcctgacattggagaaggcagtgttttaaagcccagctccaatgccctttaatccagaaagccacactcttcagtcgctacattggaagacccaccttggaggctggacggaaacctgggggttcacccagctcaaccccctcatttaacaggaagggaaactgagggcaaaatgaggcagtgacttagagacagagccaggtctggaacccaaatgccctttaaccttgccacctctgggatccacaaccctcagggccaccattttaacttgcacatattattattactgtgatcatctgtgcttccttagaaccttaatacctctgagggccagaatcacattgtgttcattctgtakccaccctgtcctgcgccaaccctccagcatcatccctgtaccagatggtacctcaataagtgtctgttaagtttcactaaacataaatcccattttgatcgttgcaaaaaaaccacgtctcatttgaagacctccctgtgttcttatatctgactactgttgtggtagagcaaactgaaarggtttgcaaaagccgattgttaaattttgaagaacgttgtgagctgttattaaacatagccataattcaaattaaattatgtaaaattatagttaaatacattgcattaaaaacaaagggaagaaatgtttaaaactcaycattttctaattttattatactttactttgatatattatcaaagttcttgtggttgttgacatttattgaatctacatgcagaaatcccctaccatggtgttcacatctctttccagcctgtaatcagtgacatcatgttggtagcttgaaatcacctttgtgggagaatttaccccaagcraactggcaagcactacaaatcagagcttggtttattgtttggttgattgtctggagctgcacagcctcacacagctgccactagttccatgtggctaactgagcacttgaaatgtggctagtccaagcttagatatgtcatatgtactggatattgaagattcagaatggaagaaaagaatgtaaaatatatcatcaaaaatgtttatattgattatctattgaaagaatagtgttttctatatattatgtcaaatatattagaattaatttagtctattccttaaatgtggctactagcagattttaaataatatctgtggctttcattgcatttctactggacagctctggtctaaatttaataaagtgatggggaaaatgtttataacgtagattaaaattaaaagtatgttgtgcccattgataataacattatgaatagccaaaaaatacaaaataatatcccggtatttaaaacccattatctgattcagccaaaaagtcactcacatcattgaggagcaagtaagttccaacattcatcttcatcatttcacgttcatcttaactgtgaagatgaacatgggagctaacattcatgtgggggctatgctggtttgttggttgcagccactggccagccatgggcataagagtttgkcaaaagccaactgaaagcattccatgagggtcacttggctgtatcargtttataataaagagtattgtagggctgggcacggtggctcacgcctgtaatcccagcactttgggaggccgaggtgggtggatcatgaggtcaggagatcgagaccatcctggctaacatggtgaaaccccatctctaataaaaatacaaaaaattagccgggcgtggtggygggygcctatagtsccagctacttgggaggctgaggcaggagaatggcttgaacctgggaggcggagcttgcagtgagccgagatggtgccactgcactccatcctgggcaacagagcgagcctccgtctcaaaaaaaaaaaaaaaaramkacttgtagattttattattatttgtaaactgtatgctacatatctaatatagcagtaaaacttctagtaaacttataacataaacataaatacacatttacatgtatatatatttgtatatatacacatctatgcattttttcagagagctggttgttaggctcagcagcacactttagttaccagcacaccactgtctccacccctctcgctaccctgtgagcccattgcccaggccctgtcctttgtggcactgacagcctgycccttcccttccttcattttccaaatccgcagagtctcagaggtgtggactagaggtccctgcgcctcctcttcccctcctcccttttttccactttggacatctttttcagtctattctccactccactgtcctgcctcccatcccagtttgtagacacgtgccctggatagtcaaccacagtgccacagagatgtcattccccaggttggcactcagccccagccctgcctgcctgctcttgcccttcggtactggctgctgacaggcctggcactcaggatgtcaggtggtgactaggtctcccacctgtctgctagtcttttctaaccccatcaaagatagctctgaagcaagaccaaggggtgcctacatcacagagaggggagtctgtgccagtgaatggtgtccagagcactggggacacagctmtgcggctctgcaggtttcttgtaatcgccatcatcgcaaacaccttgtgcagcctgcagcaattctgccatgaacaccacacacaaaaaacactacaccacccaagctgtgcccaccaggaacctccaggatgcaggggacacattgatcaagacttccaaaggtcgaggagggggtacttggrggtagaagtagcaatcctgtttaaagtaaatcatgaactttggagcaaggcatggccttagaaggagactccaagagttyggttcagggagaagtacaggggaaagttccactgcagtggggtgagatggagaaggaagttagagactgaagctctgattagtcccctggaggaggcaacatttcagaaacgtggtctaaaatacactggtctagggcacaagaagaaggaggaggagacaagtactcccgctgctgggaaatcgatttaggactagagwccccagtgaacccctaaaaattrcccacagtttctagggtaggtattattgtatctaataatagyaatcatttattgctatagctaacatttattgagctcttactatgggcctgggattttatgtctcaaacaaaaagatgcaaagaagtagttattattattattattactgttattgttattattatcctcacttctacagaagcgaaaagagactcaagaagattaaagaacttgctaagtgtggcagccctgctggaggctgggcccagagccaggccyctcacccctgcaaggcatcgctcctgcaggatcgtcgtcaccctcatcatcgccatccttgttcctgacaggcaggagatcctggtatttttctgtgtgcttccccttctccatcccttttggtgattttctgaacattgtgcagttgacagtgtggtcatattcccatcgtgtagatgaggaccctgaggtacaaagaggtgacatgggaaatgctgagacagggcgcaggtttgatgtgtttctcagtagtctgaagcaattgagaaaagtaagtgcaatgcagtaaatctttcatggggctagcttgactttatctaaagggctgagcttagtctgagagaatgtccttcctactgttaaattgtccttttcttttatgaaatgatgacggtagtgggtggtgattgttgcactcttaatgtccaattttggcaaaataaaaggctggctctctggagctccaaatcagccccagcagctgatgtgaaatgctgtttgatgatggttgactcctaacgtctgactgtagtggtctggaggctctgggcctggctcagkgctccctcactgcacatctcttccagccaaagcatttacccagggacacctacgctgctcacaaacatgaaggatgctcaaaggtggtggccctgccacctccatctgagttgggaaaatgccttccattacccctgaccatggattaaggggtctcagatccagagagccctgaggctgagctggacttgcctgggaggatgtgcagagggaatgccccagcctttctggcttcagagggtgcagtgtccccaccaactctctttccaaacctgcctcagcctgcatggggcccctttccctggtactcactttgtttgctttggggagaaaatcgagaaagaatcttccctctaccctcccttgtcccagccatccctaaagcagtccagtgttatgattcatccaccttttatttgcttcaaggattttccatggcatctcagaggcccctctcttcccatttggctggattccaagaccattaaagatctattcaaacaaacaaacaaaaaaatctggatcgagtgagggcagctggttcccatttggctcagctgtgatcctgaagtttctgtgttatggtgtagccttcatttctgsatcatcagtggatttctctaccgctttcactagcaccagctgtggactgcaattgtactctagtcaagtatggagggaataagaaatagttatggcagaaacctgggcttgaaaatgcatctctccttgagctggcactttgagaaggccacaactgaatgaagggacattagagagtgagcctcaggtcaggctgcaggcctgggaaggccaagggtagagccagctgggaagagacagtcctcattgctggccatggagggagtgagctgttgggagcaagggcccgtgtggctggagggtgraggtcagatgtaaggtagaacttttctaaagccaggatgggagacaagatggccatctccagcctgctggaccaccacaccaatgtctgaagaaaggcccgtgcccggaagaggccacttgcacggccrgccccatctcctctctccctctccagagccttcttgctggtctcaggtttcattctgatggttctgctcccagttaactcagctcaggataagctgtccaccccagtctgctccaacctctctccctccaaagtcacgcccaccctccacaccccagttccacctcagtccaccacctcctccctctcccaactcctccctgtccccattgcttcctgtgggtcccacacctcctscattgctctagccacctctggaccagggcttcaaggaaggcaaaagtggagcygagtcctaggcactgtccagacacccccaacactgagaggatccacctccacggcctggaagtgacaacaggccacagcctctgcgggcagcatgcagtaggaaagcccagggaaaagggacccagccagtgcctgggacccagagacatcaggctttggctgatggaatatgatagaagtgccaacagaaaatgggcagggagcctgcaggacatcaggggagggtggaaaggtgcagccgcaggggcacagagttcccatcccgggaggcagggcagtggtgtggaaagagtgtgggttatggagagacagacctcaccggattctggctctgcagccctgggattggtatgtctctgccttgggaataataacacccacctcagagggatgatgaaggagctgtgcccagcctccagagcctggcccawggaaggtgctccacaaacatcagcttccgtttcccctgcccagtactctgggtttgaagtgcaggacaagccatgggggcgaggctctgcagatggagagaaggagctgagcagtggccaaggctgggaggcctccgccacctmggcaagacgcccaggtgccatgggaacctgctgctctcctcagccccagaggtgtcctgagggtgccaacctccatgtctacagccggcttracccccagcagcccctggtggttccctctctgggctgctgtatctggcttggactgctgcaggcaccctccagttgggtgtcctgaggaccggctcctgtcagtgtcygcagggaaagcctggagtcaaagccccatggggaggagagatasgccatcagctcatgctgagtgcaaatgggtgccaggcatgtgctgggaatatgaaggtgaaggcaatccagtctctggtcactggcactaggakagttgccagaaaggrccagtaagtcctttctgtgggagtaactggaagagagaagggctctctcccaagtggcaattgtcaagcwttgggccttcactgtctgcacttgaggaaacagactccatagcgaacaaactatgactcctctcctcatctcccatagtcctgcaatcacagccccctctgtctttggatgccttcttcacccbgccccagccatgcagccccgcccccaggctccctcttgcacaaagcgctcctgctcaatgaagctgtccagttgcttgtagtgctgtcttgggccagtctctgtctccagcccaagagatcctccagcatct

SEQ ID NO: 10058 - DNA, 40000 bp, Homo sapiens
gtcagttgattttcaacagaaatgccaacgcaattcaatggggaagggtaatcttgtactacaactggcccataccagcttgcaagaacccgttgtgcaaacctcttcctaactccacattcagtgatgtcgggttgttagcttgaatagcccggtgtgaatagttacatcacagacattctcaaatactacaaactggggagctttyttcttcctggatagctggttgttaaacatttatcagtattccactggaggtgttcatgatcttgattgtaatgatgattttacaggtgtatgcacacattaaaattcctcaaaatgtacacttcaaaaatgtgtagtttattgtayatcagttataactcaccaaactagaaggcaaaaataatgcatgataaaaagttgcacatctacacatgctcagaaattttgccacataaagactcacactggaaatcattaggtccrattgatgtactaagtgaaaggaacaaaaatctaacagatgctccaaaaaaaatgcataaagcaaaagtgatcaaattaaacttaaagtgtgtattatctataaaawtattaagatcaaataataaaaggaaaatgaacccataatacgctacaattaaagtttatatatatactattagcatcacagatgttgagggtagataaataccgtgtgaacatgctaagttattgtctttattagaaaacttcttaaaagtaataaagagttaagaagaaacaggataagtgggataaattgaaataaatcaagatggtagaaacagttcaaatatatgtatggttgcaataaatgtagataaaataaactcacctagacagagattgacaatttaaaaggaggcacctaagcaaaaagacatgtgaaagttaaaactttacaggtaaaaaaaaacacacactcaccaaataccggaaaaagytggtattactatattaatatcatataacacagacttaaaaattaaaagcattattagggataaaaagagttgtgcgtraagatgaaagattgaayttaccaaaaagatatactaattttaagcacatatatatcaaataaagtatcttcaaaatatataaaacaaaaaattgacagaatacaggaggacattggctcatgcctataatcccagcactttgggaggccaaggtaggaggatcacttgaggccaggagtttgaaatcaacctgggcaacataatgagacccccctcatctccaaaaaatattttaaaaacaaaatttagccagtgtggttgcagatgcttgtagtccagctactcaagaggctaaagagggaggatctcttgagcccagaagtcaaggctgcagtgagcaaagatcccaccacagcactccagcctgggtgacagagcaagatactgtttcaaaaaaaamcacagaagaacattaataaatcaccagtatagtaagagatttttgacatattcctttcagtttttgacatattccttctgttaattttgacatattaatttcagttactgagaagccaagaagagctagacctaattttatatataacatgtgtgtatgtatatttacatacatatatgtatgagagagagaggagagacagagtgttacatccaaaaatgggagaatgtatctatttcacatataccagaatgtttataaaaattgccagccaggcgcagtggctcatgcctataataccagcactttgggacactgaggcaggtggatcacctgaggtcaggagttcgagaccagcctaaccaacatggtgaaactccatctctactaaaaatataaaactagccgggcgtggtggtgcatgcctgtaatcccagctacttgggaggcttgaacctgygagacagagtttgcagtgagccgagatcgtgccatcgcactctagcctgggcaacaagagcaaaactccatctcggaaaaaaaaaaaaaaaagtgcccaggtactatgccataaaaaaagtacccaaaaatttcaagaagtaggatcattttaaaaaattgtttttaattgagatagggtctcactctgttgctcaggctggagtgcagtgacacagttataactcactgcagcctcaatttccccagctcaagtggatcctcctacttcagcctcctaagtaactgggactacaggcatgcaccaccatgcctagttaattcttgatttttattagagatgaagtctcactctgttgcccaggctggtcttgaactcctgacctcaagtgatcctcctgccttggcctgccaaagtgctgggattacaggtgtgagccatcgcgccctacctgggatcactaaagtgtggtaaataccttgagaaaatacaaggggaagatatggcatacacatgttttccaaattcaatcatagaattactgccttttcccaccatccttcttttactttttttcgcaagatkcttattaacatacccaggaactttcctttttaaagaattcacagtcacccttataaacattcattcttgcttcttgtgaggcttgtttgttgacctgtggacatttactctacaggcgatggaagcttgcaaagaygctggcttggtgaaatccctgggagtgtccaattttaaccgcaggcagctggagctcatcctgaacaagccaggactcaaacacaagccagtcagcaaccaggtacagcctaatagcttycactakggtgtggggagtgggggcaggatttacatgacacaaagaagcctcagctgggagtcaggaaggctcatgattgctccacctaaatctcatcatgggaccctgtgcaagtctttagacttctttctattggtgtcactttaaaaaacggacttggggcctggtgcggtggctcacgcctgtaatcccagcactttgggaggccgaggcaggcgatcrcgaggtcgggagtttgagaccagcctgaccaacatggtgaaaccccgtctgtactaaaaatacaaaaattagctgggcttggtggcacatgcctgtaatcctagctactcagggctgaggcaggggaattgcttaaacccgggaggtggaggttgcagtgagccgagattgcgccactgcactccagcctgggcgacagagtgtgacttcgtctaacaacaacaacaacaacaamaamaaatctaatgaaaatcaatgaaaaaaaatgagaaaaaacactaaggctcaacagaaaaaggagtaaaaggaatgaacagaaattcacgaaagacaaattgcaagactggtacacatgaaaaaaaactcactattaattagagaaacttaaattgaagtgtgatttttctattgcacatcaaattagcaaagtttttgtcttattaatatttttaaatataatgcccccrtgtaggcaagtgattaaatgctagtgagtgcaaattggttcagccttactaaaaaaacaatttgtcaatatgtatcaagggccttaaaaaatgttcacagtcctttatttctgcaatctatgctaataaaaaaatatcagaatgcctagatagactgatgtgtgtttactacaacattgttcataatggaaaaaaatggaaacaacataatacaaaaaattaaggggatgattaaataagttacaagacattcatattatgtgaaatcttaacaaaagatgttcttgaatccattttaaggaagcaaaatgaacaagatatgaagggacagactaggacacgaaatgtatatagtatgaaggagattctattaataaaatggattttattgaagaattttttttaacagtacaattgcattcaacaacgtggccttgattttgtgctctgctctccaatgyaaccacataggttgagtgccatcygtatttcacccagccaaaactcttgaaattttgccaacaacatgacattgtcattactgcatatagccctttggggaccagtaggaatccaatctggtaagtaaaactttaggaagcatttcctttggtgtagagtgtgaggctcatgtgaactactgtatttgattggaatgccttttggtttgcctgtgcaacctcttcaagtcattatctgtatatatgaattagaacttttcatactttcctgactgagctgttgtaaaattgattacattataggtatgaaattgcctatcagtgcctgatatataggaatgctcagtaaaagttagtttaattattatttgacaaaggagtttctatggccatgttttgcaaattttcaatcttttgatctctgtattcamtagtgatacttctactatgatgtgctccataaacttaagtagaaatttttctactttaagatgattccaaaagttgtgtctctatttcttccacttcagtcttcctacctttccctgtatgccagctctctctataagactcatcaaaaaatattatttaccctctgaaggaggcagctccataaacttgccttgcttgatcttcccatactacgagtaactctccattcagtgcatactctgcactcagagaaactggttacaggtgacctgcagtgtcctggtaggtgactgggtgaatgggaagacagaggaggaggatggtttattaacctttggttctcattatgcaaactaattatgatgcatgttttgatatttttaagggtgaatgtttcttctccacctttgttaaaggatgcacttctaaactcattggggaaaaggtacaataagacagcagctcaaattgttttgcgtttcaacatccagcgaggggtggttgtcattcctaaaagctttaatcttgaaaggatcaaagaaaattttcaggtaagagaattgcttttggagatgtgaaaagatgggtatgtttgctatttttgcttttatagaaygtgttcagcttaataggaaacctgtaacrctctcatattttattttataccagccccttgacccatgtagcccatatctaggtttaattttcattcaatttgagacaattgctagtacttcagagattgctttgctacttgtacactatccagatctcttatattttctctttccttatctactttttattttttgttttaaattttttttttgtttgtttagagatagggtcttgctatattgcccaggctagtctggaactcctgtcttcaagcgatccttccaccttgacctcccaaagttctgggattacaggcgtgagccactgtacccagcctcttcccttatctattgacccttgacactacctactcacttctctaccagcacaacagaaattgagtgaataaaatttggaattcataatagtcaactttccaccttcttaatggctctggtaaaagttgaggacaaatttgaaaattattgaagaggaccatttagacttcatgaatgctaattgcctttayttccctctataagtaatctatgacttacgttgtaacttccaagtgaagaaagaactagacaaaggggtaattcatttattccgctactactaaagactaaactgctaggtaaacacaaccatagaaaagtgccatacaaaattaattaattacccattagctaatttacatttcaaaagtaaattgcctgtttagccctactcataattaaagataaataaaaagtaagatactagttgtcccttcatatcagaaaataatcaaaatacttggtaatatttggggaaacaggcgctttgacacactattgttagaaacattaatttgtatgagatatggaagagtaggttaaattatttcatgtccatcaaaattcaaatgtacatgttacatgatttatttatatgtggaacctaaaaaagttaatcacataaaagtaaggagtagaatagtggttaccggaggctgagattattgaagggagggtgctatgaggagatgttggtcaaaaaagttgtgattacagttagaaggaacaaatgtcaagagatctattgtacaaaaaggtgtctatagttgatgatgatatagtgtattcttgaaaaacataaagagagtgcatcttatgtgctcttaccacaaaaatgataactatatgaggtaatgcatttgttaattagctagatttaaccactccacaatttatatgtatgtcaaaacatcatgttgtatatgataaaaacatacaatgttatctgtcaaattaaataaattcaaatacacttatccattgactcagcagtcttaccctatagatgtatttgcacatatatacatgggtgcacacacacagacagatgtttattatagaattctttgtaattttttaaaaactcaaaacaatcttcaacaggattttataaaacaagctatgacatatttgtacactgaaatatcatatagccatttaaaaaatacaagtactgacataggaagatagccacaatattagacaattacatcttcagagcttttttgctacatgatagaatgcaactcaaactttagcaaaaaataaaagataatttattggcttgcrtaactggaaagtccatgagtagatcagaaatggctagacacaggtactcaaatgatttataaagagatttagtcctctctctctctccctcctttctctccacccacatggtggcacagacaattcctaacagctccaggataatcaattactcatactcagtgaagagtgaagatgatcagaaacaaagtcttctatcagggtctctatcaatccctgattagctcctgaaggtcaccctcatattacccactgtggccactgagtaggataccctgaccccagggctatatccctattcctgtgctgaagaagttaacagacagctccactagaagggggaaggaaagttcgtaaaaagaaaaarggcgaaaagatgctgaatagttacatcaactcctgacaataacatttgccaaaatgcctcatcctaaaaagtggttgacactcttttccacaatcttagaaagagatcaactgcattactaatgtgtaggytcattgaagattaaaacacattttgatggactttttgaggactgaaaattttgctgttcaaaaattatargagtgttacaagtgacctttgcgatggaaagcatttggactttatagcatctagcaaatcgcaattttgtaccagagaaaatgccactctccttgaaattttcattgtaactaattatgttatattccatatgtttccatagccttgataataaaagaatggaactcagaggtcacatattccaagaaaaaaacggatacagatttagaaggaaaatgagaatgaaaatcacagccaattctcactctttagggaatagactcacccaataaccatgaattttgctgggtatgaaagcaaggagcaacaaaataawaaattatgctctcttagaatgaaggtaaaataaactgttagaaatattttaaaagaatggcaaagatcaataaagcataaagaataaagggaaaaataaatattttgatgaaaaaagaaaagcaaaagaaaataaaaactatgtagtaaaaagttaagactgggcacagtggttcacacctgtaatcccagcactttgggaggccgaggcaggaagattgcttgagaccaggagtttgagagcagcctgggcaacaaagcgagatcccattgctttaaaattaaaaaaagttaagttaaaycatcagtttaggctgggtgcggtggctcactcctctaatcccagcaccttgggaggctgaggcaggtggatcacctgaggtctggagtttgagaccatcttggccaacatggcaaaaccccatctctactaaaaatacaaaaattagccgggcatggtcatgggcgcctgtaatcccagctgctcaggaggctgaggcaggagaatcgcttgaactagggatgcggagtttgcagtgagctgagatcataccatagcactccagcctggatgacaagagtgaaactttgtctcaaaacaaataaacaaaaaaccatgagtttaaaaactagataaaattaaaggtaaacatgaagaaagctaatacggagccaggatattttaaaagttaaaattttaaaaaaaagaaattataccaggtgtggtccagctttgttgccatcatccactggcctccattctttgaagatgttatctctgggctcactttcactttctccaacactcttcctctcataattcttagtgaattcaacatccacaccagtcgttctccacccttatccgacagctctttgacttcctctcccataagaatcttgtcctatatatttcagccactaattcccatgcctakcccttggaaattgcaataacaacttcctaataaatcctccatagcctcaatttcaaacatccccctctctttcctacactagcaattgttcctctctactgtgtaactcccaccaacattcacatatgtagtaacctcctatcttaaaaaataaaatccaacctagactcactttcctctccaagtattatccacttctctcttctgtttcaaacatctggaaagagaagttgttctcgctgcttcccattcccttcccccactatctcttgaagccattcaaaccaaacttttaccctgaccatcccactggaacagcccttgtcaaagttaccagtgacctccacattgctagatccagtaattctcagtccttgtcccacttggtctttcaaccacatctgatacagttaacaatatctccttcttcaaacatttactgaaagggaaaactgtaggggaagcagtttgagaagaactatcaggagctcagttttgtaatatgagatcctcattcacttaggataatttgtgccatgggagaaaaaaaagaccactgaaaattaatccacatacgacaagaaaaaacatgacacagaaataatgtagagagggtgaatttgaaagcttatattaagatcgaaaccaaagtttatgaaagtaagttcacttctattctcaacaaaatgtaggttacaattgcaartttattaactcagaagaaacagtgaatcagtgttgattttttttaaatatgcttgacaaaattacataccacaacatgacatcctctatttcacaaaagttttgcagaatgttcataaagagaataattatcacmaaaattttggagggctttatctgaaggagatttttaattctttaatttttttttcaagtcacactcttttgacatatctatcaaagtagatttttaactgtgcaggattcttctttgaaaaagatcatacctataattagaacaaatctccaagatcattttctttgatttcataaaatcctgcatctttgcaaggtttgcmacctcactttgccattagattattccatatatttactggataagaggctgatcctccaagacttaaaggagaggaytagtgtttagcaaaaaagaagtctgagtaaggattcattttataggcgattcattcatttttatattgtgcacatttttgattccttatgtaatctcataaatgccaataattggataataaatcataaaagaaaatggttccctgaaaagagtacttggaaagaatccatggagggataattaagtaaatcgtgttccatctacacaatgaataccatggctaaatgaataaagtcaggttgcatattgtgatagaactatcactggggtcactaagatattatgtgaataaaggaaagttgtagaatcataaagatatggtccaattactgcattttcctcttaatgtgtgtagtatttgggaggaatatctgggaagggaaataagaatggggtgatgagtgacaagattttcattatttattccatatgggtctatgtacttctacagtgtttcatttctttgcaaagagcgtatatttatgtactacttatataattaaaatctattaatwattaaatatattaaaagttaaaggatagaaagataaaataataaagagaagataggttatatacagataatccaaatgttaaaaataaaaggaagtgaaaaaatatatataaatgttaataagggacaatcataaaaccagaatataaataaagtataaaatctaagaaaaataaaacaatggaaatgtaattagaataaaaaggtagaagagacataaaaaatgagagaaaggatttcaacatagcaaattaaaagttaaaaacaaagcaaattaaaagttttttwaaaaagcaaatttaggccaggcrtggtgaggctcatgcctgtaattgcagcactttgggaggctgaggtgggaggatcgcttgagttcagkagtttgagaccagcctgggcagcatggtgaaaccccatctctacaaaaattgaaaaattagccaggcatggcaaaacatgtctgtagtcccagctacttgggaaactgaggcatgagactagcttgaacccaggaggtggaggttgcagtgagccaagatgataccacagcactccagcctgggtgacagagtaagaccctgtctcaaaaaaaaaaaaaaatcatatttagagactcagaattttttaagtgtaagacagtagttcagaatcaaaagaccagcatttcatacagaaataagaattcttcacatttgaaattttaggggatttcattaacatttgtggtttcagagcatttggaatttcttgtaagatgtccccagaaagacsgtctcaaaaacaaagggcagaacagagtatccagctccacctcagtgggtagccccccaacaccagcctgactcctcttagacatttgcagagatattcatacatctttggaaggctcccaccggtggccccactttctgatcccaagcttgaccttcaaaaatgttctattatttccrttatttcagatctttgacttttctctcactgaagaagaaatgaaggacattgaagccttgaataaaaatgtccgctttgtagaattgctcatgtaagttccggggatcattaatgggtattgaccagtggtattgaatggtcatgtgtcaagcaacaaggctcatawgaaccctgacctatgtccatagcaccagggcaaagcatggtgggccgcatattctgaatgttaacatgcctgagggaaatacatccactacagggccttccacaaccctacactctcactgaaaagaagagtcctggcatctgtgacattttgtgacttcggtgaaggcatgcaggctaaggaacctgaggagaattaattcatcatgtacatatgctaaaacaacagcagcacaaatgttgaaacaacttatttatttattcctaaaaatgaaagtgatgcacaaattagagcaaagttataaaaaaaaatttctaagggagaggcatgatgatgttgtagaaagagcactagattgaaaccaagaacttagacttttagacaaatacttaagattttagtttccagctctacctattagctgacttcctacaagcaaaattccatrtactccttcaaaatgtcaagttcagctaaccaactgaagtagctctttattctctaaatattacaggccctttaaaaaagaatatagttttggccaggcgtggtggctcacgccaatactttgggaggctaaggtgggcggatcaccttaggtcgggagttagagatcagcctggccaacatggagaaaccccgtctctactaaaaatacaaaaattagctgggtgtagtggcagttgcctgtaatyccagctactcaggaggctgaggcaggagaattgcytgaacccaggaggcagaggttgcagtgagccgagatcaygccattgcactccagcctgggcaacaagagcaaaactccatctmaaaaaaaaaaaaaaaaaaagaatatatttgctatatatgtgtgtatagatatacacacacatatacatatatatactcatatacacacacatgcatttttttcttcttaatcattctctattaatgtttccagttcttcaaatcacctgaatattcatcttcrtcttgaatctttaagtgaacattcagaaaatgctaagatgattcatatagyttggacacttactttactgatcctactgtttttcatgggtcagaaagtacagtgactggattaatattgaatttctgaattaataaaacaacttcctaatggaaatttttcagggggaaaattgtttgacatcaaaaggcaccaccamccaacctcaagaacaaaagagtaaacataaacacataaataacactttcctagaactaacagttataggttaattaatagctcttgaagataaatgacttctattgaatcaataatatatcattaagttaagaagagaaaccaggtgcagtgtctcacatctgtaattccagcactctgggaggctaagataggagaatcacttgatgctaggagttcgacaccagcctggacaacrtagcaagaccctatctctacaaaaaatttaaaaataagccatcatggtggcatgcacctgtagtactagctacttaggacgctgaggtgggaggatcacttggaccccagactttgagtgagctaaggctacgctccagcctggtagacagagcaaggccctgtctcaaaacaaaacaaaaaacaaacaaacaaaaacagtataatcaatccaccaatgtactaattgttttacagacagttggtgacattattcagtttgacatctgacatatttaaaagcaattytagcaacttcggggaaaaaaaaataactcttaccaggaaataactagaaaaatcagcaaggtggaacaagaattaggccccattaatcacaaatactgtatcatttagagatattggaccatgatttttttcagcttttatcaagttgatttttaacatttgaaaatcttaatattttccattttaatttacagtacatgcagaaaamtaaatcaggaacacacacattccagacattttacagaccatttcatcattgttatttaagagctaaattcactgccatcatcatcgtcataatcatccagcaaacttattttgctactcatcacctttctagatctcaaactctcaacacgcaggaggtctagtkagaggggcaagtaaaaatgctaatgagactgggtgtggtggctcacacctatagtcccagcactttgggaggccgagacagggcgactgcttcagcccaggagttcagcttgggcaaccgtggtggcacatacctataatccctgctacttgggaggctgaggcaggaggcttgcttgggagcccaggagtttgaggctgcagtgagctatgatcatgccactgcactccaacctgagtgacagagtgagattccatctgtaaaaaaaagaagaaaaaaatgctaatcagcagagggtgacactggtaataagagttttgaagagaaatgcccatgtagtggattggagaaggaggcagccagcgtcaagggaacagaaagggggaaggagtagggaagaggcatgtgcacatgacatgcctaagacatgattcaccactggggattctgttctgagtaaaatgttgataaggtggccaccaaccttccctcaacacactcacattcaggaggctgtccagagcttcaggaaaaggtgctggcttgagggaaaacagaagaggaaagtaggtaagaaacagcagaggaatgaataggagagaggggtagtggtcagtgaaattctcaaaggatgctattgaaacatacagctgtgcaatttttgagtgaacttttttctgtgggggaattgttttggcaggtggcgcgatcatcctgaatacccatttcatgatgaatactgactgcmgggagttcctgaacagatttttcactcccaygagtgccaagacggtrcaatgsgtagtcccctakatgtgaaaatgaagagagagggttttaccatcctgagaagaaataatgatggaaacatgtttaatgtttgtgcagtgtaaatgactttgactcagtcacattgaagtaaaaatattaaaatctgttgaaataactcttaggaaattatcaactaattttttcagatcagtatcttctagattccagacagaaaaaaattacacttcagaaaagacatcaaaggcaacatatgacaacaagtaatttatgaatctgggtagtagcgttggtaatctgagttctttaagggttmacaggacaacgaagtgcatgtggcagtgtgctggcagtggccttgaggctttggaccattggttacaaaacagacacagccaagataagatccacacacacattattaacaaggaagtgatttgctgcaccttgagttgagaggrctacatgtagaaaagtcttaaaatagagctaaacaccacagtggtcaacaaagccatcataatgttggtgtttgtttccctccaatgtatgtatgtttagtttttatccaacctgaggaatgaaaacttaactggatctctcttgcatccttaaagggcctgagtctcaacatggctgctgatccatacttacacatcttactgtcaatcttgcctacattgattatagaaccactattacgtgaaaaggcttgaaacaaccaacatatacaaataaaaccctgccttgtaaaatagtaaaagagaagccatatattggcttttcttcttaacttgggagatatattgaaacaaggtgctttataagattattgtacttaagactttaatagtgttacttggatagcttatatgaattttgagaattttatatgaattttgagaaagcaagttcaaaagaactctggtaattttcctgtatgtacaatttaaagagtgaataagattattagaattcagcaatagagatatatctattttcaattcaactacagaaatatattttattggccgggygyggtggctsatgcctataatcccagcactttgggaggccmaggtgggcagatcaggaggtcaggagatcgagaccatcytggctaacaaggtgaaaccccgtctctactaaaaatacaaaaaattagccaggcgcggtggcgggggcctgtaatcccagctactcaggaggctgaggcagaagaatggcrtgaacccgggaggaggagcttgcagtgagccgagatagcgccactgcagtccggcctgggtgaaagagcgagactccgtctcaaaaacmaaaaaaaaagaaaagaaatatattttattcattcacattaggtcactgtcatactgtcataggatgagagagttcttcaaaaattatgttttcccaagatcagttgcttatagataatgttcaatgacctcaagacatatatttttgagaaattatcattttaaaaaatttggtctatactgattgttttcactgattccaatattattacttataacactgacctctggaaaatattttgttcacaagaaataataaagtataatgatttgttgcatcacatgaatctccattctgtttctaaggttggggcaggggaagaatcatctgaagccagttaaaaggcctttgatttaatcctgctgtacatttagcactgggaagagaggaaagaaaaggggatgtggtggctcatgcctataataccagcaatttgagaggccaaggcaggtggatggcatgaacccaggagttcaagaccagcctggaacaacatggcaaaaccccatctctaccaaaaaaaaaaaaaaaaaaatacaaaaattagccaggaatggtggcacacacctgtagtcccagctactcaggaggctgctatgggaggatcacttgggttggggaggcagaggttgcagtgagccaagattgtgccactgcactcgagcctgggtgacagagtgagattctgtctcaaaaaaaaggaaagattgaaggaaggaaggggaaaaaggaaggaaggaaggaaaaaagaaaggaaggaagggagggaggggaaagaaaaaggaaggaaggaagggagggagggagggagggaggggaaagaaaaagaaggagggagccgggcgcggtggctcacgcctgtaatcccagcactttgagaggccgaggcgggcggatcaagaggtcaggagatcgaggccatcctggctaacatgttgaaaccctgtctctactaaaaatacaaaaaattagccgggcatggtagcgggcgcctgtagtcccagccactcgggaggctgaggcaggagaatggcgcgaactcaggaggcggagattgcagtgagccgagatcatgccactacactccagcctgggcgacagagcaagattccgtctcaaaaaaagagaaaaagaaggaaggaaagaaagaaggaaggaaggaaggaaggagggaaggaaggaaggaagggagggagggagggaggcaggcagagagggaggkatggaaggagtgacggagggaggaaggaagaagaaaaaggtggtaccattatgaaagagcagaaacttgagtcctggtccctgttgtgaaagtccttaaaaatactttgagggtattagtgtagaggtgagaatggaaacaacacctatcgaagcatttttaaaagacagacattggaaaagagtcccatcatttgtcagcgaaaaggtatttctaaaaattgggggagcgaaatcctctcttagtcataacagagatggaggaaaaagatctggagacagaaagtaggaaggtcaggaaagaacaacagtctgatggaagcttctgcatgttccttctccctccactgtcacccctctcaagcttcccatctgttatgggttgaactgtgtcctctcaaaattcatatgttaaaaagcccagaccccagtacctcagaatgtgatcttatataaaaatagggccaggtgtggtggctcttgcctgttatctcagctatttgagaggctaaggtggaaggatcacttgaggccaggagtttgagaccaccctggtcaacagagtgataccttatctctacaaaaattttaaaattagctggatatggttgtgtacacatggctggttgtgcacacacatagcacccagctatttgggtggctgaggcaggaggactgtgtgagcctaggagtttgaggctgaagtgagctatgatcatgccactgcactctagcttggatgacaaagcaagacctcatctcttaaacataaataaaatagggtcactgcatatgtaattaattaagatgagatcatactggggtagggtggagtaaggtgaaccctaaaccaatgagactgtgtcctcataaaaaagggaaatttggacacagacaacacacagggtgaatgtcatgtgaagacgaaaacagagatcagggtgatgcttctacaaggtaagaaatgacaaagattgccaacaactacaagaaaccaggcaaaaagcatggaacagttacacctcagccctcagagggaatcaacattgccaacacctctatctcagacgtctagccttcaggactgtgaaacactacagttctgttctttaagccacccagtttgtggtacttagttatagcagttttacaaaagaaaacaccatccctcagtaaggatttcctgtctctccagttaacatcggctgtaaaaatggccttgccaaatcaatgctttactgagcccaagtattgacaaccaataatcttgatcttttggggacttacgcaaccccaaaaagatgtttgttaacccaaatcaatttttcttatcaatggcctctgatcagctatgtagaaagatccgtcaatagtgatgcaacctgcctgaaaaaggagaggagacccacggcatgccatgctcactggtccacagaaacataccgggctggagcggcaaggacatcctggcccagtgcacagaatgtttctggacctgcagtgtttcttgataagactgtttctttgctgggtacaatggctcacgcctttaatcccagcactttgggaggccgaagctggtggatgatatgaggtcaggagttcgagacaagcctgaccaacatggggaaaccctgtctctgctaagtacaaaaaaaaaaaaaaataataagatgggcatggtggcatatccctgtaatcccagctacttggaaggctgaggcaggggaatcacttgaacctgggaagcggaggttgcagtgagccgagattgtgccactgcactccagcctgggcaacacagtgaaactccactcaaaaaaaaaaaaggaatgtttcttgatctttttgtagttcatgagygtgatgactgagtgttcatgtgcatgtgtgagrcgtgccacccttaaaccttgttataacatcagcacattacccacatgacacgaaaaaaaatgtttcttatccctgacagttctccaagagggcctccttcaggcattgtcattccgtccacagtaacaacacagcaccaggagaggccattagaggggcataggcaatgatcctgtcttcagccttcaacactttgaggtgtgtgcattctgaagccacagtcatagggattaacaaagataaacaaactcatatttctaagacttgatatttctcagaactctcaaaatttcaggcttctgctaacttcaatgtcttcttcttgaatcagaatcctccctgaatccaaatagtagccttaatgtttctgtctctacacatgaaatccccaaattctcactttagcttcttccaccctagtctctgcctcccattcatgagaaacaggatgagagggtgatgcccaactaataggcttactctctcatctaaagggcattttggtaaaaggctttttctgttgggtcatatctcctctggcaggagctatatccccctggcttcctatttggattcttcagaatctcggcttgagctccggctgccctccctagatgtactaactgcctagcttggggcaaaattctccttttgcacagcacgtgcttgcctgattcagctcaaagcagatcagactttcttaataaggccacattctcttccctcgttgccttctgcactccaggcttgaaccaaaacttggttcctttatgaaggacttcaccgaaggccacaggaagcatccagcacaatcttctaacccagcaccaaagcctgagccttggcagacacatggtccaagttccaaaatataagttacactttaagtgaatctggtgaatgggctggagccttggtctggtggggagtgctggggggtgctggggaggagaggaagggacaggggtgtagggggaagcccttctatccgtctttttttaacagttacttctcttcctttttctgtctggtttctcataactccaaccagcagagacaagcccaggatgaagactgggcagtagcctgggaagaaccgggcttcggtaaccacaggggccccaggcggcccgggaagcgtggaggtcccagcgtgcgggcagaaagcccaagaggccgagcgctgtggcagctccatggggccctggcggaggcaagggcacagcgtggctggctgcatatgtgaacaaggtgagcggcggggccgcggtcgtcgcggagtctgagcacaccaaggagcgcatcagacttcaagggtcgaagtgcaaaggggcagtttttgatttcggggtcaaccaactaggactcgatgggtggaaaagaagtgcctaaacagcaagctgcttacctcaatctcggtcagaatttgtgggggccccatagatgtgggtgcctggcggggtcctggtgcggacagcggtctcgggtttgcgcactgcgcacagtatcctcatcacgacacgatggaagctgcggagctggggtcaaaataagaaggcgcagctgggacctggygacaccaagagaatggaagcccccagactcattgcgggtctctgccgggaagtgagtatgtaggcagcctgtgggcggaacctcaccttggccttgacggaaacgggctctgcgtttgcctttggggagaacaagatggggcagctgagcctcagcaaccacgcaggagcatccccagcaccgcacagatcatggacaacgggcagccaattactagaatggccagtggaaatgaattccgtataatgggcgacaaaggagacctctgttccttcgtgtgccctcaatgtggtcagctgggacccaggcacmgtgaatagttaaggctgtgagctggtgctggtgccacgatgagtggcccaccttcactgagaatgaaagatgggtagattctgcctgtaccaaaggtggttgtgagacccccagagcaaggcagggacccctccccatttcccttacatgctgtgctgactgaagctacattcaaccttgcagccacacaaccacaaacgtttcctttcacaaaatagaccaatcaaatctgagacagagtattctgagcacaagcatcttggctaacagtgggcactttgcaaaagatgctccccaatgcacttgcccagtaatgtcctagcctgtcctaacctrgcctttgcttcatttcagtagtaaaaagcacacccctgggtggagatttaagatgctaatgagacatgcatcacatgaagaagcatgtccagagactgcataggtgcaactgccaaaccaccccaaacatgcaatgatgtcacatggaggagctccaaagcaaatgaaaccccaaactaacctgcagtcagggagctagctgcaggtctcttcctgctgctacctccccttctgctcaagctgagagctccaataaactgccttgctcaagcccatctcagattcttggtctatttctatttactaagggtcaagaacccaccagccaataacggttgtgtaagacgtgacctgtaatgctaaccacacattgattctggactccaagaaatgagtcttctcctggggctttggtggctatggttgactgggccactcagagcagaaggatgagatggtccccgcttggtgaggttggagtctgacttccttgggtgtggggcatcccagatccatgttggttacacctggtcctttgctgtctgtgaagttggtagtctctttttctgggggagcccaatatctcccatgaatcttccatgtacctgaaagcagtgcaggacctctgcggctgcagaatccagagcctggcttgtgggaagagcagcaacattgtggccgccaatgagaacaccatcagctgagggccataaccaacctttaggtaattgggatacagggaccatgagcccaagtcttccactgcagcccaagaggtgaagactctgaatggcatcttttcaaagcaggtctccataggctactcacactccttggtgatagtgcgagatgaaagtgagaccaggaaagagaagatcaagaaactgctagagccggttgcggtggctcacttgtaatcccaacactttgggaggccgaggcaggcggatcatctgaggtcaggggttcgagaccagcctggctaacatggtgaaaccccgtttctactaaaaatacaaacaaatagctgggcatggtggcacatgcctgtaatcccagstaatcgggaggctgaggcaggagaatcgcttgaacccaggaggtggaggttgcagtgagccgagatcacgccattgcactccagtttgggcaacaagagtgaaactccaactcaaaaaaaagaraaaagaaaagaaagaaactsctagaatacaacccctgaaccctttgatgctcctggggactcctgcaactccacccgtctcccagaagctgtcatttcctgtgcagtgggaggtgaagtcaaacaaggaattttaaaaagcaaaagttagccaaagttgcatttttgttagactccctgaggttccatttttacaagggatccaatgttaattatccttttctgcatacttttaaaagtctgtttttttctcttcatgtttaattaaaatatttgctcatatttggaaaaaatatgaattgttataaaatagtggaaaagatatccagactcccagtgaggactgtgtttcccattatgcttcacccaaattaactcagtcaattctaactttcaggagtattcacttgttatgccccacttccacatagcgatttttccatcaggatgttattagttcctagtaayagaaatgcaattcagactagtttaagcagaaatagtgaattcactttgtcacagaactggaarcaaagaagtgcaggggtaaagtggctgtaagcagctagaactagggctcaagcagtgtgtttacaacttgtgactgttttcaccccgttggactagctgtctccagacagcaggcatgaaagcaggcaagatagctctcagcaacactctccttcactcagattaggaacccagaagagagtgagagtctttggtaatagctctgtcaaggaagtaatcctgggaagaactctgactggccaacatgcatcatgctggaaccaatggtgatggcctggggcagactgaatggaagggcctgagacataaactcatccctgtgcagagaagaagcaagagaggaatgagagagacagtgggagggggatggaaaggcaagagggtaggagcgagtggaacaagagcagcactaaggagaaaggaatcataaggaactacaatcctgcctcaatcaccagaaatacgttgccccaagaagcaggcaaaataagagatgtctgcaacagggactttcagggcgtggagataaataaaatttaaaagctattggaaccccccccagaacacattaagccctgagtgagatgtgactatgatctgagtcacacatggttacaacttctgttctcagatagattaactcactttcttatttttcttgttctgcacaatgactagagtgaattcaactacaccacagataaatgcctcctgccttcttcattaatggccctggtcatagattcacttcccctttgctgcctcactttgcttagaccagatgacaaaaaacgcatgactattacaccctctgtgaaaagtgttaaatgtccccttcccaaaaggaaacactgcctataaccaatcaaattgctgtaactatgcaccaaccttgtgtaaatagtgttgtaatcccactaaaatctctgtctctgtctaaataaatgaaatcttaacttccctacttcaaaatgctgactccattcctttggagttggtgtttctgggtggtccgtcctcactgtttgagcttgaataaactctctttaaattagattctgaaccttttgattattttaggttgacaggagttttggagtactaggttttagcttcctgcttccctcacttcagattcccaaaaaaatgatatagtagaaatctccatcagcactgaaaattaagaaggttgctgcctatcakagggtgtaaatgagaagaaactgtcaaagtataattttttacaaatcaggccgggcatggtggctcacacctgtaatcccagmactttgggaggccaaggcaggcagatcacctgaggttgggagttcgagaccagcctgaccaacatggagaaaccccgtttctactaaaaatacaaaattatccaggcgtggaggcgcatgcctgtaatcccagctactcgggaaggctgaggcagaagaattacttgaaccttggaggcagaggttgtggtgagctgagattgcgccattgcactctaacctgggcaacaagcgcgaagctccatctcaaaaaaaaaaaaaatcaaaaatatgatttttatgtaaatacaaaatgagtacataccagtgatttaattatctcattaatgatggaaacagaaaaacggtaagagaaataccaagagaattggagaaagtaaaatgtttcagcagctgaaagaaaggatgcttggatcaaattgctcatttagctccaaaccagtttagccttctgaaaggcaatacaactatataacttttgagtttatcttttctaccagatttaataatttatatctctacaataaaagatccatttgcattgttattggacaagaatcattttcatcactaccaggtttctattagttaataactactcttacaaaattgtaaattaccctattaaacagttcactcagctgayctgggaartccaaaccctgcaccttccaaagaaaggtctggccattaaccacttattgggagataacctctaagcccttggaatgtcattcctgaraagaatgtctttgctyatctggggctttgggccacactagacagtttatgctaacaatgtgatttatgaaggggggtggggaggcaggtggctacatgatgtcagtttgactccaaagggctggagactgagtaactaaggtcagctatgtgggcactccaagcctatatgactgacccccaataaaaaccctggatctagggccgggcgtggtggctcacacctgtaatcccagcactttgggaggccgaggcgggcgaatcacaaggtcaggagatcgagaccatccgggctaacatggtgaaacgctgtctctactaaaaatacaaaaacttagccgggcatggtggcgggtgctggtggtcccagctactcgggaggctgaggcaggagaatggtatgaacccgggaggcagagcttgcagtgagccgagatcgygccactgcttccagcctgggtgacagagcgagactccgtctcaaaaacaaaaaaaaacaaaaaacgctggatctcaamgtttagataagtttccctggttgacaatactacttacgtgttgtcacacatcactgctggaaaagttaagcactatctatacaactccactgagagagaacaagtagaaatttgtgtctgcactctctcttggactctgccatattgtccttttaccttggataataaatctaaattctttttctataataaaccataactatgagtagaacagcttttctgagttctgtggttcyttccagcaaattattgaacccgagggtggtcttaggaaccctataccacaaataattaacagcaaatcaaaaaaagttacaaagtttcccctgaggggaatcaktccttgaggaagcctgctagacaatccccacaacaacactgaaagtsgacacattttttttcatccactttcaaattttagataatttttcttaatgtatcttagagaaaatacgaagtgtgagactttaatgagctgtggcaggaatacaataatacctttaatgtcatgacaggcccttacctactctacaaatttgtggtaacaaagtatattgaaaactgtatgaatcaccctgatgcccacaraaaatagatgactgtgcacactgagcactactgaattcacatcccttgataaagaattttgccttcatattaaactatttgtaatttatgttgttatacatatatatgagtatatataaatacacacactcacagtaaagtacataaagtacactaatctgaaatgtacagctcagtgatattttttacatatatacacacctgtattattccattcttgcattgctataaagaaatacctgagatggggtaatttataaagaaaagaggtttaactggctcacagttccacaggctgtacaggaagaatgatgctggccatctgctcagcttctggggaggcctcaggaaacttgcaatcatggcgggaggtgaaggagaagcaggctcatctcacatggcccaggcaggagcaagggagtgcagtgggggttggggaggtgccacacacttctcaacaaccagatttcattagaactcttatcaagagaatagcaccaagggaatgatgttaaaccattcatgaaggatccacccccatgccccaatcacctcccaccacgccccacctccaacactggggattacaatttgacatgagatttgggtggaacacagatccaaaccgtatcattctgcccctggsccctcccaaatctcatgtccttctcacatttcaaaatacaatcatgccctcccaacagtccttcaaagtcttaactcattccagcattaactcaaaagtccacagtctcatccgagrcaaagcaagtcccttccacctacragcctgtaaaataaaaaacaagttagtcactcctaatataggcattgggtaaatactcctgttccataagggagaaattggccaaaataaagggaccacaggccccatgtaagtccaaaacccagcagggcagtcattaaatcttaaagccccaaaataatctcctttgactccatgtgtcacatccaagacacactggtggaagggttcccccaaagccttgtgcagctccacccctgtggctttgcagagttcatccctttcagctgctctcaagggctggcattgagtgcctgaagcttttccaggctcagggtgtgagctgtcagtagctctactattcagaggtctggagaatggtggccttcttctcacagctccactaggcaatgccccagtggggactctgtgggggctccaaccccacatttctcctctgcactgccctagtagacgttctccatgagggctatgcctctgcaatgggcttctgtctggacatcaaggcttttctatacatcttctgaagtctaggcaaaagctcccaagactcaactcttatattctgtgcacctgaaggcttaacaccacatggaagtcaccaaggcttacagattgcaccctctgaagcagaggcccaagctgttcctggtcccctttgatccacggctggagctggagtgactgggatggagggagcagggtcccaaggttgtacagggtagtggggcccagkgcctggcccacaaaaccattcagtcctgctatgcctctgggcctgtgatggaagyggctgcgaaagtctctgaaatgccttcaagacctcttgcccattgtcttggctgttagtacttggctcctctttacttatgcaaacttctgcagcctgcttgaattcttcccctgaaaaatgggtttttcttttctgccacatggccagtctgcaggttttccaaacttttatgctgtgcttgcgttttaaatataagttccagtttcagatcatttctttgctcatgcatataagcataagtggtgagaagcagccaaaccacatcttgaatactttgctgcttagaaatttcttccaccagataccctaaatcatcactctcaagttcaaagttccacagatccctagagcaggggcacaatgcagccagattttttgctaaagcatagcaaaagtgaccattaccccagttcccaatacattcttcagttccatatgagacctcctcagcctggacttcattgttcatatcactgtcagccttttggtcacaagaatttaacaagtctctaggaagtgccaaatttttcctcatcttcctgtcttcttctgagccctccacactcttccaacctctgcccattacccagttccaaagtcacttccacattttcaggtatctttatagcaatgctccactcttcagtaccaatttttgtattagttcattcctgcactgttataaagaaatacctgagactggtaatttataaagaaaagaggtttaattggctcatggttccagaggctgtacaggaaacatgatgcaggctatctgctcagcttctagggaggcttcaggagacttacaatcacggcaaaacacaaaggagaaacaggctcatcttatacagccagagcaggaacaagagagggcaggagagaagtgctacatacttttaaacagcaagatttcatgagaactctatcactagaacagcaccacgggggtggtaccaagccattcatgaaggatccaccccttcatgatccaattacctcctaccaggtctcccttttaacattggggattacaattagacatgagatttgcggggggacacagatccaaaccataccaacacccatgtcactgacacccagatcaagagataaaatatttccagcactccaggaggttctcacctgcttctcaattcatgtcctccttccagagaaaccaggatattatgacttctcttatttgtggcatttactaactttcttagcaaagaaacttcagctttgtttagttcccagtgattgcaaagtggtatatcctgaagattattggaaaacgacatgagggctagattctgttatttgtagacttttttatgcaaaaataatttgagcttagtcatgcttttatacaagtaatgtatttttgktttatttttataatatatatcagaagaaaagggacagacatgatgttcatgcctgtaatcccaacactttgggaggccgaggcaggagaaccacttaaggccaggagttcaagaccagcacaacattgtgagatctcacctacacaaaagaagaagaagaatctgagactttgttgggatgttttgtttctttgttgccttttgtctaaaaacttatttactaaagatttagaccaaaattcataattactatgtttataaataataatctaagactagaaactatggacatacaatcccctaggtatagttatgtaatcttttggttaatctaaccttgatttcatcactaaacttggctatatctcaaataattttttaaatattttctttttttttcttcagttgttcttactggagattttctgtttcagaaatctctgcctaacattattcatgtgtggctaagaatccataggtggctttttcccctatatttttagctttcttcaggtataactgacatataaaaattgtatatgttcaaggtatataatgtgatattttgatatacctatacattgtgaaatgatttgcacaattaagctaattaacgtatccattatctcacagttaccttttcctttgatttttcttgtgtgtgkgtgtgtgtgtgtgtgtgtgtgtgtgtgtgtgtgtgttgagaatactcaagctctatcttagcaaatttcaagtatacaatatagtattattgaccatagtcaccatgccataccttaggtctccagaacttattcatcttctaactgcmaggttgtatcctttgaccaacatctcctcatttctcccctacctcaaccctgttactacccttctattctttgtttctatgggttcagctattttagattccacatgtaagtattcatcttcttatatctgacatttaattagcaaaatctcctccagattcatccatgttgttgcaaaaggtaggatttctttctttgttcaggctgaataatagtttgttataataagtgtgtgtatgtatacttgatatatatatcaagtataaatatatatttggtctctgtccctggttcctggcacacagctgctaaaatccttggaatctacaaagtgatatgtctttttgtatgctaatgagatggctgatcactgagtactccaaataaccacaggatagttgccagggctgccaactatgtgattggagggttaaaactttcagccccacccccacctctaggaagcrgagaggggttaaaggttgatttggtcatcaaagaccaatcatacctacctaatgaagtatgtgtgtattacacatatatatgtataatttccttgtccattcacccactgacagacatttagattgtttctgtatcttcgctatcatgaaaaatgctgctgcaatgaacatgggagtccagatatccacctttttcaagatcctgattktggttcttttggatatacccaaaagtgggattgctgcgtcatgtggtagttttatttttaattttttgagcaccctttatactgtttcccayagtggctgcaccatttcacattcccaccaatagcgtacaagagttccagtttctccacattcttgccaatacttgatatctttcatggttttgataattgccatttattgcctttttctgttgmgtatttgtatgtcttccttggaaaaatatctgttcaggttctttgctcattttaaaatcaggttgtttttctactactgagttgtaagagttccttatatattttggatataaactccttataggatctatggtttgtgcatattctctctcattctgtgggctgacttttcgttttgctgattgtttcctttgctttgcagaaactttttactttgatataatcctgcctgcttatttttgcttttgttgcttgtgcttttggtgtcattgacaagacctctgtcatagagcttttcccctatattttcttttaggaattttatggtttcagatcttgcatttaaatctttaatcaagtttgagttgatttttgtgcatggtgtaagataagaatccaatttcatttttttgtttctttttgaatgtggatatccaattttcccaacatcattcactgaagagactattctctctgcattgtatattcttggcatctttattgaagattacttgatcatatatgtattggtttatttattggtttcctgttacatcccattggtttatgtgtgtttgtttttatgcttgtatcatattgctttagttactatcactttgtaatgaaatttgaaatcagaacacaaagcctccagctttgttcttcttgatcaagattgctttaactattcagggtctcttgaggtgccatataaatgttatgattttttttctatttccatgaaaaatgacattggcattttcataggaattgcattaaatctatagatcactttcagtaatatagacaagtttccaatattgattcttctgatccataaacatgaaatayctatttatttgtgtcttcttcaattttattcattaattcattatgtttcatagttttcagtatacagatatttcacctttttggttaaatttatttctaattattttattccygttgatgctattataaatgtgactttttaaaaaatttcttgttcagatagtttattgccaaagtatagaaacacaagtgatttttatatgtagatgctgtatcctaaaacttaactgaattcatttattaattctaacacttttgggtagaatctttaggttgttctatayataaaatcttgtaatcagcaaacagagacattttgacttcttttctgatttggatgacttttatttctttatgttgcccaattcctttggctaggacttcagtactaygttgaaaaaaaaagtggtgagagtgagtgtaatattgtgatataataaaatatatatatacttggtctctgtccctggttccaggcacaaarctgctaaaatccttgaaatctgcaaagcgatatgtatttttgtatgctaatgagatggctgatcactgagtactcctagataaccacaggatagttgccaggggtgccaaccatgtgaytggagggttgaaactttcagccacaccccccacctctagggaggggagaggggttgaaggctgatttggtcatcaaaggccaatcatacctacctaatgaagtctccattaaaaacctaaagatggctgggtgcagtggttcatgcctgtaatcccagcactttgggaggctgaggcaggcagatcacctaaggtcaggagtttaagaccagcctggccaacatggtgaaaccccatctctactaaaaatacaaaaattagctgggcattgtggtgcgtgcctgtagtcccagctacttgggaggctgaggcagcagaattgcttgtacccaagaggcagaggttgcagtgagctgagatcacactgcagcactccagcctgggcaacagagaaggaactctgtctaaaaacaacaacaacaataacaacaacaacaaaaacctaaagagacaggttttggagagctttctggttggtgaacacatttacatactggaagggtagtgtaccccaactccatagggatgaaagctcctatgctccggacccttccagactccaccctatgtatctcttcatctggctgttcatttgtattctttaaaatatcctttgtaataaataggtagatgtaagtaaagtatttccctgagttttgtgagccactctagcaaattaatagaayccaargagggggtcttgagaacccyaatttagagctgaccggtcagaagcacaggtcacaacctgaggcttaccattgacatctgaaatgggggcagtctcaaggagctgagtccttaacctgtgggatctgactctatctctaggtagatggtatcagaattgagttaagttgtaggacacccagttggtgtctgctggagaatggcttggaagtctggtgaagagcccckacacattttgcattagaagtgttgtgctgaggggtatgtgggattaggaaaaacacttggtgtttcccatttcttaatagtggacatccttgtcttgttcccaatcttagataaaagatattcatcttttcaccattgcgtatgatgttagctgtgggctggtaatatatggactttattgtgctaaggaacattccttttataactaatttgttcagagttttaatcattaaaggatgctgaattttgtcaaatgctttttatgcatctattgacatgatttttgtccttcactttgttaatacaatgtataacatttactgatttgcatatgttgagccatctttgcatcccaggcataaatccaagttgatcatggtgagtgatccttttaatatgcaattgaatttggtttgcaagtctattgttgaagatttttgcgtctacgttcctcaggaatattgggctgtaatttttttttttttttttggagtgttcttgtctggctttcatgtcaggataatattggcctcacaaatccagttggaaagtgtttcttcctctttaattttttgaggagtttgagaagtactagtactcatgcttccttaaatgttggtagaattcagcagtgaagccatcaggtctaaggcttttttttcttttttctttttcttttttttttttttttttttgagatggagtttcgctctttcgcccaggctggagtgcagtggtgcaagctctgctcactccaacctccgccttccagtttcaagcaattctcctgcctcagcatcccaagtagctaggattacaggtgcccaccaccacacccagctaattttcatrtttttagtggagacagggtttcaccatgttggtccggctggtctcaaactcctgacctcgtaatcggcccacctcggcctcccaagtgctgggattacaggcataagccaccacattggcttattagtgatttaatatttaatctccttactgatctgtccgaattttctatttcttcatgattcagtcttgtcaggttgtatatttctaggaatttatctgtttattctaggttatccaatttgttgttatataattattcatagtagtctcctatgatccttgtatttccttcttttttttttttttttttttttttttkgacagagtctcaccctattgcccaggctggaatgcagtggcgcgatctcagctcactgcaccctctgcctyttaggttcagattattcttgtgccttagcctcctgagtagctgggacaacaggcgcacacractatgcccagataatttttgtatttttagcagagacggggttttgccatgttggccaggctgatctcgaactcctgaccttaagtgatccacccaccttggcctgggccactgtgcccagccaatcctttgtatttctgtgttatctgctgtaatggctcctctttggtttctaattttatwtgagtcatctctcttttgttcttaggctagctaaaggtttgtcaattttgtttatgtcttcaaaaaagttttgttgatcttttctattcttttcctaktctcttttttttttcctgctctgatctgtattatttcgtttcttctactaacattgggcttagtttgttcttcttttttgagttccttaaggaataatgttagattacttatttgagatccttcttcttttttaatgtaggtatttattgctataaacttccttgttggaactgtttttactgcattccatacattttgttatgtagggtttccatttttgtttgtctcaatatattttttttaatttctccttcaatttcttctttgacccattggttgttcaggagtatgatgtttaatttccatatatttctgagtttccagttttccttctgttatttatttctaatttcataccactgttgttggaaaagatagttgacatagtttcattttttttaatttttataaaatatacaaaaatatacatagatacatataatagatttttataataaatacattaaaatatacataaatagagtcttgatacgttgaccaggctggtctcaaaytcctggcttcatgcgatcctcccatctcagcctcccaaagtgctagaattacagacaggagccaccactcctgaccacattgtttcaatttttgaaatttgttaagacttgttttgtggcctaatatatgatcttagagaatgttttatgtgtgcttcagaagaatgtgtatcctgctgctgttggatggaatattctgtatgtgtctgttaggtccatttagtctaaagtatagttcaagtccaatgttttcttattgattttctgtctgraaaatctatccattgttgaaagtgcaatgttgaagtctcctactattattgtcttgctgtctacttctcccttcagacctattaatattttctttrtgtatttatgttctccartgttgggtacataatagtgtgtgtgtgtgygtgtgtgtgtgtgtgtattatatattgttccatattacctattgttctatcatcttgatgaattgatctctttatcacgatataatggcactgtatgtctcttttcacagtttttgacttaaaatgtatttgtctgacataagtgtggctactcctcctctcttytggtttccttttgtatgggatgtctttttatatctctttactttcagttcacgtttattcttgaagytgaagtgagtgttttgtaagcagcatagagttgagtcttttttctatcctttcagccattccatgtcttttgatcagtgagtttaatttatttaatgtaaaataattactgaaagtaaggactatttccattttgttcattgttgtctggctgtttggcagatcctttgtttctttcttcctctcttgctgtctttctttgtgatatgatgattttctgtaatggtattgtcttattctgttttgtattgctatgaagggatatccgaggctgagtaatttttaaagaaaaaaggtttctttggctacaattctgatgtttggaaaagttcaagattgggcatctggtgaggccatttatggtaggaggtgaaggggagctggaatatgcagagatctcatggcaagagaggaagccagagrsggaggtgcaaggctctgtttaacaattacctctcatgggaactaacagagtgagaacacagtcacccccaatggagggcattaacttactcatgagagatctgcccccacaatccaaacatctcacattacgccccacctccaacatagaaaatcaaatttcaacatgagtccaaaataccacatgttctcatttataagtgggagctaagctatgggcacacaaaggcatacagaatggtataatgggcattagagactcagaagggaagagggtgagagggggctgagggatgaaaaactacctattgggtacaatgtacactactcaggtgacagatgcactaaaatcctagacttcaccactatccaattcatccatgtaaccaaaaaacactagtgcctctgaagctactgaaatttaaaagttttttaaaaattcaacatgaggtttaaagtagacaaaccatatttaaactataactagatacgctttcattcatttctctttatcttttacgtatctttgataggtcttttctttgtgattaccatgaggcttacatataacaccttatagttataacatgctattttaagcttatagtaatttaaatttgatcccctccccaacattctctatatatattttaattatgacatttgaagaaacttgaaaaaaataaatattttatacacacacacacacacacacacacacaaagtcttactctgttacccaggctggagtgcaatggcatgatcttgactcactacaacgtccacctcctgggttcaagcagttctccaacctcagcctcttgagtagctgggattacgggtgcatgcaaccatgccctggtaatttttgtatttttagtagagatggggtttcaccatgttggccaggctgctctcgaactcctggcctcaagtgatctgactgcattggcctcccagtgtgccgagattacaggtgtgaaccaccacgtctggccacattctgtatttttgatgtcacaatttgcatattcatctatgctaagaactgactcagataagtgatggtttgagataagcctagataggtaaataggacatgacagaactttagtcttgtttttcctagaaggatatagaaaatcaytgaagcaatttagacgaggaagtaatactagaacaggcaatacaacatctcaaattcattttgagttctaactctaaggaacacattttgcacaggtttatatatatgttaaatgcatttttcttggtgcaaagtcatcaaaagtacatactaacagrgctttcttctattacataaacatctgccatttacaataaacaagggaagtattaaaataagagacagaagatggttttcttcaatttatgtaatctgtgtctagatatcaagacactaataatcaaccttaatcattctaataaattcaagatatggaacacagaggtgcagatacacaacacaatttgcaacacttttcatcttctcaactaaaataatccatataaaattatggttatttattttagagaaggagtctcacagtgtcatccaggctggagtgcagtggcacgattacagctcactgcagaactcctgggcttaygcagtcctcctacctcagcatcccaaatagcaggacttcagttacacaccacaatatctggctaattttttttttgagggcgggaggcggtaacaaagtctcactcttgtygcccaggytggagtgcaatggcatgatctcggctcactgcaacctccgcctcccaggttcaagcgattctcctgcctcagcctcccaartagctgggattacaggtgcctgctaccacgtccagctaatttttgtattttttagtagagacagggtttcaccatgttggccaggctggtctcgaactcctgacctcaggcgatctgcccrcctcgggctcccaaagtgctggrattataggtgtragccaccgtgcccagtcaatatctggctaatttttaaattttttrtaaagatagagtctcactctattgaccagggtagtctcaaactcccggtctcaagggatcctcctgttttggcctctcaaagtgctgagattacacggatgagccactatacccagaacatacctatttatccatttaaaaaaatccacattatgtttggccaggttttacagagcacttttgatcacattacacaataggaagggcaagtaatayaccaatttttcacttgtaaaaatggagactctgtgttttttttcagcaacacttacataaacacagtagaaatgtaatacttggttgtggaatgcctgaacaaatgaaaaataaatacatatgtctgtaattttttwaatttatttttaattgacaaataaaaattatacatatttatagtgtatgacatgatgttttgatacatcttttttttttttttttttttttttgrgacaggatctggctctgtcacccagtctggagtgcagkggtgcaacctcggytcactacaacctttgcctactgagcttaagccatcctcctacctcagtctcctgagtagctgggactactggcacccaccaccacgcccagctaatttttgttattttttgtagagacggggtttcgccatgtttcccaggctggtctcaaactcctgagctcaagcaatctgcccaccttggcctcccaaagkgctgagattactggcgtgagcccctgcacccagccttgatacatctttttatattgtgaatccattaacaaattattgtagttacagttttttkgttttgtgkktttttttttttttttttttttttagagacagggtcttgctgtcattcaggctggactgcagtggctcaatcatagctcactataaccttgaactcctggcctcaagagatcctcctgcctcagcctcccaaagctctgggatcacaggtgtgagccaccatgctcagcattayagttatttttaatgttcwtttcttttaacctttgtgttgaagatataagtgacagatgagtgatatacgtatttatggttttattcctttttctactaatcaattagtggtgtatcgagttatttttgcttcttttctggattttacttagagcaaatttcccaaaggaaaagaaaatgtattgatttgttctactgttttttgtttgyttgttttctgtcttcttttactgatatcttttgttggtttttcttagcttgtcgataaatttctaacttcttaggttgaatacctatttcattctttttttggtttttcttctcatttagtaatataaacattgaawacaataaatgtttctctacgtactgttttggttaagatcttataaatgtaatgttttcaattttgttattttctagacattctgaaatttgattttggtttcttctttgattaacagttgttcatgagagttcttatttattttaatttctgatgtagagctttatcttctatcttggatattttatttttmatcatgctgagctcagataatatcatcaatcaatgtttttaatatttcatgagattgtgacaagattattctaaagtactgggttagatgtaatggacatacagtcatgtgttatagatttttatcatctaatattggaaaagttgttttgagtgagtggtttcattcctttaccgtagcgatttttttttggttttattattattattattattattattttttgagacagagtcttgctccrtcacccaggctggagtgcagtggcacgatcttaacccactgcaacctccacctccctggttcaagagattctcctgcctcagcctcccgagtagctgggattactggcatgcaccaccacgcctggctaatttttgtatttctagtagagatggagtttcactatgttggccaggctggtctcaaactcctgacctcaggtgatccgcccgcctcggcctcccaaagtgctgggattacaggcgtgagccactgcgcctggccagatttttaactgtggttaattttgtcccacgctccctcaggggacgtttggcaatgtctacacatatttttggttgtcacaactagggtgggggacacagaggtggcattagcatctaataggtagaggatagggatactgttaaacatcctacaatgcacaggataacttcccacagcaaataattatctggcctcaaatgtcaacagaactggggctgaggaagcctgtta
